United States Patent Application Publication US 2023/0026259 A1 - sequence listing, part 77

SEQ ID NO: 180506 - DNA, 1600 bp, Homo sapiens
  Payload ID: 15549
  Gene Symbol: SERPINA7
  Gene Name: serpin peptidase inhibitor, clade A (alpha-1 antiproteinase, antitrypsin), member 7
  Uniprot ID: P05543
  ENST ID: ENST00000372563
  CDS Start-End: 59-1306
ttgctttctgagagatgcaggtggattcttgggcatttgctattaacttccttccaaaatgtcaccattcctgtatctggttctcttggtacttgggcttcatgctacaatccactgtgcatcacctgaaggcaaagtaacagcctgccattcatcccaaccaaatgccactctctacaagatgtcatccattaatgctgactttgcattcaatctgtaccggaggttcactgtggagaccccagataagaacatcttcttttcccctgtgagcatttctgcagctttggttatgctttcctttggggcctgctgcagcacccaaactgagattgtggagaccttggggttcaacctcacagacactccaatggtagagatccagcatggcttccagcatctgatctgttcactgaattttccaaagaaggaactggaattgcagataggaaatgccctcttcattggcaagcatctgaaaccactggcaaagttcttgaatgatgtcaagaccctctatgagactgaagtcttttctaccgacttctccaacatttctgcagccaagcaggagattaacagtcatgtggagatgcaaaccaaagggaaagttgtgggtctaattcaagacctcaagccaaacaccatcatggtcttagtgaactatattcactttaaagcccagtgggcaaatccttttgatccatccaagacagaagacagttccagcttcttaatagacaagaccaccactgttcaagtgcccatgatgcaccagatggaacaatactatcacctagtggatatggaattgaactgcacagttctgcaaatggactacagcaagaatgctctggcactctttgttcttcccaaggagggacagatggagtcagtggaagctgccatgtcatctaaaacactgaagaagtggaaccgcttactacagaagggatgggttgacttgtttgttccaaagttttccatttctgccacatatgaccttggagccacacttttgaagatgggcattcagcatgcctattctgaaaatgctgatttttctggactcacagaggacaatggtctgaaactttccaatgctgcccataaggctgtgctgcacattggtgaaaagggaactgaagctgcagctgtccctgaagttgaactttcggatcagcctgaaaacactttcctacaccctattatccaaattgatagatctttcatgttgttgattttggagagaagcacaaggagtattctctttctagggaaagttgtgaacccaacggaagcgtagttgggaaaaaggccattggctaattgcacgtgtgtattgcaatgggaaataaataaataatatagcctggtgtgattgatgtgagcttggacttgcattcccttatgatgggatgaagattgaaccctggctgaactttgttggctgtggaagaggccaatcctatggcagagcattcagaatgtcaatgagtaattcattattatccaaagcataggaaggctctatgtttgtatatttctctttgtcagaatacccctcaactcatttgctctaataaatttgactgggttg

SEQ ID NO: 180507 - DNA, 1423 bp, Homo sapiens
  Payload ID: 15550
  Gene Symbol: SERPINA9
  Gene Name: serpin peptidase inhibitor, clade A (alpha-1 antiproteinase, antitrypsin), member 9
  Uniprot ID: Q86WD7
  ENST ID: ENST00000298845
  CDS Start-End: 40-1047
agctacaaccaagtaagcaagtgtcagggctcaccaaccatgcaaggacagggcaggagaagaggaacctgcaaagacatattttgttccaaaatggcatcttacctttatggagtactctttgctgttggcctctgtgctccaatctactgtgtgtccccggccaatgcccccagtgcatacccccgcccttcctccacaaagagcacccctgcctcacaggtgtattccctcaacaccgactttgccttccgcctataccgcaggctggttttggagaccccgagtcagaacatcttcttctcccctgcgaggatcaacagccatgtgaaaaagaagacccaagggaaggttgtagacataatccaaggccttgaccttctgacggccatggttctggtgaaccacattttctttaaagccaagtgggagaagccctttcaccctgaatatacaagaaagaacttcccattcctggtgggcgagcaggtcactgtgcatgtccccatgatgcaccagaaagagcagttcgcttttggggtggatacagagctgaactgctttgtgctgcagatggattacaagggagatgccgtggccttctttgtcctccctagcaagggcaagatgaggcaactggaacaggccttgtcagccagaacactgagaaagtggagccactcactccagaaaaggtggatagaggtgttcatccccagattttccatttctgcctcctacaatctggaaaccatcctcccgaagatgggcatccaaaatgtctttgacaaaaatgctgatttttctggaattgcaaagagagactccctgcaggtttctaaagcaacccacaaggctgtgctggatgtcagtgaagagggcactgaggccacagcagctaccaccaccaagttcatagtccgatcgaaggatggcccctcttacttcactgtctccttcaataggaccttcctgatgatgattacaaataaagccacagacggtattctctttctagggaaagtggaaaatcccactaaatcctaggtgggaaatggcctgttaactgatggcacattgctaatgcacaagaaataacaaaccacatccctctttctgttctgagggtgcatttgaccccagtggagctggattcgctggcagggatgccacttccaaggctcaatcaccaaaccatcaacagggaccccagtcacaagccaacacccattaaccccagtcagtgcccttttccacaaattctcccaggtaactagcttcatgggatgttgctgggttaccatatttccattccttggggctcccaggaatggaaatacgccaacccaggttaggcacctctattgcagaattacaataacacattcaataaaactaaaatatgaattcatctgtcaacaga

SEQ ID NO: 180508 - DNA, 1755 bp, Homo sapiens
  Payload ID: 15550
  Gene Symbol: SERPINA9
  Gene Name: serpin peptidase inhibitor, clade A (alpha-1 antiproteinase, antitrypsin), member 9
  Uniprot ID: Q86WD7
  ENST ID: ENST00000337425
  CDS Start-End: 76-1383
cagctggagggagaggagagattaaagtgaggagagagctacaaccaagtaagcaagtgtcagggctcaccaaccatgcaaggacagggcaggagaagaggaacctgcaaagacatattttgttccaaaatggcatcttacctttatggagtactctttgctgttggcctctgtgctccaatctactgtgtgtccccggccaatgcccccagtgcatacccccgcccttcctccacaaagagcacccctgcctcacaggtgtattccctcaacaccgactttgccttccgcctataccgcaggctggttttggagaccccgagtcagaacatcttcttctcccctgtgagtgtctccacttccctggccatgctctcccttggggcccactcagtcaccaagacccagattctccagggcctgggcttcaacctcacacacacaccagagtctgccatccaccagggcttccagcacctggttcactcactgactgttcccagcaaagacctgaccttgaagatgggaagtgccctcttcgtcaagaaggagctgcagctgcaggcaaatttcttgggcaatgtcaagaggctgtatgaagcagaagtcttttctacagatttctccaacccctccattgcccaggcgaggatcaacagccatgtgaaaaagaagacccaagggaaggttgtagacataatccaaggccttgaccttctgacggccatggttctggtgaaccacattttctttaaagccaagtgggagaagccctttcaccctgaatatacaagaaagaacttcccattcctggtgggcgagcaggtcactgtgcatgtccccatgatgcaccagaaagagcagttcgcttttggggtggatacagagctgaactgctttgtgctgcagatggattacaagggagatgccgtggccttctttgtcctccctagcaagggcaagatgaggcaactggaacaggccttgtcagccagaacactgagaaagtggagccactcactccagaaaaggtggatagaggtgttcatccccagattttccatttctgcctcctacaatctggaaaccatcctcccgaagatgggcatccaaaatgtctttgacaaaaatgctgatttttctggaattgcaaagagagactccctgcaggtttctaaagcaacccacaaggctgtgctggatgtcagtgaagagggcactgaggccacagcagctaccaccaccaagttcatagtccgatcgaaggatggcccctcttacttcactgtctccttcaataggaccttcctgatgatgattacaaataaagccacagacggtattctctttctagggaaagtggaaaatcccactaaatcctaggtgggaaatggcctgttaactgatggcacattgctaatgcacaagaaataacaaaccacatccctctttctgttctgagggtgcatttgaccccagtggagctggattcgctggcagggatgccacttccaaggctcaatcaccaaaccatcaacagggaccccagtcacaagccaacacccattaaccccagtcagtgcccttttccacaaattctcccaggtaactagcttcatgggatgttgctgggttaccatatttccattccttggggctcccaggaatggaaatacgccaacccaggttaggcacctctattgcagaattacaataacacattcaataaaactaaaatatgaattcatctgtcaa

SEQ ID NO: 180509 - DNA, 1333 bp, Homo sapiens
  Payload ID: 15550
  Gene Symbol: SERPINA9
  Gene Name: serpin peptidase inhibitor, clade A (alpha-1 antiproteinase, antitrypsin), member 9
  Uniprot ID: Q86WD7
  ENST ID: ENST00000380365
  CDS Start-End: 80-1333
tctgggtcacatttttgtggatacagaagccaggctggagtggaccagtgagtgagttggagacatattttgttccaaaatggcatcttacctttatggagtactctttgctgttggcctctgtgctccaatctactgtgtgtccccggccaatgcccccagtgcatacccccgcccttcctccacaaagagcacccctgcctcacaggtgtattccctcaacaccgactttgccttccgcctataccgcaggctggttttggagaccccgagtcagaacatcttcttctcccctgtgagtgtctccacttccctggccatgctctcccttggggcccactcagtcaccaagacccagattctccagggcctgggcttcaacctcacacacacaccagagtctgccatccaccagggcttccagcacctggttcactcactgactgttcccagcaaagacctgaccttgaagatgggaagtgccctcttcgtcaagaaggagctgcagctgcaggcaaatttcttgggcaatgtcaagaggctgtatgaagcagaagtcttttctacagatttctccaacccctccattgcccaggcgaggatcaacagccatgtgaaaaagaagacccaagggaaggttgtagacataatccaaggccttgaccttctgacggccatggttctggtgaaccacattttctttaaagccaagtgggagaagccctttcaccctgaatatacaagaaagaacttcccattcctggtgggcgagcaggtcactgtgcatgtccccatgatgcaccagaaagagcagttcgcttttggggtggatacagagctgaactgctttgtgctgcagatggattacaagggagatgccgtggccttctttgtcctccctagcaagggcaagatgaggcaactggaacaggccttgtcagccagaacactgagaaagtggagccactcactccagaaaaggtggatagaggtgttcatccccagattttccatttctgcctcctacaatctggaaaccatcctcccgaagatgggcatccaaaatgtctttgacaaaaatgctgatttttctggaattgcaaagagagactccctgcaggtttctaaagcaacccacaaggctgtgctggatgtcagtgaagagggcactgaggccacagcagctaccaccaccaagttcatagtccgatcgaaggatggcccctcttacttcactgtctccttcaataggaccttcctgatgatgattacaaataaagccacagacggtattctctttctagggaaagtggaaaatcccactaaatcctag

SEQ ID NO: 180510 - DNA, 1462 bp, Homo sapiens
  Payload ID: 15550
  Gene Symbol: SERPINA9
  Gene Name: serpin peptidase inhibitor, clade A (alpha-1 antiproteinase, antitrypsin), member 9
  Uniprot ID: Q86WD7
  ENST ID: ENST00000424550
  CDS Start-End: 226-1086
tggagggagaggagagattaaagtgaggagagagctacaaccaagtaagcaagtgtcagggctcaccaaccatgcaaggacagggcaggagaagaggaacctgcaaagtccatgaagcagaaacatcaaaaagcatgggatttggaatttgagacctgactttgaagcccacacagaacacagacaagtcaaccatgctatttgggcaaagacctgaccttgaagatgggaagtgccctcttcgtcaagaaggagctgcagctgcaggcaaatttcttgggcaatgtcaagaggctgtatgaagcagaagtcttttctacagatttctccaacccctccattgcccaggcgaggatcaacagccatgtgaaaaagaagacccaagggaaggttgtagacataatccaaggccttgaccttctgacggccatggttctggtgaaccacattttctttaaagccaagtgggagaagccctttcaccctgaatatacaagaaagaacttcccattcctggtgggcgagcaggtcactgtgcatgtccccatgatgcaccagaaagagcagttcgcttttggggtggatacagagctgaactgctttgtgctgcagatggattacaagggagatgccgtggccttctttgtcctccctagcaagggcaagatgaggcaactggaacaggccttgtcagccagaacactgagaaagtggagccactcactccagaaaaggtggatagaggtgttcatccccagattttccatttctgcctcctacaatctggaaaccatcctcccgaagatgggcatccaaaatgtctttgacaaaaatgctgatttttctggaattgcaaagagagactccctgcaggtttctaaagcaacccacaaggctgtgctggatgtcagtgaagagggcactgaggccacagcagctaccaccaccaagttcatagtccgatcgaaggatggcccctcttacttcactgtctccttcaataggaccttcctgatgatgattacaaataaagccacagacggtattctctttctagggaaagtggaaaatcccactaaatcctaggtgggaaatggcctgttaactgatggcacattgctaatgcacaagaaataacaaaccacatccctctttctgttctgagggtgcatttgaccccagtggagctggattcgctggcagggatgccacttccaaggctcaatcaccaaaccatcaacagggaccccagtcacaagccaacacccattaaccccagtcagtgcccttttccacaaattctcccaggtaactagcttcatgggatgttgctgggttaccatatttccattccttggggctcccaggaatggaaatacgccaacccaggttaggcacctctattgcagaattacaataacacattcaataaaactaaaatatgaattcatctgtcaacaga

SEQ ID NO: 180511 - DNA, 1520 bp, Homo sapiens
  Payload ID: 15550
  Gene Symbol: SERPINA9
  Gene Name: serpin peptidase inhibitor, clade A (alpha-1 antiproteinase, antitrypsin), member 9
  Uniprot ID: Q86WD7
  ENST ID: ENST00000448305
  CDS Start-End: 131-1144
taagcaagtgtcagggctcaccaaccatgcaaggacagggcaggagaagaggaacctgcaaaggctggttttggagaccccgagtcagaacatcttcttctcccctgtgagtgtctccacttccctggccatgctctcccttggggcccactcagtcaccaagacccagattctccagggcctgggcttcaacctcacacacacaccagagtctgccatccaccagggcttccagcacctggttcactcactgactgttcccagcaaagacctgaccttgaagatgggaagtgccctcttcgtcaagaaggagctgcagctgcaggcaaatttcttgggcaatgtcaagaggctgtatgaagcagaagtcttttctacagatttctccaacccctccattgcccaggcgaggatcaacagccatgtgaaaaagaagacccaagggaaggttgtagacataatccaaggccttgaccttctgacggccatggttctggtgaaccacattttctttaaagccaagtgggagaagccctttcaccctgaatatacaagaaagaacttcccattcctggtgggcgagcaggtcactgtgcatgtccccatgatgcaccagaaagagcagttcgcttttggggtggatacagagctgaactgctttgtgctgcagatggattacaagggagatgccgtggccttctttgtcctccctagcaagggcaagatgaggcaactggaacaggccttgtcagccagaacactgagaaagtggagccactcactccagaaaaggtggatagaggtgttcatccccagattttccatttctgcctcctacaatctggaaaccatcctcccgaagatgggcatccaaaatgtctttgacaaaaatgctgatttttctggaattgcaaagagagactccctgcaggtttctaaagcaacccacaaggctgtgctggatgtcagtgaagagggcactgaggccacagcagctaccaccaccaagttcatagtccgatcgaaggatggcccctcttacttcactgtctccttcaataggaccttcctgatgatgattacaaataaagccacagacggtattctctttctagggaaagtggaaaatcccactaaatcctaggtgggaaatggcctgttaactgatggcacattgctaatgcacaagaaataacaaaccacatccctctttctgttctgagggtgcatttgaccccagtggagctggattcgctggcagggatgccacttccaaggctcaatcaccaaaccatcaacagggaccccagtcacaagccaacacccattaaccccagtcagtgcccttttccacaaattctcccaggtaactagcttcatgggatgttgctgggttaccatatttccattccttggggctcccaggaatggaaatacgccaacccaggttaggcacctctattgcagaattacaataacacattcaataaaactaaaatatgaattcatctgtcaacaga

SEQ ID NO: 180512 - DNA, 1346 bp, Homo sapiens
  Payload ID: 15550
  Gene Symbol: SERPINA9
  Gene Name: serpin peptidase inhibitor, clade A (alpha-1 antiproteinase, antitrypsin), member 9
  Uniprot ID: Q86WD7
  ENST ID: ENST00000538527
  CDS Start-End: 80-685
atcatttgcatgtctagctggagaataaaaataatatatcatttgcatgtcttagtaatgaagtcatgggtgtcgtggcatgagatcagctggagggagaggagagattaaagtgaggagagagctacaaccaagtaagcaagtgtcagggctcaccaaccatgcaaggacagggcaggagaagaggaacctgcaaagacatattttgttccaaaatggcatcttacctttatggagtactctttgctgttggcctctgtgctccaatctactgtgtgtccccggccaatgcccccagtgcatacccccgcccttcctccacaaagagcacccctgcctcacaggtgtattccctcaacaccgactttgccttccgcctataccgcaggctggttttggagaccccgagtcagaacatcttcttctcccctgtgagtgtctccacttccctggccatgctctcccttggggcccactcagtcaccaagacccagattctccagggcctgggcttcaacctcacacacacaccagagtctgccatccaccagggcttccagcacctggttcactcactgactgttcccagcaaagacctgaccttgaagatgggaagtgccctcttcgtcaagaaggagctgcagctgcaggcaaatttcttgggcaatgtcaagaggctgtatgaagcagaagtcttttctacagatttctccaacccctccattgcccaggcgaggatcaacagccatgtgaaaaagaagacccaagggaaggttgtagacataatccaaggccttgaccttctgacggccatggttctggtgaaccacattttctttaaagccaagtgggagaagccctttcaccctgaatatacaagaaagaacttcccattcctggtgggcgagcaggtcactgtgcatgtccccatgatgcaccagaaagagcagttcgcttttggggtggatacagagctgaactgctttgtgctgcagatggattacaagggagatgccgtggccttctttgtcctccctagcaagggcaagatgaggcaactggaacaggccttgtcagccagaacactgagaaagtggagccactcactccagaaaaggtggatagaggtgttcatccccagattttccatttctgcctcctacaatctggaaaccatcctcccgaagatgggcatccaaaatgtctttgacaaaaatgctgatttttctggaattgcaaagagagactccctgcaggtttctaaagtgagttgaatgaaaatatttgcaaaaaagtccaagctggaagcacctgcagaattaatcacatgctcttatttcgttgat

SEQ ID NO: 180513 - DNA, 1156 bp, Homo sapiens
  Payload ID: 15550
  Gene Symbol: SERPINA9
  Gene Name: serpin peptidase inhibitor, clade A (alpha-1 antiproteinase, antitrypsin), member 9
  Uniprot ID: Q86WD7
  ENST ID: ENST00000546329
  CDS Start-End: 80-1084
atcatttgcatgtctagctggagaataaaaataatatatcatttgcatgtcttagtaatgaagtcatgggtgtcgtggcatgagatcagctggagggagaggagagattaaagtgaggagagagctacaaccaagtaagcaagtgtcagggctcaccaaccatgcaaggacagggcaggagaagaggaacctgcaaaggctggttttggagaccccgagtcagaacatcttcttctcccctgtgagtgtctccacttccctggccatgctctcccttggggcccactcagtcaccaagacccagattctccagggcctgggcttcaacctcacacacacaccagagtctgccatccaccagggcttccagcacctggttcactcactgactgttcccagcaaagacctgaccttgaagatgggaagtgccctcttcgtcaagaaggagctgcagctgcaggcaaatttcttgggcaatgtcaagaggctgtatgaagcagaagtcttttctacagatttctccaacccctccattgcccaggcgaggatcaacagccatgtgaaaaagaagacccaagggaaggttgtagacataatccaaggccttgaccttctgacggccatggttctggtgaaccacattttctttaaagccaagtgggagaagccctttcaccctgaatatacaagaaagaacttcccattcctggtgggcgagcaggtcactgtgcatgtccccatgatgcaccagaaagagcagttcgcttttggggtggatacagagctgaactgctttgtgctgcagatggattacaagggagatgccgtggccttctttgtcctccctagcaagggcaagatgaggcaactggaacaggccttgtcagccagaacactgagaaagtggagccactcactccagaaaaggtggatagaggtgttcatccccagattttccatttctgcctcctacaatctggaaaccatcctcccgaagatgggcatccaaaatgtctttgacaaaaatgctgatttttctggaattgcaaagagagactccctgcaggtttctaaagtgagttgaatgaaaatatttgcaaaaaagtccaagctggaagcacctgcagaattaatcacatgctcttatttcgttgat

SEQ ID NO: 180514 - DNA, 2619 bp, Homo sapiens
  Payload ID: 15551
  Gene Symbol: SERPINB1
  Gene Name: serpin peptidase inhibitor, clade B (ovalbumin), member 1
  Uniprot ID: P30740
  ENST ID: ENST00000380739
  CDS Start-End: 204-1343
cgctcacttctgcttgcacttaggcgacctcgggagctcggactcctacgcagtcaccgggaagggccgccgccccgcccgcggctgctggcccgggtgacgcttccgcctgctataagagcagcggccctcggtgcctccttcctgacctcgcacccagctcggagcccggagcgtgcctcggcggcctgtcggttttcaccatggagcagctgagctcagcaaacacccgcttcgccttggacctgttcctggcgttgagtgagaacaatccggctggaaacatcttcatctctcccttcagcatttcatctgctatggccatggtttttctggggaccagaggtaacacggcagcacagctgtccaagactttccatttcaacacggttgaagaggttcattcaagattccagagtctgaatgctgatatcaacaaacgtggagcgtcttatattctgaaacttgctaatagattatatggagagaaaacttacaatttccttcctgagttcttggtttcgactcagaaaacatatggtgctgacctggccagtgtggattttcagcatgcctctgaagatgcaaggaagaccataaaccagtgggtcaaaggacagacagaaggaaaaattccggaactgttggcttcgggcatggttgataacatgaccaaacttgtgctagtaaatgccatctatttcaagggaaactggaaggataaattcatgaaagaagccacgacgaatgcaccattcagattgaataagaaagacagaaaaactgtgaaaatgatgtatcagaagaaaaaatttgcatatggctacatcgaggaccttaagtgccgtgtgctggaactgccttaccaaggcgaggagctcagcatggtcatcctgctgccggatgacattgaggacgagtccacgggcctgaagaagattgaggaacagttgactttggaaaagttgcatgagtggactaaacctgagaatctcgatttcattgaagttaatgtcagcttgcccaggttcaaactggaagagagttacactctcaactccgacctcgcccgcctaggtgtgcaggatctctttaacagtagcaaggctgatctgtctggcatgtcaggagccagagatatttttatatcaaaaattgtccacaagtcatttgtggaagtgaatgaagagggaacagaggcggcagctgccacagcaggcatcgcaactttctgcatgttgatgcccgaagaaaatttcactgccgaccatccattccttttctttattcggcataattcctcaggtagcatcctattcttggggagattttcttccccttagaagaaagagactgtagcaatacaaaaatcaagcttagtgctttattacctgagtttttaatagagccaatatgtcttatatctttaccaataaaaccactgttcagaaacaagtctttcattttctttgtaagtttggctctgttggctgtttacacccatgaattttggcatgggtatctatttttcttttttacattgaaaaaaatccagtggttgcttttgaatgcatcaagtaaagaagaagaaaagaatacatccgatgcgtagattcttgaccatgtagtaatctataaaattgctatatcctcctgatagccatgggaaaacatgataagatggtcatttattttgcagttagaattttggaagccacaaaatagacagacaccctgactgttgaagggaggtttaaaaacagatattcaattgaaatgtaagagagcaccccaattgagagcccaggttacgaagacaagcttgcctcgcctgacttttctgtcccttgttctgcaggattagtattctgttacagacctctagtttttagactcttcaattaaagggccaatggttataacctgcattcccttttttgttcttctttatgtataatatatagttcatgtggcgctgcatgaaatcaagaagtgggtgtcttaggataaaagataccaagagtctacaaaaataaccatgtagtaagataaactgctgaacaaaggttttactgttagccaccttctcatgtgttttcttttctctttttctttttctttctttctttcttttttttttttttgagacagagtcttgctctgttacccaggctggagtgcagtggcacgatctcagctcaccgcaacctctgcctcctgggttcaagtgattctcttgcttcagcctcctgagtagctgggattataggcatgcaccactaggcctggctaatttttgtatttttagtagagatggggtttttccatgttggccaggctggtcccgaactcctgacctcaggtgatccgcgcacctcagcctcccaaagtgctgggattacaggcatgagctaccatgcctggccttctcatgtgttttctgattaaggctcttgacttccaaggctgtgtggggagatggggtgggggctcttggactgatataaaactttgtcaaatgtagttctttgaatggagcttgaaacgccgcatattcttgctcccacaaggatagtgggcatcatgaattaataaaacgtcctaggattctgcaagcta

SEQ ID NO: 180515 - DNA, 2122 bp, Homo sapiens
  Payload ID: 15552
  Gene Symbol: SERPINB10
  Gene Name: serpin peptidase inhibitor, clade B (ovalbumin), member 10
  Uniprot ID: P48595
  ENST ID: ENST00000238508
  CDS Start-End: 60-1253
tcttactacaggagcaaattgccaattctgctccagtgggagaaaacaaggtttcctcaatggactctctagcaacatcaatcaaccagtttgccctggagttgagcaaaaagctagctgaatctgctcagggtaaaaatatcttcttttcttcctggagcatctcaacttccttgaccatagtgtatttgggcgccaaaggtaccactgcagcccaaatggcccaggtgcttcaatttaacagagaccagggagtcaaatgtgaccctgaaagtgaaaaaaaaaggaaaatggaattcaacttgagcaactcggaagaaatacactctgatttccaaacacttatctcagaaatcctcaagcccaacgatgactacttacttaaaacagccaatgcgatatatggagagaaaacgtatgcatttcacaataaatatttagaagacatgaaaacatattttggtgcagaacctcagcctgttaactttgtggaagcttctgatcaaatcagaaaggacatcaactcttgggttgaaagacagaccgagggtaaaatccagaatctcctgcctgatgactctgtggattccacaaccaggatgattctggtgaacgccctatactttaaaggaatctgggaacatcaattcttagtgcaaaacaccacagaaaagccttttagaataaacgagactacaagcaaaccagtgcaaatgatgtttatgaagaaaaagcttcacatttttcacatagaaaagccaaaagcagtgggccttcaactctactacaaaagccgtgacctcagcctgcttatactactgccagaagacattaatgggctggaacagctggaaaaggccatcacctatgagaagctgaatgagtggaccagtgcagacatgatggagttgtatgaagtgcagctacaccttcccaagttcaagctggaagacagttatgatctcaagtcaaccctgagcagtatggggatgagtgatgccttcagccaaagcaaagctgatttctcaggaatgtcttcagcaagaaacctatttttgtccaatgttttccataaggcttttgtggaaataaatgaacaaggtactgaagctgcagctggcagtgggagtgagatagatatacgaattagagtcccatccattgaattcaatgcaaatcacccattcctcttcttcatcaggcacaataaaaccaacaccattcttttttatggaagattatgctccccctaaatcctgcatatctctcaacaaacaagaccatcttacagtgtgaaaaatgtaccatgagatggaaaagcacaattttcacaaaaatgagtttgtagtctaaacctttttcacatttgaatataagtaaatagatcttgaaataatgcattctaatgatcctgtcatatctgtacagctggagagaatgacgatttttatttttaacacgttaacattttgtctaatgtgactttcatttacatttcagaagtactatgctattcaactgaatgccttacaattcttgatcacttgcaatatccatgatacttgttatcatatatttcatatacatcattaaatgaaaaaaaatctttataaaggtgatatgatattgataaatacgaagtttctcaagaatatcgttttgatcaaaaatttagcccggcatggtggtgcacacctgtgttcccagctactcaggaggctgaggtaggaggattgcttgagcccaggaggttgagactgcagtgagccaagatcacaccagtgcactccaacctgggcaacagagcaagaccctgtctcaaaaaaatcattttggtggctcataaattatgattgtaaaactaaaccccctttttctgctatttaaaaaatacttatattgacattagcttaaaaaactagtgaaatccaaatgaaatttgaagtttagctagtagcaatctctcaatgttggtgccctagttttgacaaatgtaccgtggtcatgtaagatgttatcacttggggaaactgtactggagtatatgagaattagctgtattatctctgcacctcttctgccaatctaaaattattccaaaataaaagttttattaaaaata

SEQ ID NO: 180516 - DNA, 840 bp, Homo sapiens
  Payload ID: 15552
  Gene Symbol: SERPINB10
  Gene Name: serpin peptidase inhibitor, clade B (ovalbumin), member 10
  ENST ID: ENST00000397996
  CDS Start-End: 1-840
aagtgtcaataagctgtttggtgagaagtctgcgagcttccgggaagaatatattcgactctgtcagaaatattactcctcagaaccccaggcagtagacttcctagaatgtgcagaagaagctagaaaaaagattaattcctgggtcaagactcaaaccaaaggcaaaatcccaaacttgttacctgaaggttctgtagatggggataccaggatggtcctggtgaatgctgtctacttcaaaggaaagtggaaaactccatttgagaagaaactaaatgggctttatcctttccgtgtaaactcggctcagcgcacacctgtacagatgatgtacttgcgtgaaaagctaaacattggatacatagaagacctaaaggctcagattctagaactcccatatgctggagatgttagcatgttcttgttgcttccagatgaaattgccgatgtgtccactggcttggagctgctggaaagtgaaataacctatgacaaactcaacaagtggaccagcaaagacaaaatggctgaagatgaagttgagttgaaagtttctcaactcttcagccacaatctcttactacaggagcaaattgccaattctgctccagtgggagaaaacaaggtttcctcaatggactctctagcaacatcaatcaaccagtttgccctggagttgagcaaaaagctagctgaatctgctcagggtaaaaatatcttcttttcttcctggagcatctcaacttccttgaccatagtgtatttgggcgccaaaggtaccactgcagcccaaatggcccaggtgcttcaatttaacagagaccagggagtcaaatg

SEQ ID NO: 180517 - DNA, 759 bp, Homo sapiens
  Payload ID: 15552
  Gene Symbol: SERPINB10
  Gene Name: serpin peptidase inhibitor, clade B (ovalbumin), member 10
  ENST ID: ENST00000418725
  CDS Start-End: 1-759
aagtgtcaataagctgtttggtgagaagtctgcgagcttccgggaagaatatattcgactctgtcagaaatattactcctcagaaccccaggcagtagacttcctagaatgtgcagaagaagctagaaaaaagattaattcctgggtcaagactcaaaccaaaggcaaaatcccaaacttgttacctgaaggttctgtagatggggataccaggatggtcctggtgaatgctgtctacttcaaaggaaagtggaaaactccatttgagaagaaactaaatgggctttatcctttccgtgtaaactcggctcagcgcacacctgtacagatgatgtacttgcgtgaaaagctaaacattggatacatagaagacctaaaggctcagattctagaactcccatatgctggagatgttagcatgttcttgttgcttccagatgaaattgccgatgtgtccactggcttggagctgctggaaagtgaaataacctatgacaaactcaacaagtggaccagcaaagacaaaatggctgaagatgaagttgaggtttcctcaatggactctctagcaacatcaatcaaccagtttgccctggagttgagcaaaaagctagctgaatctgctcagggtaaaaatatcttcttttcttcctggagcatctcaacttccttgaccatagtgtatttgggcgccaaaggtaccactgcagcccaaatggcccaggtgcttcaatttaacagagaccagggagtcaaatg

SEQ ID NO: 180518 - DNA, 1194 bp, Homo sapiens
  Payload ID: 15552
  Gene Symbol: SERPINB10
  Gene Name: serpin peptidase inhibitor, clade B (ovalbumin), member 10
  Uniprot ID: P48595
  ENST ID: ENST00000619595
  CDS Start-End: 1-1194
atggactctctagcaacatcaatcaaccagtttgccctggagttgagcaaaaagctagctgaatctgctcagggtaaaaatatcttcttttcttcctggagcatctcaacttccttgaccatagtgtatttgggcgccaaaggtaccactgcagcccaaatggcccaggtgcttcaatttaacagagaccagggagtcaaatgtgaccctgaaagtgaaaaaaaaaggaaaatggaattcaacttgagcaactcggaagaaatacactctgatttccaaacacttatctcagaaatcctcaagcccaacgatgactacttacttaaaacagccaatgcgatatatggagagaaaacgtatgcatttcacaataaatatttagaagacatgaaaacatattttggtgcagaacctcagcctgttaactttgtggaagcttctgatcaaatcagaaaggacatcaactcttgggttgaaagacagaccgagggtaaaatccagaatctcctgcctgatgactctgtggattccacaaccaggatgattctggtgaacgccctatactttaaaggaatctgggaacatcaattcttagtgcaaaacaccacagaaaagccttttagaataaacgagactacaagcaaaccagtgcaaatgatgtttatgaagaaaaagcttcacatttttcacatagaaaagccaaaagcagtgggccttcaactctactacaaaagccgtgacctcagcctgcttatactactgccagaagacattaatgggctggaacagctggaaaaggccatcacctatgagaagctgaatgagtggaccagtgcagacatgatggagttgtatgaagtgcagctacaccttcccaagttcaagctggaagacagttatgatctcaagtcaaccctgagcagtatggggatgagtgatgccttcagccaaagcaaagctgatttctcaggaatgtcttcagcaagaaacctatttttgtccaatgttttccataaggcttttgtggaaataaatgaacaaggtactgaagctgcagctggcagtgggagtgagatagatatacgaattagagtcccatccattgaattcaatgcaaatcacccattcctcttcttcatcaggcacaataaaaccaacaccattcttttttatggaagattatgctccccctaa

SEQ ID NO: 180519 - DNA, 1918 bp, Homo sapiens
  Payload ID: 15553
  Gene Symbol: SERPINB11
  Gene Name: serpin peptidase inhibitor, clade B (ovalbumin), member 11 (gene/pseudogene)
  Uniprot ID: Q96P15
  ENST ID: ENST00000382749
  CDS Start-End: 246-1424
ggtgcagggccgggcatggtcgttcacgcctgtaatcccagcactttaggaggctgaggcaggtggatcacgagggctgtactttccaaccagcaggtgaagagctgaatcactaagggcacaaatgaaaagggaggggcaaaatatgaaggctttatatttccttttgagggacgcagctccagtctaacttgccactctgtgaacttcactactggaaagcaacaaaggcagtcggcataaaaatgggttctctcagcacagctaacgttgaattttgccttgatgtgttcaaagagctgaacagtaacaacataggagataacatcttcttttcttcgctgagtctgctttatgctctaagcatggtcctccttggtgccaggggagagactgaagagcaattggagaaggtgcttcattttagtcatactgtagactcattaaaaccagggttcaaggactcacctaagtgcagccaagctggaagaattcattccgagtttggtgtcgaattctctcaaatcaaccagccagactctaactgtaccctcagcattgccaacaggctctacgggacaaagacgatggcatttcatcagcaatatttaagctgttctgagaaatggtatcaagccaggttgcaaactgtggattttgaacagtctacagaagaaacgaggaaaacgattaatgcttgggttgaaaataaaactaatggaaaagtcgcaaatctctttggaaagagcacaattgacccttcatctgtaatggtcctggtgaatgccatatatttcaaaggacaatggcaaaataaatttcaagtaagagagacagttaaaagtccttttcagctaagtgagggtaaaaatgtaactgtggaaatgatgtatcaaattggaacatttaaactggcctttgtaaaggagccgcagatgcaagttcttgagctgccctacgttaacaacaaattaagcatgattattctgcttccagtaggcatagctaatctgaaacagatagaaaagcagctgaattcggggacgtttcatgagtggacaagctcttctaacatgatggaaagagaagttgaagtacacctcccccgattcaaacttgaaactaagtatgagctaaattccctgttaaaatctctaggggtgacagatctcttcaaccaggtcaaagctgatctttctggaatgtcaccaaccaagggcctatatttatcaaaagccatccacaagtcatacctggatgtcagcgaagagggcacggaggcagcagcagccactggggacagcatcgctgtaaaaagcctaccaatgagagctcagttcaaggcgaaccaccccttccttttctttataaggcacactcataccaacacgatcctattctgtggcaagcttgcctctccctaatcagatggggttgagcaaggctcagagttgcagatgaggtgcagagacaatcctgtgactttcccacggccaaaaagctgttcacacctcacacacctctgtgcctcagtttgctcatctgcaaaataggtctaggatttcttccaaccatttcatgagttgtgaagctaaggctttgttaatcatggaaaaaggtagatttatgcagaaagcctttctggctttcttatctgtggtgtctcatttgagtgctgtccagtgacatgatcaagtcaatgagtaaaattttaagggattagattttcttgacttgtatgtatctgtgagatcttgaataagtgacctgacatctctgcttaaagaaaaccagctgaagggcttcaactttgcttggatttttaaatattttccttgcatatgtaaatagaatgtggtgagttttagttcaaaattctctgttgagaataataaatgcatgaaataccttaaagctc

SEQ ID NO: 180520 - DNA, 1846 bp, Homo sapiens
  Payload ID: 15553
  Gene Symbol: SERPINB11
  Gene Name: serpin peptidase inhibitor, clade B (ovalbumin), member 11 (gene/pseudogene)
  ENST ID: ENST00000544088
  CDS Start-End: 174-1352
agggctgtactttccaaccagcaggtgaagagctgaatcactaagggcacaaatgaaaagggaggggcaaaatatgaaggctttatatttccttttgagggacgcagctccagtctaacttgccactctgtgaacttcactactggaaagcaacaaaggcagtcggcataaaaatgggttctctcagcacagctaacgttgaattttgccttgatgtgttcaaagagctgaacagtaacaacataggagataacatcttcttttcttcgctgagtctgctttatgctctaagcatggtcctccttggtgccaggggagagactgaagagcaattggagaaggtgcttcattttagtcatactgtagactcattaaaaccagggttcaaggactcacctaagtgcagccaagctggaagaattcattccgagtttggtgtcgaattctctcaaatcaaccagccagactctaactgtaccctcagcattgccaacaggctctacgggacaaagacgatggcatttcatcagcaatatttaagctgttctgagaaatggtatcaagccaggttgcaaactgtggattttgaacagtctacagaagaaacgaggaaaacgattaatgcttgggttgaaaataaaactaatggaaaagtcgcaaatctctttggaaagagcacaattgacccttcatctgtaatggtcctggtgaatgccatatatttcaaaggacaatggcaaaataaatttcaagtaagagagacagttaaaagtccttttcagctaagtgagggtaaaaatgtaactgtggaaatgatgtatcaaattggaacatttaaactggcctttgtaaaggagccgcagatgcaagttcttgagctgccctacgttaacaacaaattaagcatgattattctgcttccagtaggcatagctaatctgaaacagatagaaaagcagctgaattcggggacgtttcatgagtggacaagctcttctaacatgatggaaagagaagttgaagtacacctcccccgattcaaacttgaaactaagtatgagctaaattccctgttaaaatctctaggggtgacagatctcttcaaccaggtcaaagctgatctttctggaatgtcaccaaccaagggcctatatttatcaaaagccatccacaagtcatacctggatgtcagcgaagagggcacggaggcagcagcagccactggggacagcatcgctgtaaaaagcctaccaatgagagctcagttcaaggcgaaccaccccttccttttctttataaggcacactcataccaacacgatcctattctgtggcaagcttgcctctccctaatcagatggggttgagcaaggctcagagttgcagatgaggtgcagagacaatcctgtgactttcccacggccaaaaagctgttcacacctcacacacctctgtgcctcagtttgctcatctgcaaaataggtctaggatttcttccaaccatttcatgagttgtgaagctaaggctttgttaatcatggaaaaaggtagatttatgcagaaagcctttctggctttcttatctgtggtgtctcatttgagtgctgtccagtgacatgatcaagtcaatgagtaaaattttaagggattagattttcttgacttgtatgtatctgtgagatcttgaataagtgacctgacatctctgcttaaagaaaaccagctgaagggcttcaactttgcttggatttttaaatattttccttgcatatgtaaatagaatgtggtgagttttagttcaaaattctctgttgagaataataaatgcatgaaataccttaaagctc

SEQ ID NO: 180521 - DNA, 1294 bp, Homo sapiens
  Payload ID: 15553
  Gene Symbol: SERPINB11
  Gene Name: serpin peptidase inhibitor, clade B (ovalbumin), member 11 (gene/pseudogene)
  ENST ID: ENST00000536691
  CDS Start-End: 63-470
agtctaacttgccactctgtgaacttcactactggaaagcaacaaaggcagtcggcataaaaatgggttctctcagcacagctaacgttgaattttgccttgatgtgttcaaagagctgaacagtaacaacataggagataacatcttcttttcttcgctgagtctgctttatgctctaagcatggtcctccttggtgccaggggagagactgaagagcaattggagaaggtgcttcattttagtcatactgtagactcattaaaaccagggttcaaggactcacctaagtgcagccaagctggaagaattcattccgagtttggtgtcgaattctctcaaatcaaccagccagactctaactgtaccctcagcattgccaacaggctctacgggacaaagacgatggcatttcatcaggaaaagtcgcaaatctctttggaaagagcacaattgacccttcatctgtaatggtcctggtgaatgccatatatttcaaaggacaatggcaaaataaatttcaagtaagagagacagttaaaagtccttttcagctaagtgagggtaaaaatgtaactgtggaaatgatgtatcaaattggaacatttaaactggcctttgtaaaggagccgcagatgcaagttcttgagctgccctacgttaacaacaaattaagcatgattattctgcttccagtaggcatagctaatctgaaacagatagaaaagcagctgaattcggggacgtttcatgagtggacaagctcttctaacatgatggaaagagaagttgaagtacacctcccccgattcaaacttgaaactaagtatgagctaaattccctgttaaaatctctaggggtgacagatctcttcaaccaggtcaaagctgatctttctggaatgtcaccaaccaagggcctatatttatcaaaagccatccacaagtcatacctggatgtcagcgaagagggcacggaggcagcagcagccactggggacagcatcgctgtaaaaagcctaccaatgagagctcagttcaaggcgaaccaccccttccttttctttataaggcacactcataccaacacgatcctattctgtggcaagcttgcctctccctaatcagatggggttgagcaaggctcagagttgcagatgaggtgcagagacaatcctgtgactttcccacggccaaaaagctgttcacacctcacacacctctgtgcctcagtttgctcatctgcaaaataggtctaggatttcttccaaccatttcatgagttgtgaagctaa

SEQ ID NO: 180522 - DNA, 1242 bp, Homo sapiens
  Payload ID: 15553
  Gene Symbol: SERPINB11
  Gene Name: serpin peptidase inhibitor, clade B (ovalbumin), member 11 (gene/pseudogene)
  ENST ID: ENST00000489748
  CDS Start-End: 700-1242
ggttttcatgagggaaaacaactccagtaaggtttgaaaagcagagagggaaatagtctcatatgtcacaaacagaattatatttcaaatttagaagatacggtattaagtgattcatcttattttggacatttttcctcaaggagaatttttctggaagaaaaagtacatttatatgtgggcttattaagagaaagagagaaaggcatgctattttaatcattaaattcttgatgatgacgatcatcatcaagatgagaaagaaaagaaatatgagccaagagaatctgttgttgccagcaatcagtttaccagaacatctgcaggtgaacattttccaaatggagtgacagactaattgcatctacggggatgagaatctgccatagaagaggatgctgttggtcttattttgccttatgaagaataggaaagggtgattacaatggaactcttcattagttgaagtaggtgatgatccgaatcctactacagcggtggcagctgcagcttctgctccctcctctgtaacctccacaaaggccttgtgtaggactccagatagcacgagaccgcggctcccggtcatgcctgagaggtctgcatccccattgaagatatccaccattcccatggttctcaacgtgtccttgaggtcatagctctcttccactttgaaccgaggcagtcggcataaaaatgggttctctcagcacagctaacgttgaattttgccttgatgtgttcaaagagctgaacagtaacaacataggagataacatcttcttttcttcgctgagtctgctttatgctctaagcatggtcctccttggtgccaggggagagactgaagagcaattggagaaggtgcttcattttagtcatactgtagactcattaaaaccagggttcaaggactcacctaagtgcagccaagctggaagaattcattccgagtttggtgtcgaattctctcaaatcaaccagccagactctaactgtaccctcagcattgccaacaggctctacgggacaaagacgatggcatttcatcagcaatatttaagctgttctgagaaatggtatcaagccaggttgcaaactgtggattttgaacagtctacagaagaaacgaggaaaacgattaatgcttgggttgaaaataaaactaatggaaaagtcgcaaatctctttggaaagagcacaattgacccttcatctgtaatggtcctggtgaatgcc

SEQ ID NO: 180523 - DNA, 573 bp, Homo sapiens
  Payload ID: 15553
  Gene Symbol: SERPINB11
  Gene Name: serpin peptidase inhibitor, clade B (ovalbumin), member 11 (gene/pseudogene)
  ENST ID: ENST00000624518
  CDS Start-End: 1-573
atgggttctctcagcacagctaacgttgaattttgccttgatgtgttcaaagagctgaacagtaacaacataggagataacatcttcttttcttcgctgagtctgctttatgctctaagcatggtcctccttggtgccaggggagagactgaagagcaattggagaagatagaaaagcagctgaattcggggacgtttcatgagtggacaagctcttctaacatgatggaaagagaagttgaagtacacctcccccgattcaaacttgaaactaagtatgagctaaattccctgttaaaatctctaggggtgacagatctcttcaaccaggtcaaagctgatctttctggaatgtcaccaaccaagggcctatatttatcaaaagccatccacaagtcatacctggatgtcagcgaagagggcacggaggcagcagcagccactggggacagcatcgctgtaaaaagcctaccaatgagagctcagttcaaggcgaaccaccccttccttttctttataaggcacactcataccaacacgatcctattctgtggcaagcttgcctctccctaa

SEQ ID NO: 180524 - DNA, 918 bp, Homo sapiens
  Payload ID: 15553
  Gene Symbol: SERPINB11
  Gene Name: serpin peptidase inhibitor, clade B (ovalbumin), member 11 (gene/pseudogene)
  ENST ID: ENST00000623262
  CDS Start-End: 1-918
atgggttctctcagcacagctaacgttgaattttgccttgatgtgttcaaagagctgaacagtaacaacataggagataacatcttcttttcttcgctgagtctgctttatgctctaagcatggtcctccttggtgccaggggagagactgaagagcaattggagaaggtgcttcattttagtcatactgtagactcattaaaaccagggttcaaggactcacctaagtgcagccaagctggaagaattcattccgagtttggtgtcgaattctctcaaatcaaccagccagactctaactgtaccctcagcattgccaacaggctctacgggacaaagacgatggcatttcatcagggtaaaaatgtaactgtggaaatgatgtatcaaattggaacatttaaactggcctttgtaaaggagccgcagatgcaagttcttgagctgccctacgttaacaacaaattaagcatgattattctgcttccagtaggcatagctaatctgaaacagatagaaaagcagctgaattcggggacgtttcatgagtggacaagctcttctaacatgatggaaagagaagttgaagtacacctcccccgattcaaacttgaaactaagtatgagctaaattccctgttaaaatctctaggggtgacagatctcttcaaccaggtcaaagctgatctttctggaatgtcaccaaccaagggcctatatttatcaaaagccatccacaagtcatacctggatgtcagcgaagagggcacggaggcagcagcagccactggggacagcatcgctgtaaaaagcctaccaatgagagctcagttcaaggcgaaccaccccttccttttctttataaggcacactcataccaacacgatcctattctgtggcaagcttgcctctccctaa

SEQ ID NO: 180525 - DNA, 1218 bp, Homo sapiens
  Payload ID: 15554
  Gene Symbol: SERPINB12
  Gene Name: serpin peptidase inhibitor, clade B (ovalbumin), member 12
  Uniprot ID: Q96P63
  ENST ID: ENST00000269491
  CDS Start-End: 1-1218
atggactctcttgttacagcaaacaccaaattttgctttgatctttttcaagagataggcaaagatgatcgtcataaaaacatatttttctctcccctgagcctctcagctgcccttggtatggtacgcttgggtgctagaagtgacagtgcacatcagattgatgaggtactacacttcaacgaattttcccagaatgaaagcaaagaacctgacccttgtctgaaaagcaacaaacaaaaagctgggtccttaaacaatgagagcggactggtcagctgctactttgggcagcttctctccaaattagacaggatcaagactgattacacactgagtattgccaacaggctttatggagagcaggaattcccaatctgtcaggaatacttagatggtgtgattcaattttaccacacgacgattgaaagtgttgatttccaaaaaaaccctgaaaaatccagacaagagattaacttctgggttgaatgtcaatcccaaggtaaaatcaaggaactcttcagcaaggacgctattaatgctgagactgtgctggtactggtgaatgctgtttacttcaaggccaaatgggaaacatactttgaccatgaaaacacggtggatgcacctttctgtctaaatgcgaatgaaaacaagagtgtgaagatgatgacgcaaaaaggcctctacagaattggcttcatagaggaggtgaaggcacagatcctggaaatgaggtacaccaaggggaagctcagcatgttcgtgctgctgccatctcactctaaagataacctgaagggtctggaagagcttgaaaggaaaatcacctatgaaaaaatggtggcctggagcagctcagaaaacatgtcagaagaatcggtggtcctgtccttcccccggttcaccctggaagacagctatgatctcaattccattttacaagacatgggcattacggatatctttgatgaaacgagggctgatcttactggaatctctccaagtcccaatttgtacttgtcaaaaattatccacaaaacctttgtggaggtggatgaaaacggtacccaggcagctgcagccactggggctgttgtctcggaaaggtcactacgatcttgggtggagtttaatgccaaccacccttttctctttttcattagacacaacaaaacccaaaccattctcttttatggcagggtctgctctccttaa

SEQ ID NO: 180526 - DNA, 1278 bp, Homo sapiens
  Payload ID: 15554
  Gene Symbol: SERPINB12
  Gene Name: serpin peptidase inhibitor, clade B (ovalbumin), member 12
  Uniprot ID: Q96P63
  ENST ID: ENST00000382768
  CDS Start-End: 1-1278
atggactctcttgttacagcaaacaccaaattttgctttgatctttttcaagagataggcaaagatgatcgtcataaaaacatatttttctctcccctgagcctctcagctgcccttggtatggtacgcttgggtgctagaagtgacagtgcacatcagattgatgaggtactacacttcaacgaattttcccagaatgaaagcaaagaacctgacccttgtctgaaaagcaacaaacaaaaagtgctggctgacagctctctggaggggcagaaaaaaacgacagagcctctggatcagcaggctgggtccttaaacaatgagagcggactggtcagctgctactttgggcagcttctctccaaattagacaggatcaagactgattacacactgagtattgccaacaggctttatggagagcaggaattcccaatctgtcaggaatacttagatggtgtgattcaattttaccacacgacgattgaaagtgttgatttccaaaaaaaccctgaaaaatccagacaagagattaacttctgggttgaatgtcaatcccaaggtaaaatcaaggaactcttcagcaaggacgctattaatgctgagactgtgctggtactggtgaatgctgtttacttcaaggccaaatgggaaacatactttgaccatgaaaacacggtggatgcacctttctgtctaaatgcgaatgaaaacaagagtgtgaagatgatgacgcaaaaaggcctctacagaattggcttcatagaggaggtgaaggcacagatcctggaaatgaggtacaccaaggggaagctcagcatgttcgtgctgctgccatctcactctaaagataacctgaagggtctggaagagcttgaaaggaaaatcacctatgaaaaaatggtggcctggagcagctcagaaaacatgtcagaagaatcggtggtcctgtccttcccccggttcaccctggaagacagctatgatctcaattccattttacaagacatgggcattacggatatctttgatgaaacgagggctgatcttactggaatctctccaagtcccaatttgtacttgtcaaaaattatccacaaaacctttgtggaggtggatgaaaacggtacccaggcagctgcagccactggggctgttgtctcggaaaggtcactacgatcttgggtggagtttaatgccaaccacccttttctctttttcattagacacaacaaaacccaaaccattctcttttatggcagggtctgctctccttaa

SEQ ID NO: 180527 - DNA, 3206 bp, Homo sapiens
  Payload ID: 15555
  Gene Symbol: SERPINB13
  Gene Name: serpin peptidase inhibitor, clade B (ovalbumin), member 13
  ENST ID: ENST00000269489
  CDS Start-End: 169-1371
aaagttccaaggagattttaaggtgcacgcaaggtggaaaaccactgctgaagcagatgtggagaactataaattaaggatcccagctacttaattgacttatgcttcctagttcgttgcccagccaccaccgtctctccaaaaacccgaggtctcgctaaaatcatcatggattcacttggcgccgtcagcactcgacttgggtttgatcttttcaaagagctgaagaaaacaaatgatggcaacatcttcttttcccctgtgggcatcttgactgcaattggcatggtcctcctggggacccgaggagccaccgcttcccagttggaggaggtgtttcactctgaaaaagagacgaagagctcaagaataaaggctgaagaaaaagaggtggtaagaataaaggctgaaggaaaagagattgagaacacagaagcagtacatcaacaattccaaaagtttttgactgaaataagcaaactcactaatgattatgaactgaacataaccaacaggctgtttggagaaaaaacatacctcttccttcaaaaatacttagattatgttgaaaaatattatcatgcatctctggaacctgttgattttgtaaatgcagccgatgaaagtcgaaagaagattaattcctgggttgaaagcaaaacaaatgaaaaaatcaaggacttgttcccagatggctctattagtagctctaccaagctggtgctggtgaacatggtttattttaaagggcaatgggacagggagtttaagaaagaaaatactaaggaagagaaattttggatgaataagagcacaagtaaatctgtacagatgatgacacagagccattcctttagcttcactttcctggaggacttgcaggccaaaattctagggattccatataaaaacaacgacctaagcatgtttgtgcttctgcccaacgacatcgatggcctggagaagataatagataaaataagtcctgagaaattggtagagtggactagtccagggcatatggaagaaagaaaggtgaatctgcacttgccccggtttgaggtggaggacggttacgatctagaggcggtcctggctgccatggggatgggcgatgccttcagtgagcacaaagccgactactcgggaatgtcgtcaggctccgggttgtacgcccagaagttcctgcacagttcctttgtggcagtaactgaggaaggcaccgaggctgcagctgccaccggcataggctttactgtcacatccgccccaggtcatgaaaatgttcactgcaatcatcccttcctgttcttcatcaggcacaatgaatccaacagcatcctcttcttcggcagattttcttctccttaagatgatcgttgccatggcattgctgcttttagcaaaaaacaactaccagtgttactcatatgattatgaaaatcgtccattcttttaaatgttgtctcacttgcatttccagtcttggccatcaaatcaatgatttaatgactccaataatgtgtgtgtttataaccatcctcgaaagtgaaatgtccttttctttgtgccatgcgtaaggtgagtcaaaccaaacctcattgataatctccctttggtttcctttgaaagtaaattggtatcttgtagttttgtgcacacgaaaggagagaaagtctctccagtaaagagtacgaactagtaattttggggggtctctctaattctggtattttgacatgttataatacgcaagtaaaataaaacaatagtttactcagctcatgttactattccccaacagatattgtggcaaatcacacataggaaagagaatttgggaatacagtagcaaaacataaattaaaactcaaatgccaggacaaaataaaacaatataccagatggagaggatgcccgtattttcatcttccattctaacattatccattgttagatgcataagcattttgatattgtgtaataaatgtggtatttgagaagataaatgatgtagttgatcagtattcctcctctatcacctttttagactttgtaaggtaaatatttggactaacttttagaaaagtttccctttttttctccatttacatttttctggtttttttttttttttgagtgaggtacgagtattaccaaatgatattttctgaagatgctttttggaaagctctgaatctatacctaatgctcttaattattggcttgtttcatttttttcctccagtttttaacaagatcacataactggcttatttttaacagctttgtcaaactacaatttacatgccgtaaaatgtacacactgtaattttataattcattgacttttagtaaatttctagcgttatgcatcgccacaatccagttttagaatatttccatgaccctaagaagtttcctcatgtctattaatattcccaatcctaggcaccactgagttgttttctgtctttataagtttttctttctacatcttatataaatggaatcataatacatgtagtattttgtgtctggcgtcttgcacttagcatggtgttcttgaggttcatctgttgtagtatgtattgatacttaatttttttattgccgaatactattccattgcatggaaaagacctattttatttctaggttcaccagttgagggacatttggattgttcccacttcttggctgttaggaataatgttgctctgaacatgtaaataaagatctttgtgttcacatatgttttcatttctgttggggagattcctaggctagaaattgctgggccatatgaaaaatcaatagttagctttgtaagaaacagtcaaactgttttccaacgtgacattttatattcccaccaggaatgtttaaaactagtgtcttcaaatcctcaccaacatccaggattgtgtctttatgattatagccatttttgtaggtacaaagtggcatctcatggtggttttaatttgcatttccataatatctaattaggttgagctttttttatgtgcttattggccatttgtttgactttgtttggtgaaatgtatacaaatcatttgctcatttttaatttgggttgtctgtcttgtcttctcattttattgagttaaatgagttcttaataatctctggcttacaagtccttaatttatcaaatatatgatacgtggacatttcctcat

SEQ ID NO: 180528 - DNA, 3114 bp, Homo sapiens
  Payload ID: 15555
  Gene Symbol: SERPINB13
  Gene Name: serpin peptidase inhibitor, clade B (ovalbumin), member 13
  Uniprot ID: Q9UIV8
  ENST ID: ENST00000344731
  CDS Start-End: 103-1278
ctataaattaaggatcccagctacttaattgacttatgcttcctagttcgttgcccagccaccaccgtctctccaaaaacccgaggtctcgctaaaatcatcatggattcacttggcgccgtcagcactcgacttgggtttgatcttttcaaagagctgaagaaaacaaatgatggcaacatcttcttttcccctgtgggcatcttgactgcaattggcatggtcctcctggggacccgaggagccaccgcttcccagttggaggaggtgtttcactctgaaaaagagacgaagagctcaagaataaaggctgaagaaaaagaggtgattgagaacacagaagcagtacatcaacaattccaaaagtttttgactgaaataagcaaactcactaatgattatgaactgaacataaccaacaggctgtttggagaaaaaacatacctcttccttcaaaaatacttagattatgttgaaaaatattatcatgcatctctggaacctgttgattttgtaaatgcagccgatgaaagtcgaaagaagattaattcctgggttgaaagcaaaacaaatgaaaaaatcaaggacttgttcccagatggctctattagtagctctaccaagctggtgctggtgaacatggtttattttaaagggcaatgggacagggagtttaagaaagaaaatactaaggaagagaaattttggatgaataagagcacaagtaaatctgtacagatgatgacacagagccattcctttagcttcactttcctggaggacttgcaggccaaaattctagggattccatataaaaacaacgacctaagcatgtttgtgcttctgcccaacgacatcgatggcctggagaagataatagataaaataagtcctgagaaattggtagagtggactagtccagggcatatggaagaaagaaaggtgaatctgcacttgccccggtttgaggtggaggacggttacgatctagaggcggtcctggctgccatggggatgggcgatgccttcagtgagcacaaagccgactactcgggaatgtcgtcaggctccgggttgtacgcccagaagttcctgcacagttcctttgtggcagtaactgaggaaggcaccgaggctgcagctgccaccggcataggctttactgtcacatccgccccaggtcatgaaaatgttcactgcaatcatcccttcctgttcttcatcaggcacaatgaatccaacagcatcctcttcttcggcagattttcttctccttaagatgatcgttgccatggcattgctgcttttagcaaaaaacaactaccagtgttactcatatgattatgaaaatcgtccattcttttaaatgttgtctcacttgcatttccagtcttggccatcaaatcaatgatttaatgactccaataatgtgtgtgtttataaccatcctcgaaagtgaaatgtccttttctttgtgccatgcgtaaggtgagtcaaaccaaacctcattgataatctccctttggtttcctttgaaagtaaattggtatcttgtagttttgtgcacacgaaaggagagaaagtctctccagtaaagagtacgaactagtaattttggggggtctctctaattctggtattttgacatgttataatacgcaagtaaaataaaacaatagtttactcagctcatgttactattccccaacagatattgtggcaaatcacacataggaaagagaatttgggaatacagtagcaaaacataaattaaaactcaaatgccaggacaaaataaaacaatataccagatggagaggatgcccgtattttcatcttccattctaacattatccattgttagatgcataagcattttgatattgtgtaataaatgtggtatttgagaagataaatgatgtagttgatcagtattcctcctctatcacctttttagactttgtaaggtaaatatttggactaacttttagaaaagtttccctttttttctccatttacatttttctggtttttttttttttttgagtgaggtacgagtattaccaaatgatattttctgaagatgctttttggaaagctctgaatctatacctaatgctcttaattattggcttgtttcatttttttcctccagtttttaacaagatcacataactggcttatttttaacagctttgtcaaactacaatttacatgccgtaaaatgtacacactgtaattttataattcattgacttttagtaaatttctagcgttatgcatcgccacaatccagttttagaatatttccatgaccctaagaagtttcctcatgtctattaatattcccaatcctaggcaccactgagttgttttctgtctttataagtttttctttctacatcttatataaatggaatcataatacatgtagtattttgtgtctggcgtcttgcacttagcatggtgttcttgaggttcatctgttgtagtatgtattgatacttaatttttttattgccgaatactattccattgcatggaaaagacctattttatttctaggttcaccagttgagggacatttggattgttcccacttcttggctgttaggaataatgttgctctgaacatgtaaataaagatctttgtgttcacatatgttttcatttctgttggggagattcctaggctagaaattgctgggccatatgaaaaatcaatagttagctttgtaagaaacagtcaaactgttttccaacgtgacattttatattcccaccaggaatgtttaaaactagtgtcttcaaatcctcaccaacatccaggattgtgtctttatgattatagccatttttgtaggtacaaagtggcatctcatggtggttttaatttgcatttccataatatctaattaggttgagctttttttatgtgcttattggccatttgtttgactttgtttggtgaaatgtatacaaatcatttgctcatttttaatttgggttgtctgtcttgtcttctcattttattgagttaaatgagttcttaataatctctggcttacaagtccttaatttatcaaatatatgatacgtggacatttcctcata

SEQ ID NO: 180529 - DNA, 580 bp, Homo sapiens
  Payload ID: 15555
  Gene Symbol: SERPINB13
  Gene Name: serpin peptidase inhibitor, clade B (ovalbumin), member 13
  ENST ID: ENST00000431153
  CDS Start-End: 106-580
ttcttttttcttgttcctttgtagcaagatagttttctttcattttcttcctggcatttggcactcctaaataatgcaaatgcaaaaataactctgttacagagaatgacttgtcaggacacagctctgtccatctgtgttcgttgcccagccaccaccgtctctccaaaaacccgaggtctcgctaaaatcatcatggattcacttggcgccgtcagcactcgacttgggtttgatcttttcaaagagctgaagaaaacaaatgatggcaacatcttcttttcccctgtgggcatcttgactgcaattggcatggtcctcctggggacccgaggagccaccgcttcccagttggaggaggtgtttcactctgaaaaagagacgaagagctcaagaataaaggctgaagaaaaagaggtgattgagaacacagaagcagtacatcaacaattccaaaagtttttgactgaaataagcaaactcactaatgattatgaactgaacataaccaacaggctgtttggagaaaaaacatacctcttccttcaaaaatacttagattatgttgaaaaatattatc

SEQ ID NO: 180530 - DNA, 1018 bp, Homo sapiens
  Payload ID: 15555
  Gene Symbol: SERPINB13
  Gene Name: serpin peptidase inhibitor, clade B (ovalbumin), member 13
  ENST ID: ENST00000415733
  CDS Start-End: 1-375
acaaatgatggcaacatcttcttttcccctgtgggcatcttgactgcaattggcatggtcctcctggggacccgaggagccaccgcttcccagttggaggaggtgtttcactctgaaaaagagacgaagagctcaagaataaaggctgaagaaaaagaggtgagcacaagtaaatctgtacagatgatgacacagagccattcctttagcttcactttcctggaggacttgcaggccaaaattctagggattccatataaaaacaacgacctaagcatgtttgtgcttctgcccaacgacatcgatggcctggagaaggttaatcactgttctgaagatggtgtttgtaacaccagttatgcttcatacttctgaggtaggagtctggacatgactcagcaggcaagactcaactctggcagtggggttcagacatcagacaaattgaggactagctaaaacagggaagagttggaagcacctctccagaagacatgcccaccagtgtgccatatcagtttacccttgccatggctacacccagaagttatggatgaagctgctatggatgaagctggaggacattatgctaagtgaaaagtaatacacaaaaagaaaagtactgaatgatctcacttaaatgtgtaatataaaaaagtcaaatacatagagaaagagaataaaatggtaactatcagggattggggagatgcagggagagggagaaaaaatagagagatataggtcaaaggatccaaagttgaagatatgtaggatgaacgagtctagagctctaacgtacaagacaaggatgatggttaataataatgtattatatataagatttttgtgaaaatagtagatttaaggtgctcttgccacacatacaaaaaggataactatgtgagatgacggatatatgttaatttacttcactagagcaaccatttcactgtgtacatgtatatcaaaacatcaggttgtatatagagatataaaataaaaaagtaaaaaaaga

SEQ ID NO: 180531 - DNA, 2805 bp, Homo sapiens
  Payload ID: 15555
  Gene Symbol: SERPINB13
  Gene Name: serpin peptidase inhibitor, clade B (ovalbumin), member 13
  ENST ID: ENST00000438844
  CDS Start-End: 40-537
accgtctctccaaaaacccgaggtctcgctaaaatcatcatggattcacttggcgccgtcagcactcgacttgggtttgatcttttcaaagagctgaagaaaacaaatgatggcaacatcttcttttcccctgtgggcatcttgactgcaattggcatggtcctcctggggacccgaggagccaccgcttcccagttggaggaggtgtttcactctgaaaaagagacgaagagctcaagaataaaggctgaagaaaaagagattgagaacacagaagcagtacatcaacaattccaaaagtttttgactgaaataagcaaactcactaatgattatgaactgaacataaccaacaggctgtttggagaaaaaacatacctcttccttcaaaaatacttagattatgttgaaaaatattatcatgcatctctggaacctgttgattttgtaaatgcagccgatgaaagtcgaaagaagattaattcctgggttgaaagcaaaacaaatgatgtggaaactgaggcacagagagtttaaataacttgcccaagattcctcagctgataagaggcaaactggatgctaacagaggcatctgaccccagagtctggactcttaaccatgaaccttaatttatccactgggataaataggcgatgggcaaaatgagaacctccccgtcgattctgccagcaaaccctttgtcagcaaggccctcagaaaaaatcaaggacttgttcccagatggctctattagtagctctaccaagctggtgctggtgaacatggtttattttaaagggcaatgggacagggagtttaagaaagaaaatactaaggaagagaaattttggatgaataagagcacaagtaaatctgtacagatgatgacacagagccattcctttagcttcactttcctggaggacttgcaggccaaaattctagggattccatataaaaacaacgacctaagcatgtttgtgcttctgcccaacgacatcgatggcctggagaagataatagataaaataagtcctgagaaattggtagagtggactagtccagggcatatggaagaaagaaaggtgaatctgcacttgccccggtttgaggtggaggacggttacgatctagaggcggtcctggctgccatggggatgggcgatgccttcagtgagcacaaagccgactactcgggaatgtcgtcaggctccgggttgtacgcccagaagttcctgcacagttcctttgtggcagtaactgaggaaggcaccgaggctgcagctgccaccggcataggctttactgtcacatccgccccaggtcatgaaaatgttcactgcaatcatcccttcctgttcttcatcaggcacaatgaatccaacagcatcctcttcttcggcagattttcttctccttaagatgatcgttgccatggcattgctgcttttagcaaaaaacaactaccagtgttactcatatgattatgaaaatcgtccattcttttaaatgttgtctcacttgcatttccagtcttggccatcaaatcaatgatttaatgactccaataatgtgtgtgtttataaccatcctcgaaagtgaaatgtccttttctttgtgccatgcgtaaggtgagtcaaaccaaacctcattgataatctccctttggtttcctttgaaagtaaattggtatcttgtagttttgtgcacacgaaaggagagaaagtctctccagtaaagagtacgaactagtaattttggggggtctctctaattctggtattttgacatgttataatacgcaagtaaaataaaacaatagtttactcagctcatgttactattccccaacagatattgtggcaaatcacacataggaaagagaatttgggaatacagtagcaaaacataaattaaaactcaaatgccaggacaaaataaaacaatataccagatggagaggatgcccgtattttcatcttccattctaacattatccattgttagatgcataagcattttgatattgtgtaataaatgtggtatttgagaagataaatgatgtagttgatcagtattcctcctctatcacctttttagactttgtaaggtaaatatttggactaacttttagaaaagtttccctttttttctccatttacatttttctggtttttttttttttttgagtgaggtacgagtattaccaaatgatattttctgaagatgctttttggaaagctctgaatctatacctaatgctcttaattattggcttgtttcatttttttcctccagtttttaacaagatcacataactggcttatttttaacagctttgtcaaactacaatttacatgccgtaaaatgtacacactgtaattttataattcattgacttttagtaaatttctagcgttatgcatcgccacaatccagttttagaatatttccatgaccctaagaagtttcctcatgtctattaatattcccaatcctaggcaccactgagttgttttctgtctttataagtttttctttctacatcttatataaatggaatcataatacatgtagtattttgtgtctggcgtcttgcacttagcatggtgttcttgaggttcatctgttgtagtatgtattgatacttaatttttttattgccgaatactattccattgcatggaaaagacctattttatttctaggttcaccagttgagggacatttggattgttcccacttcttggctgttaggaataatgttgctctgaacatgtaaataaagatctttgtgttca

SEQ ID NO: 180532 - DNA, 1913 bp, Homo sapiens
  Payload ID: 15556
  Gene Symbol: SERPINB2
  Gene Name: serpin peptidase inhibitor, clade B (ovalbumin), member 2
  Uniprot ID: P05120
  ENST ID: ENST00000299502
  CDS Start-End: 81-1328
gaactgtaacaactctcagaggagcattgcccgtcagacagcaactcagagaataaccagagaacaaccagattgaaacaatggaggatctttgtgtggcaaacacactctttgccctcaatttattcaagcatctggcaaaagcaagccccacccagaacctcttcctctccccatggagcatctcgtccaccatggccatggtctacatgggctccaggggcagcaccgaagaccagatggccaaggtgcttcagtttaatgaagtgggagccaatgcagttacccccatgactccagagaactttaccagctgtgggttcatgcagcagatccagaagggtagttatcctgatgcgattttgcaggcacaagctgcagataaaatccattcatccttccgctctctcagctctgcaatcaatgcatccacagggaattatttactggaaagtgtcaataagctgtttggtgagaagtctgcgagcttccgggaagaatatattcgactctgtcagaaatattactcctcagaaccccaggcagtagacttcctagaatgtgcagaagaagctagaaaaaagattaattcctgggtcaagactcaaaccaaaggcaaaatcccaaacttgttacctgaaggttctgtagatggggataccaggatggtcctggtgaatgctgtctacttcaaaggaaagtggaaaactccatttgagaagaaactaaatgggctttatcctttccgtgtaaactcggctcagcgcacacctgtacagatgatgtacttgcgtgaaaagctaaacattggatacatagaagacctaaaggctcagattctagaactcccatatgctggagatgttagcatgttcttgttgcttccagatgaaattgccgatgtgtccactggcttggagctgctggaaagtgaaataacctatgacaaactcaacaagtggaccagcaaagacaaaatggctgaagatgaagttgaggtatacataccccagttcaaattagaagagcattatgaactcagatccattctgagaagcatgggcatggaggacgccttcaacaagggacgggccaatttctcagggatgtcggagaggaatgacctgtttctttctgaagtgttccaccaagccatggtggatgtgaatgaggagggcactgaagcagccgctggcacaggaggtgttatgacagggagaactggacatggaggcccacagtttgtggcagatcatccttttctttttcttattatgcataagataaccaactgcattttatttttcggcagattttcctcaccctaaaactaagcgtgctgcttctgcaaaagatttttgtagatgagctgtgtgcctcagaattgctatttcaaattgccaaaaatttagagatgttttctacatatttctgctcttctgaacaacttctgctacccactaaataaaaacacagaaataattagacaattgtctattataacatgacaaccctattaatcatttggtcttctaaaatgggatcatgcccatttagattttccttactatcagtttatttttataacattaacttttactttgttatttattattttatataatggtgagtttttaaattattgctcactgcctatttaatgtagctaataaagttatagaagcagatgatctgttaatttcctatctaataaatgcctttaattgttctcataatgaagaataagtaggtatccctccatgcccttctgtaataaatatctggaaaaaacattaaacaataggcaaatatatgttatgtgcatttctagaaatacataacacatatatatgtctgtatcttatattcaattgcaagtatataataaataaacctgcttccaaacaacaata

SEQ ID NO: 180533 - DNA, 717 bp, Homo sapiens
  Payload ID: 15556
  Gene Symbol: SERPINB2
  Gene Name: serpin peptidase inhibitor, clade B (ovalbumin), member 2
  ENST ID: ENST00000404622
  CDS Start-End: 377-717
gttgtgcccgctttcctactcagtgcaattgttccaggtttgcaggtcccaggttccaagactttgcggtcttcttttgttcacttggaaccgatatcttttggaggtgcatttcttgcactacaacttgcttaagctcttacacttcatagtgaagctatgcaccaccgagtgaagcgatgtggaacattggaaagagtgggcttccttagacagacctgggcttgaatccctgctccactacctaccagctgtgtgaccttatacaagttacttaatgtttctgagcatcaggatataatctataaaatagggagaatcacctctacctcatacagattctgcaaagattaaacgaggagaggagattgaaacaatggaggatctttgtgtggcaaacacactctttgccctcaatttattcaagcatctggcaaaagcaagccccacccagaacctcttcctctccccatggagcatctcgtccaccatggccatggtctacatgggctccaggggcagcaccgaagaccagatggccaaggtgcttcagtttaatgaagtgggagccaatgcagttacccccatgactccagagaactttaccagctgtgggttcatgcagcagatccagaagggtagttatcctgatgcgattttgcaggcacaagctgcagataaaatccattcatccttccgctctctcagctctgcaat

SEQ ID NO: 180534 - DNA, 751 bp, Homo sapiens
  Payload ID: 15556
  Gene Symbol: SERPINB2
  Gene Name: serpin peptidase inhibitor, clade B (ovalbumin), member 2
  ENST ID: ENST00000443281
  CDS Start-End: 354-751
ttgcctgcagagcctgaggtcagggaaggtctcagatggttcataccttggtgtatacatgagtttcataggcctgggattaaggattatccctgcaatcttgcctggcattgactttctacctggtggggtggcagaagaagggggtcttctagtcctcccagtaatgaacaccccagtataggaagtcttttttagtaaggctgtggtatgtgtggtgcatatagggaaggggttctgggataggggctgggtgaaactccaaaccttcaaacaatgagtcaaagtcactttagaagcaggaaagcagaaagaagattgaccgtcttaccagatgcaacaagattgaaacaatggaggatctttgtgtggcaaacacactctttgccctcaatttattcaagcatctggcaaaagcaagccccacccagaacctcttcctctccccatggagcatctcgtccaccatggccatggtctacatgggctccaggggcagcaccgaagaccagatggccaaggtgcttcagtttaatgaagtgggagccaatgcagttacccccatgactccagagaactttaccagctgtgggttcatgcagcagatccagaagggtagttatcctgatgcgattttgcaggcacaagctgcagataaaatccattcatccttccgctctctcagctctgcaatcaatgcatccacagggaattatttactggaaagtgtcaataagctgtttggtgagaa

SEQ ID NO: 180535 - DNA, 2155 bp, Homo sapiens
  Payload ID: 15556
  Gene Symbol: SERPINB2
  Gene Name: serpin peptidase inhibitor, clade B (ovalbumin), member 2
  Uniprot ID: P05120
  ENST ID: ENST00000457692
  CDS Start-End: 334-1581
gtaacaactctcagaggagcattgcccgtcagacagcaactcagagaataaccagagaacaaccagcatttcttgcactacaacttgcttaagctcttacacttcatagtgaagctatgcaccaccgagtgaagcgatgtggaacattggaaagagtgggcttccttagacagacctgggcttgaatccctgctccactacctaccagctgtgtgaccttatacaagttacttaatgtttctgagcatcaggatataatctataaaatagggagaatcacctctacctcatacagattctgcaaagattaaacgaggagaggagattgaaacaatggaggatctttgtgtggcaaacacactctttgccctcaatttattcaagcatctggcaaaagcaagccccacccagaacctcttcctctccccatggagcatctcgtccaccatggccatggtctacatgggctccaggggcagcaccgaagaccagatggccaaggtgcttcagtttaatgaagtgggagccaatgcagttacccccatgactccagagaactttaccagctgtgggttcatgcagcagatccagaagggtagttatcctgatgcgattttgcaggcacaagctgcagataaaatccattcatccttccgctctctcagctctgcaatcaatgcatccacagggaattatttactggaaagtgtcaataagctgtttggtgagaagtctgcgagcttccgggaagaatatattcgactctgtcagaaatattactcctcagaaccccaggcagtagacttcctagaatgtgcagaagaagctagaaaaaagattaattcctgggtcaagactcaaaccaaaggcaaaatcccaaacttgttacctgaaggttctgtagatggggataccaggatggtcctggtgaatgctgtctacttcaaaggaaagtggaaaactccatttgagaagaaactaaatgggctttatcctttccgtgtaaactcggctcagcgcacacctgtacagatgatgtacttgcgtgaaaagctaaacattggatacatagaagacctaaaggctcagattctagaactcccatatgctggagatgttagcatgttcttgttgcttccagatgaaattgccgatgtgtccactggcttggagctgctggaaagtgaaataacctatgacaaactcaacaagtggaccagcaaagacaaaatggctgaagatgaagttgaggtatacataccccagttcaaattagaagagcattatgaactcagatccattctgagaagcatgggcatggaggacgccttcaacaagggacgggccaatttctcagggatgtcggagaggaatgacctgtttctttctgaagtgttccaccaagccatggtggatgtgaatgaggagggcactgaagcagccgctggcacaggaggtgttatgacagggagaactggacatggaggcccacagtttgtggcagatcatccttttctttttcttattatgcataagataaccaactgcattttatttttcggcagattttcctcaccctaaaactaagcgtgctgcttctgcaaaagatttttgtagatgagctgtgtgcctcagaattgctatttcaaattgccaaaaatttagagatgttttctacatatttctgctcttctgaacaacttctgctacccactaaataaaaacacagaaataattagacaattgtctattataacatgacaaccctattaatcatttggtcttctaaaatgggatcatgcccatttagattttccttactatcagtttatttttataacattaacttttactttgttatttattattttatataatggtgagtttttaaattattgctcactgcctatttaatgtagctaataaagttatagaagcagatgatctgttaatttcctatctaataaatgcctttaattgttctcataatgaagaataagtaggtatccctccatgcccttctgtaataaatatctggaaaaaacattaaacaataggcaaatatatgttatgtgcatttctagaaatacataacacatatatatgtctgtatcttatattcaattgcaagtatataataaataaacctgcttcc

SEQ ID NO: 180536 - DNA, 762 bp, Homo sapiens
  Payload ID: 15556
  Gene Symbol: SERPINB2
  Gene Name: serpin peptidase inhibitor, clade B (ovalbumin), member 2
  ENST ID: ENST00000413956
  CDS Start-End: 280-762
gagaacaaccagcatttcttgcactacaacttgcttaagctcttacacttcatagtgaagctatgcaccaccgagtgaagcgatgtggaacattggaaagagtgggcttccttagacagacctgggcttgaatccctgctccactacctaccagctgtgtgaccttatacaagttacttaatgtttctgagcatcaggatataatctataaaatagggagaatcacctctacctcatacagattctgcaaagattaaacgaggagaggagattgaaacaatggaggatctttgtgtggcaaacacactctttgccctcaatttattcaagcatctggcaaaagcaagccccacccagaacctcttcctctccccatggagcatctcgtccaccatggccatggtctacatgggctccaggggcagcaccgaagaccagatggccaaggtgcttcagtttaatgaagtgggagccaatgcagttacccccatgactccagagaactttaccagctgtgggttcatgcagcagatccagaagggtagttatcctgatgcgattttgcaggcacaagctgcagataaaatccattcatccttccgctctctcagctctgcaatcaatgcatccacagggaattatttactggaaagtgtcaataagctgtttggtgagaagtctgcgagcttccgggaagaatatattcgactctgtcagaaatattactcctcagaaccccaggcagtagacttcctagaatgt

SEQ ID NO: 180537 - DNA, 1777 bp, Homo sapiens
  Payload ID: 15557
  Gene Symbol: SERPINB3
  Gene Name: serpin peptidase inhibitor, clade B (ovalbumin), member 3
  Uniprot ID: P29508
  ENST ID: ENST00000283752
  CDS Start-End: 145-1317
aaatactaaccacagagggagaggcagcaagaggagaggcataaattcaggatctcacccttcattccacagacacacatagcctctctgcccacctctgcttcctctaggaacacaggagttccagatcacatcgagttcaccatgaattcactcagtgaagccaacaccaagttcatgttcgacctgttccaacagttcagaaaatcaaaagagaacaacatcttctattcccctatcagcatcacatcagcattagggatggtcctcttaggagccaaagacaacactgcacaacagattaagaaggttcttcactttgatcaagtcacagagaacaccacaggaaaagctgcaacatatcatgttgataggtcaggaaatgttcatcaccagtttcaaaagcttctgactgaattcaacaaatccactgatgcatatgagctgaagatcgccaacaagctcttcggagaaaaaacgtatctatttttacaggaatatttagatgccatcaagaaattttaccagaccagtgtggaatctgttgattttgcaaatgctccagaagaaagtcgaaagaagattaactcctgggtggaaagtcaaacgaatgaaaaaattaaaaacctaattcctgaaggtaatattggcagcaataccacattggttcttgtgaacgcaatctatttcaaagggcagtgggagaagaaatttaataaagaagatactaaagaggaaaaattttggccaaacaagaatacatacaagtccatacagatgatgaggcaatacacatcttttcattttgcctcgctggaggatgtacaggccaaggtcctggaaataccatacaaaggcaaagatctaagcatgattgtgttgctgccaaatgaaatcgatggtctccagaagcttgaagagaaactcactgctgagaaattgatggaatggacaagtttgcagaatatgagagagacacgtgtcgatttacacttacctcggttcaaagtggaagagagctatgacctcaaggacacgttgagaaccatgggaatggtggatatcttcaatggggatgcagacctctcaggcatgaccgggagccgcggtctcgtgctatctggagtcctacacaaggcctttgtggaggttacagaggagggagcagaagctgcagctgccaccgctgtagtaggattcggatcatcacctacttcaactaatgaagagttccattgtaatcaccctttcctattcttcataaggcaaaataagaccaacagcatcctcttctatggcagattctcatccccgtagatgcaattagtctgtcactccatttggaaaatgttcacctgcagatgttctggtaaactgattgctggcaacaacagattctcttggctcatatttcttttctttctcatcttgatgatgatcgtcatcatcaagaatttaatgattaaaatagcatgcctttctctctttctcttaataagcccacatataaatgtactttttcttccagaaaaattctccttgaggaaaaatgtccaaaataagatgaatcacttaataccgtatcttctaaatttgaaatataattctgtttgtgacctgttttaaatgaaccaaaccaaatcatactttttctttgaatttagcaacctagaaacacacatttctttgaatttaggtgatacctaaatccttcttatgtttctaaattttgtgattctataaaacacatcatcaataaaatagtgacataaaatca

SEQ ID NO: 180538 - DNA, 1541 bp, Homo sapiens
  Payload ID: 15557
  Gene Symbol: SERPINB3
  Gene Name: serpin peptidase inhibitor, clade B (ovalbumin), member 3
  Uniprot ID: P29508
  ENST ID: ENST00000332821
  CDS Start-End: 66-1082
tagcctctctgcccacctctgcttcctctaggaacacaggagttccagatcacatcgagttcaccatgaattcactcagtgaagccaacaccaagttcatgttcgacctgttccaacagttcagaaaatcaaaagagaacaacatcttctattcccctatcagcatcacatcagcattagggatggtcctcttaggagccaaagacaacactgcacaacagattaagaaggttcttcactttgatcaagtcacagagaacaccacaggaaaagctgcaacatatcatgttgataggtcaggaaatgttcatcaccagtttcaaaagcttctgactgaattcaacaaatccactgatgcatatgagctgaagatcgccaacaagctcttcggagaaaaaacgtatctatttttacaggaatatttagatgccatcaagaaattttaccagaccagtgtggaatctgttgattttgcaaatgctccagaagaaagtcgaaagaagattaactcctgggtggaaagtcaaacgaatgaaaaaattaaaaacctaattcctgaaggtaatattggcagcaataccacattggttcttgtgaacgcaatctatttcaaagggcagtgggagaagaaatttaataaagaagatactaaagaggaaaaattttggccaaacaagcttgaagagaaactcactgctgagaaattgatggaatggacaagtttgcagaatatgagagagacacgtgtcgatttacacttacctcggttcaaagtggaagagagctatgacctcaaggacacgttgagaaccatgggaatggtggatatcttcaatggggatgcagacctctcaggcatgaccgggagccgcggtctcgtgctatctggagtcctacacaaggcctttgtggaggttacagaggagggagcagaagctgcagctgccaccgctgtagtaggattcggatcatcacctacttcaactaatgaagagttccattgtaatcaccctttcctattcttcataaggcaaaataagaccaacagcatcctcttctatggcagattctcatccccgtagatgcaattagtctgtcactccatttggaaaatgttcacctgcagatgttctggtaaactgattgctggcaacaacagattctcttggctcatatttcttttctttctcatcttgatgatgatcgtcatcatcaagaatttaatgattaaaatagcatgcctttctctctttctcttaataagcccacatataaatgtactttttcttccagaaaaattctccttgaggaaaaatgtccaaaataagatgaatcacttaataccgtatcttctaaatttgaaatataattctgtttgtgacctgttttaaatgaaccaaaccaaatcatactttttctttgaatttagcaacctagaaacacacatttctttgaatttaggtgatacctaaatccttcttatgtttctaaattttgtgattctataaaacacatcatcaataaaatagtgacataaaatc

SEQ ID NO: 180539 - DNA, 1173 bp, Homo sapiens
  Payload ID: 15557
  Gene Symbol: SERPINB3
  Gene Name: serpin peptidase inhibitor, clade B (ovalbumin), member 3
  ENST ID: ENST00000356424
  CDS Start-End: 1-1173
atgaattcactcagtgaagccaacaccaagttcatgttcgacctgttccaacagttcagaaaatcaaaagagaacaacatcttctattcccctatcagcatcacatcagcattagggatggtcctcttaggagccaaagacaacactgcacaacagattaagaaggttcttcactttgatcaagtcacagagaacaccacaggaaaagctgcaacatatcatgttgataggtcaggaaatgttcatcaccagtttcaaaagcttctgactgaattcaacaaatccactgatgcatatgagctgaagatcgccaacaagctcttcggagaaaaaacgtatctatttttacaggaatatttagatgccatcaagaaattttaccagaccagtgtggaatctgttgattttgcaaatgctccagaagaaagtcgaaagaagattaactcctgggtggaaagtcaaacgaatgaaaaaattaaaaacctaattcctgaaggtaatattggcagcaataccacattggttcttgtgaacgcaatctatttcaaagggcagtgggagaagaaatttaataaagaagatactaaagaggaaaaattttggccaaacaagaatacatacaagtccatacagatgatgaggcaatacacatcttttcattttgcctcgctggaggatgtacaggccaaggtcctggaaataccatacaaaggcaaagatctaagcatgattgtgttgctgccaaatgaaatcgatggtctccagaagcttgaagagaaactcactgctgagaaattgatggaatggacaagtttgcagaatatgagagagacatgtgtcgatttacacttacctcggttcaaaatggaagagagctatgacctcaaggacacgttgagaaccatgggaatggtgaatatcttcaatggggatgcagacctctcaggcatgacctggagccacggtctctcagtatctaaagtcctacacaaggcctttgtggaggtcactgaggagggagtggaagctgcagctgccaccgctgtagtagtagtcgaattatcatctccttcaactaatgaagagttctgttgtaatcaccctttcctattcttcataaggcaaaataagaccaacagcatcctcttctatggcagattctcatccccatag

SEQ ID NO: 180540 - DNA, 1749 bp, Homo sapiens
  Payload ID: 15558
  Gene Symbol: SERPINB4
  Gene Name: serpin peptidase inhibitor, clade B (ovalbumin), member 4
  Uniprot ID: P48594
  ENST ID: ENST00000341074
  CDS Start-End: 117-1289
aagaggagaggcataaatttaggatctcacccttcattccacagacacacacagcctctctgcccacctctgcttcctctaggaacacaggagttccagatcacatcgagttcaccatgaattcactcagtgaagccaacaccaagttcatgttcgatctgttccaacagttcagaaaatcaaaagagaacaacatcttctattcccctatcagcatcacatcagcattagggatggtcctcttaggagccaaagacaacactgcacaacaaattagcaaggttcttcactttgatcaagtcacagagaacaccacagaaaaagctgcaacatatcatgttgataggtcaggaaatgttcatcaccagtttcaaaagcttctgactgaattcaacaaatccactgatgcatatgagctgaagatcgccaacaagctcttcggagaaaagacgtatcaatttttacaggaatatttagatgccatcaagaaattttaccagaccagtgtggaatctactgattttgcaaatgctccagaagaaagtcgaaagaagattaactcctgggtggaaagtcaaacgaatgaaaaaattaaaaacctatttcctgatgggactattggcaatgatacgacactggttcttgtgaacgcaatctatttcaaagggcagtgggagaataaatttaaaaaagaaaacactaaagaggaaaaattttggccaaacaagaatacatacaaatctgtacagatgatgaggcaatacaattcctttaattttgccttgctggaggatgtacaggccaaggtcctggaaataccatacaaaggcaaagatctaagcatgattgtgctgctgccaaatgaaatcgatggtctgcagaagcttgaagagaaactcactgctgagaaattgatggaatggacaagtttgcagaatatgagagagacatgtgtcgatttacacttacctcggttcaaaatggaagagagctatgacctcaaggacacgttgagaaccatgggaatggtgaatatcttcaatggggatgcagacctctcaggcatgacctggagccacggtctctcagtatctaaagtcctacacaaggcctttgtggaggtcactgaggagggagtggaagctgcagctgccaccgctgtagtagtagtcgaattatcatctccttcaactaatgaagagttctgttgtaatcaccctttcctattcttcataaggcaaaataagaccaacagcatcctcttctatggcagattctcatccccatagatgcaattagtctgtcactccatttagaaaatgttcacctagaggtgttctggtaaactgattgctggcaacaacagattctcttggctcatatttcttttctatctcatcttgatgatgatagtcatcatcaagaatttaatgattaaaatagcatgcctttctctctttctcttaataagcccacatataaatgtacttttccttccagaaaaatttcccttgaggaaaaatgtccaagataagatgaatcatttaataccgtgtcttctaaatttgaaatataattctgtttctgacctgttttaaatgaaccaaaccaaatcatactttctcttcaaatttagcaacctagaaacacacatttctttgaatttaggtgatacctaaatccttcttatgtttctaaattttgtgattctataaaacacatcatcaataaaataatgacataaaatca

SEQ ID NO: 180541 - DNA, 1116 bp, Homo sapiens
  Payload ID: 15558
  Gene Symbol: SERPINB4
  Gene Name: serpin peptidase inhibitor, clade B (ovalbumin), member 4
  ENST ID: ENST00000413673
  CDS Start-End: 1-1115
tcaccatgaattcactcagtgaagccaacaccaagttcatgttcgatctgttccaacagttcagaaaatcaaaagagaacaacatcttctattcccctatcagcatcacatcagcattagggatggtcctcttaggagccaaagacaacactgcacaacaaattagcaaggttcttcactttgatcaagtcacagagaacaccacagaaaaagctgcaacatatcatgttgataggtcaggaaatgttcatcaccagtttcaaaagcttctgactgaattcaacaaatccactgatgcatatgagctgaagatcgccaacaagctcttcggagaaaagacgtatcaatttttacaggaatatttagatgccatcaagaaattttaccagaccagtgtggaatctactgattttgcaaatgctccagaagaaagtcgaaagaagattaactcctgggtggaaagtcaaacgaatgaaaaaattaaaaacctatttcctgatgggactattggcaatgatacgacactggttcttgtgaacgcaatctatttcaaagggcagtgggagaataaatttaaaaaagaaaacactaaagaggaaaaattttggccaaacaaggatgtacaggccaaggtcctggaaataccatacaaaggcaaagatctaagcatgattgtgctgctgccaaatgaaatcgatggtctgcagaagcttgaagagaaactcactgctgagaaattgatggaatggacaagtttgcagaatatgagagagacatgtgtcgatttacacttacctcggttcaaaatggaagagagctatgacctcaaggacacgttgagaaccatgggaatggtgaatatcttcaatggggatgcagacctctcaggcatgacctggagccacggtctctcagtatctaaagtcctacacaaggcctttgtggaggtcactgaggagggagtggaagctgcagctgccaccgctgtagtagtagtcgaattatcatctccttcaactaatgaagagttctgttgtaatcaccctttcctattcttcataaggcaaaataagaccaacagcatcctcttctatggcagattctcatccccataga

SEQ ID NO: 180542 - DNA, 709 bp, Homo sapiens
  Payload ID: 15558
  Gene Symbol: SERPINB4
  Gene Name: serpin peptidase inhibitor, clade B (ovalbumin), member 4
  ENST ID: ENST00000436264
  CDS Start-End: 75-709
agacacacacagcctctctgcccacctctgcttcctctaggaacacaggagttccagatcacatcgagttcaccatgaattcactcagtgaagccaacaccaagttcatgttcgatctgttccaacagttcagaaaatcaaaagagaacaacatcttctattcccctatcagcatcacatcagcattagggatggtcctcttaggagccaaagacaacactgcacaacaaattagcaaggttcttcactttgatcaagtcacagagaacaccacagaaaaagctgcaacatatcatgaatatttagatgccatcaagaaattttaccagaccagtgtggaatctactgattttgcaaatgctccagaagaaagtcgaaagaagattaactcctgggtggaaagtcaaacgaatgaaaaaattaaaaacctatttcctgatgggactattggcaatgatacgacactggttcttgtgaacgcaatctatttcaaagggcagtgggagaataaatttaaaaaagaaaacactaaagaggaaaaattttggccaaacaagaatacatacaaatctgtacagatgatgaggcaatacaattcctttaattttgccttgctggaggatgtacaggccaaggtcctggaaataccatacaaaggcaaagatctaagcatgattgtgctgctgccaaatgaaatcgatggtctgca

SEQ ID NO: 180543 - DNA, 2783 bp, Homo sapiens
  Payload ID: 15559
  Gene Symbol: SERPINB5
  Gene Name: serpin peptidase inhibitor, clade B (ovalbumin), member 5
  Uniprot ID: P36952
  ENST ID: ENST00000382771
  CDS Start-End: 293-1420
gaacatgttggaggccttttggaagctgtgcagacaacagtaacttcagcctgaatcatttctttcaattgtggacaagctgccaagaggcttgagtaggagaggagtgccgccgaggcggggcggggcggggcgtggagctgggctggcagtgggcgtggcggtgctgcccaggtgagccaccgctgcttctgcccagacacggtcgcctccacatccaggtctttgtgctcctcgcttgcctgttccttttccacgcattttccaggataactgtgactccaggcccgcaatggatgccctgcaactagcaaattcggcttttgccgttgatctgttcaaacaactatgtgaaaaggagccactgggcaatgtcctcttctctccaatctgtctctccacctctctgtcacttgctcaagtgggtgctaaaggtgacactgcaaatgaaattggacaggttcttcattttgaaaatgtcaaagatgtaccctttggatttcaaacagtaacatcggatgtaaacaaacttagttccttttactcactgaaactaatcaagcggctctacgtagacaaatctctgaatctttctacagagttcatcagctctacgaagagaccgtatgcaaaggaattggaaactgttgacttcaaagataaattggaagaaacgaaaggtcagatcaacaactcaattaaggatctcacagatggccactttgagaacattttagctgacaacagtgtgaacgaccagaccaaaatccttgtggttaatgctgcctactttgttggcaagtggatgaagaaattttctgaatcagaaacaaaagaatgtcctttcagagtcaacaagacagacaccaaaccagtgcagatgatgaacatggaggccacgttctgtatgggaaacattgacagtatcaattgtaagatcatagagcttccttttcaaaataagcatctcagcatgttcatcctactacccaaggatgtggaggatgagtccacaggcttggagaagattgaaaaacaactcaactcagagtcactgtcacagtggactaatcccagcaccatggccaatgccaaggtcaaactctccattccaaaatttaaggtggaaaagatgattgatcccaaggcttgtctggaaaatctagggctgaaacatatcttcagtgaagacacatctgatttctctggaatgtcagagaccaagggagtggccctatcaaatgttatccacaaagtgtgcttagaaataactgaagatggtggggattccatagaggtgccaggagcacggatcctgcagcacaaggatgaattgaatgctgaccatccctttatttacatcatcaggcacaacaaaactcgaaacattattttctttggcaaattctgttctccttaagtggcatagcccatgttaagtcctccctgacttttctgtggatgccgatttctgtaaactctgcatccagagattcattttctagatacaataaattgctaatgttgctggatcaggaagccgccagtacttgtcatatgtagccttcacacagatagaccttttttttttttccaattctatcttttgtttccttttttcccataagacaatgacatacgcttttaatgaaaaggaatcacgttagaggaaaaatatttattcattatttgtcaaattgtccggggtagttggcagaaatacagtcttccacaaagaaaattcctataaggaagatttggaagctcttcttcccagcactatgctttccttctttgggatagagaatgttccagacattctcgcttccctgaaagactgaagaaagtgtagtgcatgggacccacgaaactgccctggctccagtgaaacttgggcacatgctcaggctactataggtccagaagtccttatgttaagccctggcaggcaggtgtttattaaaattctgaattttggggattttcaaaagataatattttacatacactgtatgttatagaacttcatggatcagatctggggcagcaccctataaatcaacaccttaatatgctgcaacaaaatgtagaatattcagacaaaatggatacataaagactaagtagcccataaggggtcaaaatttgctgccaaatgcgtatgccaccaacttacaaaaacacttcgttcgcagagcttttcagattgtggaatgttggataaggaattatagacctctagtagctgaaatgcaagaccccaagaggaagttcagatcttaatataaattcactttcatttttgatagctgtcccatctggtcatttggttggcactagactggtggcaggggcttctagctgacttgcacagggattctcacaatagccgatatcagaatttgtgttgaaggaacttgtctcttcatctaatatgatagcgggaaaaggagaggaaactactgcctttagaaaatataagtaaagtgattaaagtgctcacgttaccttgacacatagtttttcagtctatgggtttagttactttagatggcaagcatgtaacttatattaatagtaatttgtaaagttggttggataagctatccgtgttgcaggttcatggattacttctctataaaaaatatgtatttaccaaaaattttgtgacattccttctcccatctcttccttgacctgcattgtaaataggttcttcttgttctgagattcaatattgaatttttcctatgctattgacaataaaatattattgaactaca

SEQ ID NO: 180544 - DNA, 560 bp, Homo sapiens
  Payload ID: 15559
  Gene Symbol: SERPINB5
  Gene Name: serpin peptidase inhibitor, clade B (ovalbumin), member 5
  ENST ID: ENST00000424602
  CDS Start-End: 174-560
atggtgaacaaaatggacttaggtccattttggggctgttttcaaagacgggctgttgggttgagtactgtcgcctctcatcccccatgttggcagtatttccagctcccaaccctttgagcaccaggaacactgcagagggagtaaaatcacttaaccatacaaggcccgcaatggatgccctgcaactagcaaattcggcttttgccgttgatctgttcaaacaactatgtgaaaaggagccactgggcaatgtcctcttctctccaatctgtctctccacctctctgtcacttgctcaagtgggtgctaaaggtgacactgcaaatgaaattggacaggttcttcattttgaaaatgtcaaagatgtaccctttggatttcaaacagtaacatcggatgtaaacaaacttagttccttttactcactgaaactaatcaagcggctctacgtagacaaatctctgaatctttctacagagttcatcagctctacgaagagaccgtatgcaaaggaattggaaactgttgacttcaaagataaattggaagaaacgaaa

SEQ ID NO: 180545 - DNA, 1268 bp, Homo sapiens
  Payload ID: 15559
  Gene Symbol: SERPINB5
  Gene Name: serpin peptidase inhibitor, clade B (ovalbumin), member 5
  Uniprot ID: P36952
  ENST ID: ENST00000489441
  CDS Start-End: 96-791
agacacggtcgcctccacatccaggtctttgtgctcctcgcttgcctgttccttttccacgcattttccaggataactgtgactccaggcccgcaatggatgccctgcaactagcaaattcggcttttgccgttgatctgttcaaacaactatgtgaaaaggagccactgggcaatgtcctcttctctccaatctgtctctccacctctctgtcacttgctcaagtgggtgctaaaggtgacactgcaaatgaaattggacaggttcttcattttgaaaatgtcaaagatgtaccctttggatttcaaacagtaacatcggatgtaaacaaacttagttccttttactcactgaaactaatcaagcggctctacgtagacaaatctctgaatctttctacagagttcatcagctctacgaagagaccgtatgcaaaggaattggaaactgttgacttcaaagataaattggaagaaacgaaaggtcagatcaacaactcaattaaggatctcacagatggccactttgagaacattttagctgacaacagtgtgaacgaccagaccaaaatccttgtggttaatgctgcctactttgttggcaagtggatgaagaaattttctgaatcagaaacaaaagaatgtcctttcagagtcaacaaggtatgtggggcagcatgtagcagtaaaaggagcccaattatagatgtgaaaaatgatagggacagagtggggcataaatccattccaatgaggaacctgagggcacggccggcaaagtgcctttcctgagatgaacagctggaaggtaagtggtacaaaaagagccagaatccagaggccccccctcctcttttccataatgtcttcaaggatctgagctgagtgaaactttatagaatttgtaacccagcgaggaaagctaagtcaccagctgaaaaatagctacaaacatctgagaactttagcagaaaaggaaaagaccaaactctgttatcagaggactttggattatcatgaaaccttgacatctaggaatcttgttcctgattgattaacttctctaacatctcatttccttatcggttgatagcgaagtatattgttctgggattttaatttataatttataagatgctttgatggctgggcgtggtggctcatgcctgtaatcccatgactttgggaagccgaggagggcagatcacctgaggtcaggagttggagaccagcctggccaacatggtgaaaccctgtctctactaaaaa

SEQ ID NO: 180546 - DNA, 1604 bp, Homo sapiens
  Payload ID: 15560
  Gene Symbol: SERPINB6
  Gene Name: serpin peptidase inhibitor, clade B (ovalbumin), member 6
  Uniprot ID: P35237
  ENST ID: ENST00000335686
  CDS Start-End: 335-1465
gcactccccagtggatggccgtgtatcaggagccggcccttttctggaaacaggccagcattcagtctccacagaggcaccataaacacgctggtggggccctgtactgtggtcaaagtcaaggcctccgggcaggactcgcggcccctccggctggcgggtggggttgacccgcacgtcccgccccgcctctcccttcgcgctccggacgggcgacggtagctcgagacccgggactccgcccgcctccccgcgagtatttgaggtccggggcggctccggcgcctctgcccgccgttctgctcgctcgctccccgctctggagtctgccatcatggatgttctcgcagaagcaaatggcacctttgccttaaaccttttgaaaacgctgggtaaagacaactcgaagaatgtgtttttctcacccatgagcatgtcctgtgccctggccatggtctacatgggggcaaagggaaacaccgctgcacagatggcccagatactttctttcaataaaagtggcggtggtggagacatccaccagggcttccagtctcttctcaccgaagtgaacaagactggcacgcagtacttgcttaggatggccaacaggctctttggggaaaagtcttgtgatttcctctcatcttttagagattcctgccaaaaattctaccaagcagagatggaggagcttgactttatcagcgccgtagagaagtccagaaaacacataaacacctgggtagctgaaaagacagaaggtaaaattgcggagttgctctctccgggctcagtggatccattgacaaggctggttctggtgaatgctgtctatttcagaggaaactgggatgaacagtttgacaaggagaacaccgaggagagactgtttaaagtcagcaagaatgaggagaaacctgtgcaaatgatgtttaagcaatctacttttaagaagacctatataggagaaatatttacccaaatcttggtgcttccatatgttggcaaggaactgaatatgatcatcatgcttccggacgagaccactgacttgagaacggtggagaaagaactcacttacgagaagttcgtagaatggacgaggctggacatgatggatgaagaggaggtggaagtgtccctcccgcggtttaaactagaggaaagctacgacatggagagtgtcctgcgcaacctgggcatgactgatgccttcgagctgggcaaggcagacttctctggaatgtcccagacagacctgtctctgtccaaggtcgtgcacaagtcttttgtggaggtcaatgaggaaggcacggaggctgcagccgccacagctgccatcatgatgatgcggtgtgccagattcgtcccccgcttctgcgccgaccaccccttccttttcttcatccagcacagcaagaccaacgggattctcttctgcggccgcttttcctctccgtgaggacagggcagtcttggtgtgcagcccctctcctctctgtcccctgacactccacagtgtgcctgcaacccaagtggccttatccgtgcagtggtggcagttcagaaataaagggcccatttgtgggatgccgcattca

SEQ ID NO: 180547 - DNA, 3265 bp, Homo sapiens
  Payload ID: 15560
  Gene Symbol: SERPINB6
  Gene Name: serpin peptidase inhibitor, clade B (ovalbumin), member 6
  Uniprot ID: P35237
  ENST ID: ENST00000380520
  CDS Start-End: 1996-3126
tattagaaattagtaatcttaaaatatgtttggaaaggcttggcaagccaggagtgcccagtgccccaagtattctgtgtaatgaataaagaagagtttgaaaacaaaatatttaaacaagcacagcaaacaagctttatcaggtgtatgagttattgtcttggtttcccgtggctgctgtaacaaatgaccatggattcgtggctaaactgcacatgtttattttctcagagttctgaggttggaggttggaaatgggttccgcagggccaggctcctccagaggatcctccttgcctttccagctactgcagctgtggtccttgcgtttcttggcttgaggcccttcatcttcaaggccagtggagtggcattttgctttattctttgcattgctttttcccgtgagatctccccctccctccctcttagaaggatacctgtgattacatttagggtcaactggaacaatccaggataatctcccatctcaagagcctgaatctaatcgtgctgcacagtcccttttgccatgtaaggggcattcacaggtcccagggattatgacccaggtatctttggagcacttgctcagccaaccccagctccaaatgtaaaggcatgcacagtggagagccgcttaattcagcatctcctcacagggcctccagtaggcacctccttccctctcccatctgctccaggaaatgtctgctccagcttctccccttccttgttccgtgggttcccactcactgctcaagtgagtcactgggactgtcttagaatgctggcattctctgactgggacatattcatttggtaaacatctgagaactgtgtcagagcaggcaggccccgcatccctgcattcctgcatcccctccttcccagcctgactgcctgtggggcccttagctgccccttgtcctctcacctgattctgcagattcttcttcttgagcagcagctcagaaagcgcatccgccctgcgtttcaagcccagctacttcttagcttcacttccgtcaacttcaccttccctgtagtgcagtggggcattgatggtaggtctctctaagggcttggtggactttaacatgtgattctgtgattccgacttgcctgaagataccccagctcccccctcccgactatccagctgcattcctgctctggaccctgctggggctgccacacccactgcacggcagggctagagagatgtgcagcctgaccctacccctgagcctgtctgtgaaggtggagatgggcatgcacccacagcccatgaggcaaggtggtgtcctgagtgtgctgtgagttcaggcgcaggaaggcctggcttgttgcagcaggatgtccccaagcgtggtccaaaattggggctttgccacctgcagggatttcctagaaggagatccaagggtcaggaggcatttgaaaggctttcacgcatctttgtatgtggcttgattgatccttttttaaggctcttgctacccagaaatgggattctctctctcattataaaaacatttggccatcttttcttgtgtaactgtcagtgaatgtatcattttgaatatttttcaaattaaaacagtacatttaagcccgcaaaacacaccaaagaatacaaacatagaagcaaaagccagtgccccttctgtaattccaccccaaggaagagactccaggaaagggtgcctccttcccactttctccacgtgcgggcaggcgtgcagggaggagtcctcacaaaacagggcggcgtttcacatagaactctttcattttccacacttaacattagaaacacacaaaataatgtggagggtcctaaaaagaaacagccagagttctgtgtgtgtttctgcttgcccactgaaccacagcatcggcggtgactgtcggtaaggcgcgtgagatgcagtcgcgtggaagctgtgcttaagtgatactgattttaaatcttgttccaggtctgccatcatggatgttctcgcagaagcaaatggcacctttgccttaaaccttttgaaaacgctgggtaaagacaactcgaagaatgtgtttttctcacccatgagcatgtcctgtgccctggccatggtctacatgggggcaaagggaaacaccgctgcacagatggcccagatactttctttcaataaaagtggcggtggtggagacatccaccagggcttccagtctcttctcaccgaagtgaacaagactggcacgcagtacttgcttaggatggccaacaggctctttggggaaaagtcttgtgatttcctctcatcttttagagattcctgccaaaaattctaccaagcagagatggaggagcttgactttatcagcgccgtagagaagtccagaaaacacataaacacctgggtagctgaaaagacagaaggtaaaattgcggagttgctctctccgggctcagtggatccattgacaaggctggttctggtgaatgctgtctatttcagaggaaactgggatgaacagtttgacaaggagaacaccgaggagagactgtttaaagtcagcaagaatgaggagaaacctgtgcaaatgatgtttaagcaatctacttttaagaagacctatataggagaaatatttacccaaatcttggtgcttccatatgttggcaaggaactgaatatgatcatcatgcttccggacgagaccactgacttgagaacggtggagaaagaactcacttacgagaagttcgtagaatggacgaggctggacatgatggatgaagaggaggtggaagtgtccctcccgcggtttaaactagaggaaagctacgacatggagagtgtcctgcgcaacctgggcatgactgatgccttcgagctgggcaaggcagacttctctggaatgtcccagacagacctgtctctgtccaaggtcgtgcacaagtcttttgtggaggtcaatgaggaaggcacggaggctgcagccgccacagctgccatcatgatgatgcggtgtgccagattcgtcccccgcttctgcgccgaccaccccttccttttcttcatccagcacagcaagaccaacgggattctcttctgcggccgcttttcctctccgtgaggacagggcagtcttggtgtgcagcccctctcctctctgtcccctgacactccacagtgtgcctgcaacccaagtggccttatccgtgcagtggtggcagttcagaaataaagggcccatttgtgggatgccgcattca

SEQ ID NO: 180548 - DNA, 1495 bp, Homo sapiens
  Payload ID: 15560
  Gene Symbol: SERPINB6
  Gene Name: serpin peptidase inhibitor, clade B (ovalbumin), member 6
  Uniprot ID: P35237
  ENST ID: ENST00000380524
  CDS Start-End: 226-1356
gattctccgggatattaccggagacggagtgttttattattagcctttcttaggtggacatttccatttgaattaaaagtcctttaggctgggcgtggtgcatggctgtaatctcagcaccttgggaggctgaggcaggaagatcacttgaggccaggcgttggagagcagcctgggcaaggtggcaagaaccttgtctctacaaaaaaaaaagcgtctgccatcatggatgttctcgcagaagcaaatggcacctttgccttaaaccttttgaaaacgctgggtaaagacaactcgaagaatgtgtttttctcacccatgagcatgtcctgtgccctggccatggtctacatgggggcaaagggaaacaccgctgcacagatggcccagatactttctttcaataaaagtggcggtggtggagacatccaccagggcttccagtctcttctcaccgaagtgaacaagactggcacgcagtacttgcttaggatggccaacaggctctttggggaaaagtcttgtgatttcctctcatcttttagagattcctgccaaaaattctaccaagcagagatggaggagcttgactttatcagcgccgtagagaagtccagaaaacacataaacacctgggtagctgaaaagacagaaggtaaaattgcggagttgctctctccgggctcagtggatccattgacaaggctggttctggtgaatgctgtctatttcagaggaaactgggatgaacagtttgacaaggagaacaccgaggagagactgtttaaagtcagcaagaatgaggagaaacctgtgcaaatgatgtttaagcaatctacttttaagaagacctatataggagaaatatttacccaaatcttggtgcttccatatgttggcaaggaactgaatatgatcatcatgcttccggacgagaccactgacttgagaacggtggagaaagaactcacttacgagaagttcgtagaatggacgaggctggacatgatggatgaagaggaggtggaagtgtccctcccgcggtttaaactagaggaaagctacgacatggagagtgtcctgcgcaacctgggcatgactgatgccttcgagctgggcaaggcagacttctctggaatgtcccagacagacctgtctctgtccaaggtcgtgcacaagtcttttgtggaggtcaatgaggaaggcacggaggctgcagccgccacagctgccatcatgatgatgcggtgtgccagattcgtcccccgcttctgcgccgaccaccccttccttttcttcatccagcacagcaagaccaacgggattctcttctgcggccgcttttcctctccgtgaggacagggcagtcttggtgtgcagcccctctcctctctgtcccctgacactccacagtgtgcctgcaacccaagtggccttatccgtgcagtggtggcagttcagaaataaagggcccatttgtgggatgccgcattca

SEQ ID NO: 180549 - DNA, 1370 bp, Homo sapiens
  Payload ID: 15560
  Gene Symbol: SERPINB6
  Gene Name: serpin peptidase inhibitor, clade B (ovalbumin), member 6
  Uniprot ID: P35237
  ENST ID: ENST00000380529
  CDS Start-End: 101-1231
gacccgaggaccccgggcgcccaggcccagcgcccacggaagaggcggccggcgcgggatgggggcggcgcagagcctcccgggccacaggtctgccatcatggatgttctcgcagaagcaaatggcacctttgccttaaaccttttgaaaacgctgggtaaagacaactcgaagaatgtgtttttctcacccatgagcatgtcctgtgccctggccatggtctacatgggggcaaagggaaacaccgctgcacagatggcccagatactttctttcaataaaagtggcggtggtggagacatccaccagggcttccagtctcttctcaccgaagtgaacaagactggcacgcagtacttgcttaggatggccaacaggctctttggggaaaagtcttgtgatttcctctcatcttttagagattcctgccaaaaattctaccaagcagagatggaggagcttgactttatcagcgccgtagagaagtccagaaaacacataaacacctgggtagctgaaaagacagaaggtaaaattgcggagttgctctctccgggctcagtggatccattgacaaggctggttctggtgaatgctgtctatttcagaggaaactgggatgaacagtttgacaaggagaacaccgaggagagactgtttaaagtcagcaagaatgaggagaaacctgtgcaaatgatgtttaagcaatctacttttaagaagacctatataggagaaatatttacccaaatcttggtgcttccatatgttggcaaggaactgaatatgatcatcatgcttccggacgagaccactgacttgagaacggtggagaaagaactcacttacgagaagttcgtagaatggacgaggctggacatgatggatgaagaggaggtggaagtgtccctcccgcggtttaaactagaggaaagctacgacatggagagtgtcctgcgcaacctgggcatgactgatgccttcgagctgggcaaggcagacttctctggaatgtcccagacagacctgtctctgtccaaggtcgtgcacaagtcttttgtggaggtcaatgaggaaggcacggaggctgcagccgccacagctgccatcatgatgatgcggtgtgccagattcgtcccccgcttctgcgccgaccaccccttccttttcttcatccagcacagcaagaccaacgggattctcttctgcggccgcttttcctctccgtgaggacagggcagtcttggtgtgcagcccctctcctctctgtcccctgacactccacagtgtgcctgcaacccaagtggccttatccgtgcagtggtggcagttcagaaataaagggcccatttgtgggatgccgcattca

SEQ ID NO: 180550 - DNA, 1338 bp, Homo sapiens
  Payload ID: 15560
  Gene Symbol: SERPINB6
  Gene Name: serpin peptidase inhibitor, clade B (ovalbumin), member 6
  Uniprot ID: P35237
  ENST ID: ENST00000380539
  CDS Start-End: 69-1199
gtccggcttgggttcccttccggagcctcgcagcggcagagaacggcgacgcggccgggtctgccatcatggatgttctcgcagaagcaaatggcacctttgccttaaaccttttgaaaacgctgggtaaagacaactcgaagaatgtgtttttctcacccatgagcatgtcctgtgccctggccatggtctacatgggggcaaagggaaacaccgctgcacagatggcccagatactttctttcaataaaagtggcggtggtggagacatccaccagggcttccagtctcttctcaccgaagtgaacaagactggcacgcagtacttgcttaggatggccaacaggctctttggggaaaagtcttgtgatttcctctcatcttttagagattcctgccaaaaattctaccaagcagagatggaggagcttgactttatcagcgccgtagagaagtccagaaaacacataaacacctgggtagctgaaaagacagaaggtaaaattgcggagttgctctctccgggctcagtggatccattgacaaggctggttctggtgaatgctgtctatttcagaggaaactgggatgaacagtttgacaaggagaacaccgaggagagactgtttaaagtcagcaagaatgaggagaaacctgtgcaaatgatgtttaagcaatctacttttaagaagacctatataggagaaatatttacccaaatcttggtgcttccatatgttggcaaggaactgaatatgatcatcatgcttccggacgagaccactgacttgagaacggtggagaaagaactcacttacgagaagttcgtagaatggacgaggctggacatgatggatgaagaggaggtggaagtgtccctcccgcggtttaaactagaggaaagctacgacatggagagtgtcctgcgcaacctgggcatgactgatgccttcgagctgggcaaggcagacttctctggaatgtcccagacagacctgtctctgtccaaggtcgtgcacaagtcttttgtggaggtcaatgaggaaggcacggaggctgcagccgccacagctgccatcatgatgatgcggtgtgccagattcgtcccccgcttctgcgccgaccaccccttccttttcttcatccagcacagcaagaccaacgggattctcttctgcggccgcttttcctctccgtgaggacagggcagtcttggtgtgcagcccctctcctctctgtcccctgacactccacagtgtgcctgcaacccaagtggccttatccgtgcagtggtggcagttcagaaataaagggcccatttgtgggatgccgcattca

SEQ ID NO: 180551 - DNA, 1375 bp, Homo sapiens
  Payload ID: 15560
  Gene Symbol: SERPINB6
  Gene Name: serpin peptidase inhibitor, clade B (ovalbumin), member 6
  Uniprot ID: P35237
  ENST ID: ENST00000380546
  CDS Start-End: 106-1236
ggcggctccggcgcctctgcccgccgttctgctcgctcgctccccgctctggagtacgtgtctggcttgggagccgctcggacacgctggcttgggtctgccatcatggatgttctcgcagaagcaaatggcacctttgccttaaaccttttgaaaacgctgggtaaagacaactcgaagaatgtgtttttctcacccatgagcatgtcctgtgccctggccatggtctacatgggggcaaagggaaacaccgctgcacagatggcccagatactttctttcaataaaagtggcggtggtggagacatccaccagggcttccagtctcttctcaccgaagtgaacaagactggcacgcagtacttgcttaggatggccaacaggctctttggggaaaagtcttgtgatttcctctcatcttttagagattcctgccaaaaattctaccaagcagagatggaggagcttgactttatcagcgccgtagagaagtccagaaaacacataaacacctgggtagctgaaaagacagaaggtaaaattgcggagttgctctctccgggctcagtggatccattgacaaggctggttctggtgaatgctgtctatttcagaggaaactgggatgaacagtttgacaaggagaacaccgaggagagactgtttaaagtcagcaagaatgaggagaaacctgtgcaaatgatgtttaagcaatctacttttaagaagacctatataggagaaatatttacccaaatcttggtgcttccatatgttggcaaggaactgaatatgatcatcatgcttccggacgagaccactgacttgagaacggtggagaaagaactcacttacgagaagttcgtagaatggacgaggctggacatgatggatgaagaggaggtggaagtgtccctcccgcggtttaaactagaggaaagctacgacatggagagtgtcctgcgcaacctgggcatgactgatgccttcgagctgggcaaggcagacttctctggaatgtcccagacagacctgtctctgtccaaggtcgtgcacaagtcttttgtggaggtcaatgaggaaggcacggaggctgcagccgccacagctgccatcatgatgatgcggtgtgccagattcgtcccccgcttctgcgccgaccaccccttccttttcttcatccagcacagcaagaccaacgggattctcttctgcggccgcttttcctctccgtgaggacagggcagtcttggtgtgcagcccctctcctctctgtcccctgacactccacagtgtgcctgcaacccaagtggccttatccgtgcagtggtggcagttcagaaataaagggcccatttgtgggatgccgcattca

SEQ ID NO: 180552 - DNA, 2047 bp, Homo sapiens
  Payload ID: 15560
  Gene Symbol: SERPINB6
  Gene Name: serpin peptidase inhibitor, clade B (ovalbumin), member 6
  ENST ID: ENST00000616722
  CDS Start-End: 767-1909
actgcagcctctgcctcccgggttcaagtgattctcctgcctcagcttccccagcaactgagattacaggcacgcgccattacactcggctaatttttgtatttttagtagagacggggttttgccatgttggccaggctggtctggaactcctgacctccagtgatccgcctgcctcggcctcccagtgttgggattactggcgtgagccccgcgcccgcccctggctggcttctttgccgcaagctgtttcatcagcaaagtctttgtgacctgtatctagtctgctcatttttaaatgcgtgttctgcactccccagtggatggccgtgtatcaggagccggcccttttctggaaacaggccagcattcagtctccacagaggcaccataaacacgctggtggggccctgtactgtggtcaaagtcaaggcctccgggcaggactcgcggcccctccggctggcgggtggggttgacccgcacgtcccgccccgcctctcccttcgcgctccggacgggcgacggtagctcgagacccgggactccgcccgcctccccgcgagtatttgaggtccggggcggctccggcgcctctgcccgccgttctgctcgctcgctccccgctctggaaacaccaccgatagccacaccgaagagttctcccatttgctggttcccggacaaaaaagctgctgatcccttgagcacactgcagtgaagctcccagctgacatgtcctgtccatgtaaacagaacttcctccatgtctgccatcatggatgttctcgcagaagcaaatggcacctttgccttaaaccttttgaaaacgctgggtaaagacaactcgaagaatgtgtttttctcacccatgagcatgtcctgtgccctggccatggtctacatgggggcaaagggaaacaccgctgcacagatggcccagatactttctttcaataaaagtggcggtggtggagacatccaccagggcttccagtctcttctcaccgaagtgaacaagactggcacgcagtacttgcttaggatggccaacaggctctttggggaaaagtcttgtgatttcctctcatcttttagagattcctgccaaaaattctaccaagcagagatggaggagcttgactttatcagcgccgtagagaagtccagaaaacacataaacacctgggtagctgaaaagacagaaggtaaaattgcggagttgctctctccgggctcagtggatccattgacaaggctggttctggtgaatgctgtctatttcagaggaaactgggatgaacagtttgacaaggagaacaccgaggagagactgtttaaagtcagcaagaatgaggagaaacctgtgcaaatgatgtttaagcaatctacttttaagaagacctatataggagaaatatttacccaaatcttggtgcttccatatgttggcaaggaactgaatatgatcatcatgcttccggacgagaccactgacttgagaacggtggagaaagaactcacttacgagaagttcgtagaatggacgaggctggacatgatggatgaagaggaggtggaagtgtccctcccgcggtttaaactagaggaaagctacgacatggagagtgtcctgcgcaacctgggcatgactgatgccttcgagctgggcaaggcagacttctctggaatgtcccagacagacctgtctctgtccaaggtcgtgcacaagtcttttgtggaggtcaatgaggaaggcacggaggctgcagccgccacagctgccatcatgatgatgcggtgtgccagattcgtcccccgcttctgcgccgaccaccccttccttttcttcatccagcacagcaagaccaacgggattctcttctgcggccgcttttcctctccgtgaggacagggcagtcttggtgtgcagcccctctcctctctgtcccctgacactccacagtgtgcctgcaacccaagtggccttatccgtgcagtggtggcagttcagaaataaagggcccatttgtgggatgccgcattc

SEQ ID NO: 180553 - DNA, 1570 bp, Homo sapiens
  Payload ID: 15560
  Gene Symbol: SERPINB6
  Gene Name: serpin peptidase inhibitor, clade B (ovalbumin), member 6
  ENST ID: ENST00000612421
  CDS Start-End: 245-1432
agtcttggggcgccgggtgttaggagccgggcgggaggcggagagaggccgaggggttcggcgccaaacggtgccatccgggccccctgcgtgtgttcactggactggccgtgctgggcttggccaatccgcagcactttcaggtcgcccagacctgtggagacgatcgtgtggaccagcccggatctccttaccgctctgtgtttgaattaaactccctacaggcaaactattacaggctttgatgtcttcaaggcaaagaggaaactttaactacaaattggcatttaagtctgccatcatggatgttctcgcagaagcaaatggcacctttgccttaaaccttttgaaaacgctgggtaaagacaactcgaagaatgtgtttttctcacccatgagcatgtcctgtgccctggccatggtctacatgggggcaaagggaaacaccgctgcacagatggcccagatactttctttcaataaaagtggcggtggtggagacatccaccagggcttccagtctcttctcaccgaagtgaacaagactggcacgcagtacttgcttaggatggccaacaggctctttggggaaaagtcttgtgatttcctctcatcttttagagattcctgccaaaaattctaccaagcagagatggaggagcttgactttatcagcgccgtagagaagtccagaaaacacataaacacctgggtagctgaaaagacagaaggtaaaattgcggagttgctctctccgggctcagtggatccattgacaaggctggttctggtgaatgctgtctatttcagaggaaactgggatgaacagtttgacaaggagaacaccgaggagagactgtttaaagtcagcaagaatgaggagaaacctgtgcaaatgatgtttaagcaatctacttttaagaagacctatataggagaaatatttacccaaatcttggtgcttccatatgttggcaaggaactgaatatgatcatcatgcttccggacgagaccactgacttgagaacggtggagaaagaactcacttacgagaagttcgtagaatggacgaggctggacatgatggatgaagaggaggtggaagtgtccctcccgcggtttaaactagaggaaagctacgacatggagagtgtcctgcgcaacctgggcatgactgatgccttcgagctgggcaaggcagacttctctggaatgtcccagacagacctgtctctgtccaaggtcgtgcacaagtcttttgtggaggtcaatgaggaaggcacggaggctgcagccgccacagctgccatcatgatgatgcggtgtgccagattcgtcccccgcttctgcgccgaccaccccttccttttcttcatccagcacagcaagaccaacgggattctcttctgcggccgcttttcctctccgtgaggacagggcagtcttggtgtgcagcccctctcctctctgtcccctgacactccacagtgtgcctgcaacccaagtggccttatccgtgcagtggtggcagttcagaaataaagggcccatttgtgggatgccgcattc

SEQ ID NO: 180554 - DNA, 1976 bp, Homo sapiens
  Payload ID: 15561
  Gene Symbol: SERPINB7
  Gene Name: serpin peptidase inhibitor, clade B (ovalbumin), member 7
  Uniprot ID: O75635
  ENST ID: ENST00000336429
  CDS Start-End: 93-1235
gagaagtcttaggaggtaggaggcaggaggaactgaagcccagctgtgaaggccgcagactgcagtgagaggaggctgcactccattttgcaatggcctcccttgctgcagcaaatgcagagttttgcttcaacctgttcagagagatggatgacaatcaaggaaatggaaatgtgttcttttcctctctgagcctcttcgctgccctggccctggtccgcttgggcgctcaagatgactccctctctcagattgataagttgcttcatgttaacactgcctcaggatatggaaactcttctaatagtcagtcagggctccagtctcaactgaaaagagttttttctgatataaatgcatcccacaaggattatgatctcagcattgtgaatgggctttttgctgaaaaagtgtatggctttcataaggactacattgagtgtgccgaaaaattatacgatgccaaagtggagcgagttgactttacgaatcatttagaagacactagacgtaatattaataagtgggttgaaaatgaaacacatggcaaaatcaagaacgtgattggtgaaggtggcataagctcatctgctgtaatggtgctggtgaatgctgtgtacttcaaaggcaagtggcaatcagccttcaccaagagcgaaaccataaattgccatttcaaatctcccaagtgctctgggaaggcagtcgccatgatgcatcaggaacggaagttcaatttgtctgttattgaggacccatcaatgaagattcttgagctcagatacaatggtggcataaacatgtacgttctgctgcctgagaatgacctctctgaaattgaaaacaaactgacctttcagaatctaatggaatggaccaatccaaggcgaatgacctctaagtatgttgaggtattttttcctcagttcaagatagagaagaattatgaaatgaaacaatatttgagagccctagggctgaaagatatctttgatgaatccaaagcagatctctctgggattgcttcggggggtcgtctgtatatatcaaggatgatgcacaaatcttacatagaggtcactgaggagggcaccgaggctactgctgccacaggaagtaatattgtagaaaagcaactccctcagtccacgctgtttagagctgaccacccattcctatttgttatcaggaaggatgacatcatcttattcagtggcaaagtttcttgcccttgaaaatccaattggtttctgttatagcagtccccacaacatcaaagaaccaccacaagtcaatagatttgagtttaattggaaaaatgtggtgtttcctttgagtttatttcttcctaacattggtcagcagatgacactggtgacttgacccttcctagacacctggttgattgtcctgatccctgctcttagcattctaccaccatgtgtctcacccatttctaatttcattgtctttcttcccacgctcatttctatcattctcccccatgacccgtctggaaattatggagagtgctcaactggtaaggagaacgtagaagtagccctagggatcctttttgaaactctacagttatcgcagatattctagcttcattgtaagcaatctaggaaataagccctgctgctttctagaaataagtgtgaaggataaattttctttgttgacctatgaagattttagagtttaccttcatatgtttgattttaaatcagtgtataatctagatggtaaaaaatgtgaaattgggattagggaccaaccaaaatatttcattaatgctttcaattgacaaattttggtctttctttgataagacaatatgtacatagttttttcaaatattaaagatcttttaactgttggcagttgttatctacagaatcatatctcatatgctgtgtagtttataagttttttctctatttatcagaataaagaaatacaacatacctgta

SEQ ID NO: 180555 - DNA, 2203 bp, Homo sapiens
  Payload ID: 15561
  Gene Symbol: SERPINB7
  Gene Name: serpin peptidase inhibitor, clade B (ovalbumin), member 7
  Uniprot ID: O75635
  ENST ID: ENST00000398019
  CDS Start-End: 326-1468
gtctactcatcaataagcagctgcctgtgcagagtgcaggctgcacctttggacagcctttaaaactgaattctcagaattttagaacaaatttttgtctagaaatgctgactttggttcattaggtagtggtaaaacaggctcccttcgaagctctccttcatcaccttcctaagtgcatgggggaaaatacctagggctcaacagtcttgagaagtgtggaaacattttctttgtgagtgagaacagatcacctagagaaaggagaccagattcccatcactgcttctgggtatcagatgctagcgctgcactccattttgcaatggcctcccttgctgcagcaaatgcagagttttgcttcaacctgttcagagagatggatgacaatcaaggaaatggaaatgtgttcttttcctctctgagcctcttcgctgccctggccctggtccgcttgggcgctcaagatgactccctctctcagattgataagttgcttcatgttaacactgcctcaggatatggaaactcttctaatagtcagtcagggctccagtctcaactgaaaagagttttttctgatataaatgcatcccacaaggattatgatctcagcattgtgaatgggctttttgctgaaaaagtgtatggctttcataaggactacattgagtgtgccgaaaaattatacgatgccaaagtggagcgagttgactttacgaatcatttagaagacactagacgtaatattaataagtgggttgaaaatgaaacacatggcaaaatcaagaacgtgattggtgaaggtggcataagctcatctgctgtaatggtgctggtgaatgctgtgtacttcaaaggcaagtggcaatcagccttcaccaagagcgaaaccataaattgccatttcaaatctcccaagtgctctgggaaggcagtcgccatgatgcatcaggaacggaagttcaatttgtctgttattgaggacccatcaatgaagattcttgagctcagatacaatggtggcataaacatgtacgttctgctgcctgagaatgacctctctgaaattgaaaacaaactgacctttcagaatctaatggaatggaccaatccaaggcgaatgacctctaagtatgttgaggtattttttcctcagttcaagatagagaagaattatgaaatgaaacaatatttgagagccctagggctgaaagatatctttgatgaatccaaagcagatctctctgggattgcttcggggggtcgtctgtatatatcaaggatgatgcacaaatcttacatagaggtcactgaggagggcaccgaggctactgctgccacaggaagtaatattgtagaaaagcaactccctcagtccacgctgtttagagctgaccacccattcctatttgttatcaggaaggatgacatcatcttattcagtggcaaagtttcttgcccttgaaaatccaattggtttctgttatagcagtccccacaacatcaaagaaccaccacaagtcaatagatttgagtttaattggaaaaatgtggtgtttcctttgagtttatttcttcctaacattggtcagcagatgacactggtgacttgacccttcctagacacctggttgattgtcctgatccctgctcttagcattctaccaccatgtgtctcacccatttctaatttcattgtctttcttcccacgctcatttctatcattctcccccatgacccgtctggaaattatggagagtgctcaactggtaaggagaacgtagaagtagccctagggatcctttttgaaactctacagttatcgcagatattctagcttcattgtaagcaatctaggaaataagccctgctgctttctagaaataagtgtgaaggataaattttctttgttgacctatgaagattttagagtttaccttcatatgtttgattttaaatcagtgtataatctagatggtaaaaaatgtgaaattgggattagggaccaaccaaaatatttcattaatgctttcaattgacaaattttggtctttctttgataagacaatatgtacatagttttttcaaatattaaagatcttttaactgttggcagttgttatctacagaatcatatctcatatgctgtgtagtttataagttttttctctatttatcagaataaagaaatacaacata

SEQ ID NO: 180556 - DNA, 560 bp, Homo sapiens
  Payload ID: 15561
  Gene Symbol: SERPINB7
  Gene Name: serpin peptidase inhibitor, clade B (ovalbumin), member 7
  ENST ID: ENST00000431370
  CDS Start-End: 177-560
attaaactcatcacacaacatccagatcggataatggtcctcttgtctgcttctccaccttacagcttgtctatgactgatttaagtggtgtcatgggagaatggcatgggaatcggatgccagctgaaaaatttgtgttccatctttgaagagataagctgcactccattttgcaatggcctcccttgctgcagcaaatgcagagttttgcttcaacctgttcagagagatggatgacaatcaaggaaatggaaatgtgttcttttcctctctgagcctcttcgctgccctggccctggtccgcttgggcgctcaagatgactccctctctcagattgataagttgcttcatgttaacactgcctcaggatatggaaactcttctaatagtcagtcagggctccagtctcaactgaaaagagttttttctgatataaatgcatcccacaaggattatgatctcagcattgtgaatgggctttttgctgaaaaagtgtatggctttcataaggactacattgagtgtgccgaaaaattatacgatgccaaagtggagcga

SEQ ID NO: 180557 - DNA, 587 bp, Homo sapiens
  Payload ID: 15561
  Gene Symbol: SERPINB7
  Gene Name: serpin peptidase inhibitor, clade B (ovalbumin), member 7
  ENST ID: ENST00000425392
  CDS Start-End: 205-587
tcagtgctgtcaccagtgctgctgctgtcatcaacctctcccttgggagttgagccaaagggaagtcttgggaattttccctgaaccttggtataggtgtgctgggaggagtgagaagtcttaggaggtaggaggcaggaggaactgaagcccagctgtgaaggccgcagactgcagtgagaggaggctgcactccattttgcaatggcctcccttgctgcagcaaatgcagagttttgcttcaacctgttcagagagatggatgacaatcaaggaaatggaaatgtgttcttttcctctctgagcctcttcgctgccctggccctggtccgcttgggcgctcaagatgactccctctctcagattgataagttgcttcatgttaacactgcctcaggatatggaaactcttctaatagtcagtcagggctccagtctcaactgaaaagagttttttctgatataaatgcatcccacaaggattatgatctcagcattgtgaatgggctttttgctgaaaaagtgtatggctttcataaggactacattgagtgtgccgaaaaattatacgatgccaaagtggagcg

SEQ ID NO: 180558 - DNA, 561 bp, Homo sapiens
  Payload ID: 15561
  Gene Symbol: SERPINB7
  Gene Name: serpin peptidase inhibitor, clade B (ovalbumin), member 7
  ENST ID: ENST00000447428
  CDS Start-End: 68-561
tttcagactcacccaaccagcggccaacttcctctatgaagacagtaaggctgcactccattttgcaatggcctcccttgctgcagcaaatgcagagttttgcttcaacctgttcagagagatggatgacaatcaaggaaatggaaatgtgttcttttcctctctgagcctcttcgctgccctggccctggtccgcttgggcgctcaagatgactccctctctcagattgataagttgcttcatgttaacactgcctcaggatatggaaactcttctaatagtcagtcagggctccagtctcaactgaaaagagttttttctgatataaatgcatcccacaaggattatgatctcagcattgtgaatgggctttttgctgaaaaagtgtatggctttcataaggactacattgagtgtgccgaaaaattatacgatgccaaagtggagcgagttgactttacgaatcatttagaagacactagacgtaatattaataagtgggttgaaaatgaaacacatggcaaaatcaagaacgtgattggtgaaggtggcataagctc

SEQ ID NO: 180559 - DNA, 2193 bp, Homo sapiens
  Payload ID: 15561
  Gene Symbol: SERPINB7
  Gene Name: serpin peptidase inhibitor, clade B (ovalbumin), member 7
  Uniprot ID: O75635
  ENST ID: ENST00000540675
  CDS Start-End: 361-1452
gctctgagtcatagggaagccatcccagaagccaggtctactcatcaataagcagctgcctgtgcagagtgcaggctgcacctttggacagcctttaaaactgaattctcagaattttagaacaaatttttgtctagaaatgctgactttggttcattaggtagtggtaaaacaggctcccttcgaagctctccttcatcaccttcctaagtgcatgggggaaaatacctagggctcaacagtcttgagaagtgtggaaacattttctttgtgagtgagaacagatcacctagagaaaggagaccagattcccatcactgcttctgggtatcagatgctagcgctgcactccattttgcaatggcctcccttgctgcagcaaatgcagagttttgcttcaacctgttcagagagatggatgacaatcaaggaaatggaaatgtgttcttttcctctctgagcctcttcgctgccctggccctggtccgcttgggcgctcaagatgactccctctctcagattgataagtcagggctccagtctcaactgaaaagagttttttctgatataaatgcatcccacaaggattatgatctcagcattgtgaatgggctttttgctgaaaaagtgtatggctttcataaggactacattgagtgtgccgaaaaattatacgatgccaaagtggagcgagttgactttacgaatcatttagaagacactagacgtaatattaataagtgggttgaaaatgaaacacatggcaaaatcaagaacgtgattggtgaaggtggcataagctcatctgctgtaatggtgctggtgaatgctgtgtacttcaaaggcaagtggcaatcagccttcaccaagagcgaaaccataaattgccatttcaaatctcccaagtgctctgggaaggcagtcgccatgatgcatcaggaacggaagttcaatttgtctgttattgaggacccatcaatgaagattcttgagctcagatacaatggtggcataaacatgtacgttctgctgcctgagaatgacctctctgaaattgaaaacaaactgacctttcagaatctaatggaatggaccaatccaaggcgaatgacctctaagtatgttgaggtattttttcctcagttcaagatagagaagaattatgaaatgaaacaatatttgagagccctagggctgaaagatatctttgatgaatccaaagcagatctctctgggattgcttcggggggtcgtctgtatatatcaaggatgatgcacaaatcttacatagaggtcactgaggagggcaccgaggctactgctgccacaggaagtaatattgtagaaaagcaactccctcagtccacgctgtttagagctgaccacccattcctatttgttatcaggaaggatgacatcatcttattcagtggcaaagtttcttgcccttgaaaatccaattggtttctgttatagcagtccccacaacatcaaagaaccaccacaagtcaatagatttgagtttaattggaaaaatgtggtgtttcctttgagtttatttcttcctaacattggtcagcagatgacactggtgacttgacccttcctagacacctggttgattgtcctgatccctgctcttagcattctaccaccatgtgtctcacccatttctaatttcattgtctttcttcccacgctcatttctatcattctcccccatgacccgtctggaaattatggagagtgctcaactggtaaggagaacgtagaagtagccctagggatcctttttgaaactctacagttatcgcagatattctagcttcattgtaagcaatctaggaaataagccctgctgctttctagaaataagtgtgaaggataaattttctttgttgacctatgaagattttagagtttaccttcatatgtttgattttaaatcagtgtataatctagatggtaaaaaatgtgaaattgggattagggaccaaccaaaatatttcattaatgctttcaattgacaaattttggtctttctttgataagacaatatgtacatagttttttcaaatattaaagatcttttaactgttggcagttgttatctacagaatcatatctcatatgctgtgtagtttataagttttttctctatttatcagaataaagaaatacaacatacctgta

SEQ ID NO: 180560 - DNA, 1951 bp, Homo sapiens
  Payload ID: 15561
  Gene Symbol: SERPINB7
  Gene Name: serpin peptidase inhibitor, clade B (ovalbumin), member 7
  Uniprot ID: O75635
  ENST ID: ENST00000546027
  CDS Start-End: 68-1210
tttcagactcacccaaccagcggccaacttcctctatgaagacagtaaggctgcactccattttgcaatggcctcccttgctgcagcaaatgcagagttttgcttcaacctgttcagagagatggatgacaatcaaggaaatggaaatgtgttcttttcctctctgagcctcttcgctgccctggccctggtccgcttgggcgctcaagatgactccctctctcagattgataagttgcttcatgttaacactgcctcaggatatggaaactcttctaatagtcagtcagggctccagtctcaactgaaaagagttttttctgatataaatgcatcccacaaggattatgatctcagcattgtgaatgggctttttgctgaaaaagtgtatggctttcataaggactacattgagtgtgccgaaaaattatacgatgccaaagtggagcgagttgactttacgaatcatttagaagacactagacgtaatattaataagtgggttgaaaatgaaacacatggcaaaatcaagaacgtgattggtgaaggtggcataagctcatctgctgtaatggtgctggtgaatgctgtgtacttcaaaggcaagtggcaatcagccttcaccaagagcgaaaccataaattgccatttcaaatctcccaagtgctctgggaaggcagtcgccatgatgcatcaggaacggaagttcaatttgtctgttattgaggacccatcaatgaagattcttgagctcagatacaatggtggcataaacatgtacgttctgctgcctgagaatgacctctctgaaattgaaaacaaactgacctttcagaatctaatggaatggaccaatccaaggcgaatgacctctaagtatgttgaggtattttttcctcagttcaagatagagaagaattatgaaatgaaacaatatttgagagccctagggctgaaagatatctttgatgaatccaaagcagatctctctgggattgcttcggggggtcgtctgtatatatcaaggatgatgcacaaatcttacatagaggtcactgaggagggcaccgaggctactgctgccacaggaagtaatattgtagaaaagcaactccctcagtccacgctgtttagagctgaccacccattcctatttgttatcaggaaggatgacatcatcttattcagtggcaaagtttcttgcccttgaaaatccaattggtttctgttatagcagtccccacaacatcaaagaaccaccacaagtcaatagatttgagtttaattggaaaaatgtggtgtttcctttgagtttatttcttcctaacattggtcagcagatgacactggtgacttgacccttcctagacacctggttgattgtcctgatccctgctcttagcattctaccaccatgtgtctcacccatttctaatttcattgtctttcttcccacgctcatttctatcattctcccccatgacccgtctggaaattatggagagtgctcaactggtaaggagaacgtagaagtagccctagggatcctttttgaaactctacagttatcgcagatattctagcttcattgtaagcaatctaggaaataagccctgctgctttctagaaataagtgtgaaggataaattttctttgttgacctatgaagattttagagtttaccttcatatgtttgattttaaatcagtgtataatctagatggtaaaaaatgtgaaattgggattagggaccaaccaaaatatttcattaatgctttcaattgacaaattttggtctttctttgataagacaatatgtacatagttttttcaaatattaaagatcttttaactgttggcagttgttatctacagaatcatatctcatatgctgtgtagtttataagttttttctctatttatcagaataaagaaatacaacatacctgta

SEQ ID NO: 180561 - DNA, 979 bp, Homo sapiens
  Payload ID: 15562
  Gene Symbol: SERPINB8
  Gene Name: serpin peptidase inhibitor, clade B (ovalbumin), member 8
  ENST ID: ENST00000295211
  CDS Start-End: 1-569
gtttatacaaagacggagatattcaccgaggtttccagtcacttctcagtgaagttaacagaactggcactcagtacttgcttagaactgccaacagactctttggagaaaagacgtgtgatttccttccagactttaaagaatactgtcagaagttctatcaggcagagctggaggagttgtcctttgctgaagacactgaagagtgcaggaagcatataaatgactgggtggcagagaagactgaaggtaagatttcagaggtactggatgctgggacagtcgatcccctgacaaagctggtccttgtgaatgccatttatttcaagggaaagtggaatgagcaatttgacagaaagtacacaaggggaatgctctttaaaaccaacgaggaaaaaaagacagtgcagatgatgtttaaggaagctaagtttaaaatggggtatgcggatgaggtacacacccaggtcctggagctgccctatgtggaagaggagctgagcatggtcattctgcttcccgatgacaacacggacctcgccgtgattaaagctggaggagagttatgacttggagcctttccttcgaagattaggaatgatcgatgcttttgacgaagccaaggcagacttttctggaatgtcaactgagaagaatgtgcctctgtccaaggttgcccacaagtgcttcgtggaggtcaatgaggaaggcacagaggctgccgcagccactgctgtggtcaggaattcccggtgcagcagaatggagccaagattctgtgcagaccacccttttcttttcttcatcaggcaccacaaaaccaactgcatcttgttctgtggcaggttctcttctccgtaaagaggagcaattgctgtacataccctcctttccttctacctatcttgccttaattaacattccctgtgacctagttggtgcagtggcttgaatgccaaaataaagcgtgtgcactgga

SEQ ID NO: 180562 - DNA, 3387 bp, Homo sapiens
  Payload ID: 15562
  Gene Symbol: SERPINB8
  Gene Name: serpin peptidase inhibitor, clade B (ovalbumin), member 8
  Uniprot ID: P50452
  ENST ID: ENST00000353706
  CDS Start-End: 170-1294
caagccagagcaatcgaacggttctgagtcatctgccggaagccttgccctcaatcaaggcggacgtgaagcatctacaaaggaggaatagtcaaagcagcagcggcggcggcggcggcggcagcagcagcagcagcaggaggtgggggcctctgccagaccttctctgatggatgacctctgtgaagcaaatggcacttttgccatcagcttatttaaaatattgggggaagaggacaactcaagaaacgtattcttctctcccatgagcatctcctctgccctggccatggtcttcatgggggcaaagggaagcactgcagcccagatgtcccaggcactttgtttatacaaagacggagatattcaccgaggtttccagtcacttctcagtgaagttaacagaactggcactcagtacttgcttagaactgccaacagactctttggagaaaagacgtgtgatttccttccagactttaaagaatactgtcagaagttctatcaggcagagctggaggagttgtcctttgctgaagacactgaagagtgcaggaagcatataaatgactgggtggcagagaagactgaaggtaagatttcagaggtactggatgctgggacagtcgatcccctgacaaagctggtccttgtgaatgccatttatttcaagggaaagtggaatgagcaatttgacagaaagtacacaaggggaatgctctttaaaaccaacgaggaaaaaaagacagtgcagatgatgtttaaggaagctaagtttaaaatggggtatgcggatgaggtacacacccaggtcctggagctgccctatgtggaagaggagctgagcatggtcattctgcttcccgatgacaacacggacctcgccgtggtggaaaaagcacttacatatgagaaattcaaagcctggacaaattcagaaaagttgacaaaaagtaaggttcaagttttccttcccagattaaagctggaggagagttatgacttggagcctttccttcgaagattaggaatgatcgatgcttttgacgaagccaaggcagacttttctggaatgtcaactgagaagaatgtgcctctgtccaaggttgcccacaagtgcttcgtggaggtcaatgaggaaggcacagaggctgccgcagccactgctgtggtcaggaattcccggtgcagcagaatggagccaagattctgtgcagaccacccttttcttttcttcatcaggcaccacaaaaccaactgcatcttgttctgtggcaggttctcttctccgtaaagaggagcaattgctgtacataccctcctttccttctacctatcttgccttaattaacattccctgtgacctagttggtgcagtggcttgaatgccaaaataaagcgtgtgcactggatagtgtgtgaaagtctttgctgaaagttccagagccattgagaataactgaggccgcagatgcatgaaatttgggcctgggaaggctatgctggttttggagtgtttggggtgcctgccattgcctctgccttcacctaagtctgtgcccattgtttcaggggatcttatggagcatctcagggcttcaggagccagccctcttccatccgcccggctctgcccaccaccactgccaggctgaacaggggactagtgcccaggtgacactgcacacaaagccaagggcaaaccctatagagtaaagctgcagccaccctgtgtctcatgtgcagctgaaatagtgatctgcttctgtcactgtcacatagacagccctgcatgccccctgtctcacacagtttgtaatgaagacagctccttctcatctttccataagcctgagatacaagttcagggactcagcaatgcactttaggactgagctaggaggcaaatatctgaagcttgctatgctgttctttccattccttttccctctgaaacacacaaaataccaaaggaacttacgcaacacaccactgagtcctctaactaatcatatgtgctcagacacagctcaagcacaccccttagttaagaaagaacctccatatacattaatttttttctgcctaaaaataaaattgcgttgtggcagcaatttggaaactacagcaaagtctccaaaaaaattgaagtcacccacaattccaacacacagcaatcactgctgttaatagtgatatacatccttccctattatgtgtatgcaaatagaaatttataagcattttactacaagttaatcatatccttcagtagcttatttcttcccttatgaaaaacctcccttaagatctttccaggtcatcaatttgatgtgcatagtattccactgtgtggctggatttctataattgaatctaattttagacagtttgagtaattaaaattatttctattaacaaataatagattgctaataatatatattatgctgttttggatatactaaatatttgctcacatccttaatatattttttaaaattcctaacaatagtactgttgagataaaagttgagcacattttgagacttcttccaaattggtccctagaaagttacactggtttgtactctcacttatgtcactgtttataccaccactgactgctgcctgctttattatttctttaatgagttggactgaacagtggttaatcctgactctgtttttgactgacagttaacagttacatgaaccattcatattacagctcttacttaaatttgaccaagccaggatatatctgttaggccacattcatttagggatcatgttttccaaagcaggtttgggcaaaattaatccacaggactgaaaggtatacatctgtgagttttgttctcacttccacctctaatttgaagaacactttaattgacacagaatacatttcacatatttaacctctacaataagttctgacacattttccatgaaacaaaccatcgctatattcaagataatgaacctatctatcatactcccaaattccttcttgcatctttgtaatttctcactcttccttctccctctccccgtcccatcccaaccactgatctgctcaggcaactaccaatcttctttctgtcactatagattaatttgcatttttaaagaaatttacatacatggaaccatacatcatctatgctttgtagtatgactcctgtcactcagtacaattattttgagattcatttatgttattgtatgtatcaatagttcatcccttttattggtaagtaacatttttttgtataggtataccatgatttgttgatgaacaaatttacctgttgatgaacatttacgttgttaccaagatttttgctattgaaaataaagtttttatgaatatttatatat

SEQ ID NO: 180563 - DNA, 3477 bp, Homo sapiens
  Payload ID: 15562
  Gene Symbol: SERPINB8
  Gene Name: serpin peptidase inhibitor, clade B (ovalbumin), member 8
  Uniprot ID: P50452
  ENST ID: ENST00000397985
  CDS Start-End: 257-1381
caatgtgtacactttttataaaaaccaccctccaaggaccaggcactggccctctctccggtgcccacagacatccacacaggcccaaagaatcagggattgcacaagccagagcaatcgaacggttctgagtcatctgccggaagccttgccctcaatcaaggcggacgtgaagcatctacaaaggaggaatagtcaaagcagcagcggcggcggcggcggcggcagcagcagcagcagcaggagaccttctctgatggatgacctctgtgaagcaaatggcacttttgccatcagcttatttaaaatattgggggaagaggacaactcaagaaacgtattcttctctcccatgagcatctcctctgccctggccatggtcttcatgggggcaaagggaagcactgcagcccagatgtcccaggcactttgtttatacaaagacggagatattcaccgaggtttccagtcacttctcagtgaagttaacagaactggcactcagtacttgcttagaactgccaacagactctttggagaaaagacgtgtgatttccttccagactttaaagaatactgtcagaagttctatcaggcagagctggaggagttgtcctttgctgaagacactgaagagtgcaggaagcatataaatgactgggtggcagagaagactgaaggtaagatttcagaggtactggatgctgggacagtcgatcccctgacaaagctggtccttgtgaatgccatttatttcaagggaaagtggaatgagcaatttgacagaaagtacacaaggggaatgctctttaaaaccaacgaggaaaaaaagacagtgcagatgatgtttaaggaagctaagtttaaaatggggtatgcggatgaggtacacacccaggtcctggagctgccctatgtggaagaggagctgagcatggtcattctgcttcccgatgacaacacggacctcgccgtggtggaaaaagcacttacatatgagaaattcaaagcctggacaaattcagaaaagttgacaaaaagtaaggttcaagttttccttcccagattaaagctggaggagagttatgacttggagcctttccttcgaagattaggaatgatcgatgcttttgacgaagccaaggcagacttttctggaatgtcaactgagaagaatgtgcctctgtccaaggttgcccacaagtgcttcgtggaggtcaatgaggaaggcacagaggctgccgcagccactgctgtggtcaggaattcccggtgcagcagaatggagccaagattctgtgcagaccacccttttcttttcttcatcaggcaccacaaaaccaactgcatcttgttctgtggcaggttctcttctccgtaaagaggagcaattgctgtacataccctcctttccttctacctatcttgccttaattaacattccctgtgacctagttggtgcagtggcttgaatgccaaaataaagcgtgtgcactggatagtgtgtgaaagtctttgctgaaagttccagagccattgagaataactgaggccgcagatgcatgaaatttgggcctgggaaggctatgctggttttggagtgtttggggtgcctgccattgcctctgccttcacctaagtctgtgcccattgtttcaggggatcttatggagcatctcagggcttcaggagccagccctcttccatccgcccggctctgcccaccaccactgccaggctgaacaggggactagtgcccaggtgacactgcacacaaagccaagggcaaaccctatagagtaaagctgcagccaccctgtgtctcatgtgcagctgaaatagtgatctgcttctgtcactgtcacatagacagccctgcatgccccctgtctcacacagtttgtaatgaagacagctccttctcatctttccataagcctgagatacaagttcagggactcagcaatgcactttaggactgagctaggaggcaaatatctgaagcttgctatgctgttctttccattccttttccctctgaaacacacaaaataccaaaggaacttacgcaacacaccactgagtcctctaactaatcatatgtgctcagacacagctcaagcacaccccttagttaagaaagaacctccatatacattaatttttttctgcctaaaaataaaattgcgttgtggcagcaatttggaaactacagcaaagtctccaaaaaaattgaagtcacccacaattccaacacacagcaatcactgctgttaatagtgatatacatccttccctattatgtgtatgcaaatagaaatttataagcattttactacaagttaatcatatccttcagtagcttatttcttcccttatgaaaaacctcccttaagatctttccaggtcatcaatttgatgtgcatagtattccactgtgtggctggatttctataattgaatctaattttagacagtttgagtaattaaaattatttctattaacaaataatagattgctaataatatatattatgctgttttggatatactaaatatttgctcacatccttaatatattttttaaaattcctaacaatagtactgttgagataaaagttgagcacattttgagacttcttccaaattggtccctagaaagttacactggtttgtactctcacttatgtcactgtttataccaccactgactgctgcctgctttattatttctttaatgagttggactgaacagtggttaatcctgactctgtttttgactgacagttaacagttacatgaaccattcatattacagctcttacttaaatttgaccaagccaggatatatctgttaggccacattcatttagggatcatgttttccaaagcaggtttgggcaaaattaatccacaggactgaaaggtatacatctgtgagttttgttctcacttccacctctaatttgaagaacactttaattgacacagaatacatttcacatatttaacctctacaataagttctgacacattttccatgaaacaaaccatcgctatattcaagataatgaacctatctatcatactcccaaattccttcttgcatctttgtaatttctcactcttccttctccctctccccgtcccatcccaaccactgatctgctcaggcaactaccaatcttctttctgtcactatagattaatttgcatttttaaagaaatttacatacatggaaccatacatcatctatgctttgtagtatgactcctgtcactcagtacaattattttgagattcatttatgttattgtatgtatcaatagttcatcccttttattggtaagtaacatttttttgtataggtataccatgatttgttgatgaacaaatttacctgttgatgaacatttacgttgttaccaagatttttgctattgaaaataaagtttttatgaatatttatatatata

SEQ ID NO: 180564 - DNA, 1178 bp, Homo sapiens
  Payload ID: 15562
  Gene Symbol: SERPINB8
  Gene Name: serpin peptidase inhibitor, clade B (ovalbumin), member 8
  Uniprot ID: P50452
  ENST ID: ENST00000397988
  CDS Start-End: 63-791
gtcaaagcagcagcggcggcggcggcggcggcagcagcagcagcagcaggagaccttctctgatggatgacctctgtgaagcaaatggcacttttgccatcagcttatttaaaatattgggggaagaggacaactcaagaaacgtattcttctctcccatgagcatctcctctgccctggccatggtcttcatgggggcaaagggaagcactgcagcccagatgtcccaggcactttgtttatacaaagacggagatattcaccgaggtttccagtcacttctcagtgaagttaacagaactggcactcagtacttgcttagaactgccaacagactctttggagaaaagacgtgtgatttccttccagactttaaagaatactgtcagaagttctatcaggcagagctggaggagttgtcctttgctgaagacactgaagagtgcaggaagcatataaatgactgggtggcagagaagactgaaggtaagatttcagaggtactggatgctgggacagtcgatcccctgacaaagctggtccttgtgaatgccatttatttcaagggaaagtggaatgagcaatttgacagaaagtacacaaggggaatgctctttaaaaccaacgaggaaaaaaagacagtgcagatgatgtttaaggaagctaagtttaaaatggggtatgcggatgaggtacacacccaggtcctggagctgccctatgtggaagaggagctgagcatggtcattctgcttcccgatgacaacacggacctcgccgtgaaagagtgatggatcttgaagaatttgaagctaactccaggacaggcagaggacaaacaaggatgctgatgaagtcttcttgcattccccatttctcgtctcatgctcccttctcatgcctcccttcatcttcagatgaaacacaattccctctcttttactctgagttgccctctgatttaaccctgaatagtcccctcattagactcagaagcagagttctgagccatgctctttgtcttttgtcaaacaatctctcccactcacagtagtatgtattgcatgaagattaatgtaatgaattggttagaattttctaaactgttaaaaaatgtttttaacatttgaaaggagttaggtacaaattgtttttattaaaaatttctgcctgtctca

SEQ ID NO: 180565 - DNA, 564 bp, Homo sapiens
  Payload ID: 15562
  Gene Symbol: SERPINB8
  Gene Name: serpin peptidase inhibitor, clade B (ovalbumin), member 8
  ENST ID: ENST00000441827
  CDS Start-End: 72-564
aggcttgcgatttgctgcgctgtgatttgctgccggatgggagcggggggtgacgcgagcaaccttctctgatggatgacctctgtgaagcaaatggcacttttgccatcagcttatttaaaatattgggggaagaggacaactcaagaaacgtattcttctctcccatgagcatctcctctgccctggccatggtcttcatgggggcaaagggaagcactgcagcccagatgtcccaggcactttgtttatacaaagacggagatattcaccgaggtttccagtcacttctcagtgaagttaacagaactggcactcagtacttgcttagaactgccaacagactctttggagaaaagacgtgtgatttccttccagactttaaagaatactgtcagaagttctatcaggcagagctggaggagttgtcctttgctgaagacactgaagagtgcaggaagcatataaatgactgggtggcagagaagactgaaggtaagatttcagaggtactggatgctgggacagtcgatcccctgacaaagctggtccttgtgaatgcca

SEQ ID NO: 180566 - DNA, 580 bp, Homo sapiens
  Payload ID: 15562
  Gene Symbol: SERPINB8
  Gene Name: serpin peptidase inhibitor, clade B (ovalbumin), member 8
  ENST ID: ENST00000448851
  CDS Start-End: 209-580
gtgcgtgagagaggggaagggaggaaggccagagcaggaatcagagcgaggcaaaggcgggcaggaactaggagaatgacggcgggaggcggccgggaaagagagtcgcggggctgtgggggtcgccctggcaccagccggggtcccaagccccaccgcgagacccggcgaaggccgagggccgggtcccgagaacagaccttctctgatggatgacctctgtgaagcaaatggcacttttgccatcagcttatttaaaatattgggggaagaggacaactcaagaaacgtattcttctctcccatgagcatctcctctgccctggccatggtcttcatgggggcaaagggaagcactgcagcccagatgtcccaggcactttgtttatacaaagacggagatattcaccgaggtttccagtcacttctcagtgaagttaacagaactggcactcagtacttgcttagaactgccaacagactctttggagaaaagacgtgtgatttccttccagactttaaagaatactgtcagaagttctatcaggcagagctggaggagttgtcctttgctgaagac

SEQ ID NO: 180567 - DNA, 3192 bp, Homo sapiens
  Payload ID: 15562
  Gene Symbol: SERPINB8
  Gene Name: serpin peptidase inhibitor, clade B (ovalbumin), member 8
  Uniprot ID: P50452
  ENST ID: ENST00000542677
  CDS Start-End: 521-1099
caagccagagcaatcgaacggttctgagtcatctgccggaagccttgccctcaatcaaggcggacgtgaagcatctacaaaggaggaatagtcaaagcagcagcggcggcggcggcggcggcagcagcagcagcagcaggaggcactttgtttatacaaagacggagatattcaccgaggtttccagtcacttctcagtgaagttaacagaactggcactcagtacttgcttagaactgccaacagactctttggagaaaagacgtgtgatttccttccagactttaaagaatactgtcagaagttctatcaggcagagctggaggagttgtcctttgctgaagacactgaagagtgcaggaagcatataaatgactgggtggcagagaagactgaaggtaagatttcagaggtactggatgctgggacagtcgatcccctgacaaagctggtccttgtgaatgccatttatttcaagggaaagtggaatgagcaatttgacagaaagtacacaaggggaatgctctttaaaaccaacgaggaaaaaaagacagtgcagatgatgtttaaggaagctaagtttaaaatggggtatgcggatgaggtacacacccaggtcctggagctgccctatgtggaagaggagctgagcatggtcattctgcttcccgatgacaacacggacctcgccgtggtggaaaaagcacttacatatgagaaattcaaagcctggacaaattcagaaaagttgacaaaaagtaaggttcaagttttccttcccagattaaagctggaggagagttatgacttggagcctttccttcgaagattaggaatgatcgatgcttttgacgaagccaaggcagacttttctggaatgtcaactgagaagaatgtgcctctgtccaaggttgcccacaagtgcttcgtggaggtcaatgaggaaggcacagaggctgccgcagccactgctgtggtcaggaattcccggtgcagcagaatggagccaagattctgtgcagaccacccttttcttttcttcatcaggcaccacaaaaccaactgcatcttgttctgtggcaggttctcttctccgtaaagaggagcaattgctgtacataccctcctttccttctacctatcttgccttaattaacattccctgtgacctagttggtgcagtggcttgaatgccaaaataaagcgtgtgcactggatagtgtgtgaaagtctttgctgaaagttccagagccattgagaataactgaggccgcagatgcatgaaatttgggcctgggaaggctatgctggttttggagtgtttggggtgcctgccattgcctctgccttcacctaagtctgtgcccattgtttcaggggatcttatggagcatctcagggcttcaggagccagccctcttccatccgcccggctctgcccaccaccactgccaggctgaacaggggactagtgcccaggtgacactgcacacaaagccaagggcaaaccctatagagtaaagctgcagccaccctgtgtctcatgtgcagctgaaatagtgatctgcttctgtcactgtcacatagacagccctgcatgccccctgtctcacacagtttgtaatgaagacagctccttctcatctttccataagcctgagatacaagttcagggactcagcaatgcactttaggactgagctaggaggcaaatatctgaagcttgctatgctgttctttccattccttttccctctgaaacacacaaaataccaaaggaacttacgcaacacaccactgagtcctctaactaatcatatgtgctcagacacagctcaagcacaccccttagttaagaaagaacctccatatacattaatttttttctgcctaaaaataaaattgcgttgtggcagcaatttggaaactacagcaaagtctccaaaaaaattgaagtcacccacaattccaacacacagcaatcactgctgttaatagtgatatacatccttccctattatgtgtatgcaaatagaaatttataagcattttactacaagttaatcatatccttcagtagcttatttcttcccttatgaaaaacctcccttaagatctttccaggtcatcaatttgatgtgcatagtattccactgtgtggctggatttctataattgaatctaattttagacagtttgagtaattaaaattatttctattaacaaataatagattgctaataatatatattatgctgttttggatatactaaatatttgctcacatccttaatatattttttaaaattcctaacaatagtactgttgagataaaagttgagcacattttgagacttcttccaaattggtccctagaaagttacactggtttgtactctcacttatgtcactgtttataccaccactgactgctgcctgctttattatttctttaatgagttggactgaacagtggttaatcctgactctgtttttgactgacagttaacagttacatgaaccattcatattacagctcttacttaaatttgaccaagccaggatatatctgttaggccacattcatttagggatcatgttttccaaagcaggtttgggcaaaattaatccacaggactgaaaggtatacatctgtgagttttgttctcacttccacctctaatttgaagaacactttaattgacacagaatacatttcacatatttaacctctacaataagttctgacacattttccatgaaacaaaccatcgctatattcaagataatgaacctatctatcatactcccaaattccttcttgcatctttgtaatttctcactcttccttctccctctccccgtcccatcccaaccactgatctgctcaggcaactaccaatcttctttctgtcactatagattaatttgcatttttaaagaaatttacatacatggaaccatacatcatctatgctttgtagtatgactcctgtcactcagtacaattattttgagattcatttatgttattgtatgtatcaatagttcatcccttttattggtaagtaacatttttttgtataggtataccatgatttgttgatgaacaaatttacctgttgatgaacatttacgttgttaccaagatttttgctattgaaaataaagtttttatgaatatttatatat

SEQ ID NO: 180568 - DNA, 919 bp, Homo sapiens
  Payload ID: 15562
  Gene Symbol: SERPINB8
  Gene Name: serpin peptidase inhibitor, clade B (ovalbumin), member 8
  ENST ID: ENST00000493661
  CDS Start-End: 1-130
gctgccctatgtggaagaggagctgagcatggtcattctgcttcccgatgacaacacggacctcgccgtggatacactgagaagcacaagcttcttctgtgacattcttgccaacattatcagcacctgagtgtaagtacagaaacatcagacggcattgaattgagggatattctaccaaataattggctgaaactctctaaaagaggcaatgtcataaaagacaagcactgtggaagtgccacaggaggatgtgtgataactaattgcaacctgcgagcttctttgggtcccacaaaacacctgaataaatacaaaagaagacattcaaatgtccaagaaggaaatataaaaggatttggttatggtagttatcaagacattcatatgaaatgcacagtgaaataccaccacaactctaccaaagtaggtaaaattaaaaccactgacaacatcaagagtgggcaacgatgtagaacaactggaattctcctacatttttcttgggaataaattagtaaagacactcaaaaaattggccatatctacaaaagcctaatagtgttgaagcaaacgttgcactaagcaaagttaagcatgtcctataacctgaatgccgtcttccaccaaaatttatatgttgaaacccaacatccaatgtatcagtattaagaggtgggacctttgggaggtgattaggtcctgaggaaaaagccctcataaatgggattgatgtcctcataaaaggggccccagagaactaccttgcccctctgccatgtgagtacacagtgagaaggtgccatctataaagcagagaataagcccttaccagacatcaaatataatggtactttgattttggacttcccagcctctaaaattgtacgaaataaatttatgttgtttataagccacc

SEQ ID NO: 180569 - DNA, 4118 bp, Homo sapiens
  Payload ID: 15563
  Gene Symbol: SERPINB9
  Gene Name: serpin peptidase inhibitor, clade B (ovalbumin), member 9
  Uniprot ID: P50453
  ENST ID: ENST00000380698
  CDS Start-End: 91-1221
ccgggtcctgcgcctcgggggtcggcgtccaggctcggagcgcggcacggagacggcggcagcgctggactaggtggcaggccctgcatcatggaaactctttctaatgcaagtggtacttttgccatacgccttttaaagatactgtgtcaagataacccttcgcacaacgtgttctgttctcctgtgagcatctcctctgccctggccatggttctcctaggggcaaagggaaacaccgcaacccagatggcccaggcactgtctttaaacacagaggaagacattcatcgggctttccagtcgcttctcactgaagtgaacaaggctggcacacagtacctgctgagaacggccaacaggctctttggagagaaaacttgtcagttcctctcaacgtttaaggaatcctgtcttcaattctaccatgctgagctgaaggagctttcctttatcagagctgcagaagagtccaggaaacacatcaacacctgggtctcaaaaaagaccgaaggtaaaattgaagagttgttgccgggtagctcaattgatgcagaaaccaggctggttcttgtcaatgccatctacttcaaaggaaagtggaatgaaccgtttgacgaaacatacacaagggaaatgccctttaaaataaaccaggaggagcaaaggccagtgcagatgatgtatcaggaggccacgtttaagctcgcccacgtgggcgaggtgcgcgcgcagctgctggagctgccctacgccaggaaggagctgagcctgctggtgctgctgcctgacgacggcgtggagctcagcacggtggaaaaaagtctcacttttgagaaactcacagcctggaccaagccagactgtatgaagagtactgaggttgaagttctccttccaaaatttaaactacaagaggattatgacatggaatctgtgcttcggcatttgggaattgttgatgccttccaacagggcaaggctgacttgtcggcaatgtcagcggagagagacctgtgtctgtccaagttcgtgcacaagagttttgtggaggtgaatgaagaaggcaccgaggcagcggcagcgtcgagctgctttgtagttgcagagtgctgcatggaatctggccccaggttctgtgctgaccaccctttccttttcttcatcaggcacaacagagccaacagcattctgttctgtggcaggttctcatcgccataaagggtgcacttaccgtgcactcggccatttccctcttcctgtgtccccagatccccactacagctccaagaggatgggcctagaaagccaagtgcaaagatgagggcagattctttacctgtctgccctcatgatttgccagcatgaattcatgatgctccacactcgcttatgctacttaatcagaatcttgagaaaatagaccataatgattccctgttgtattaaaattgcagtccaaatcccataggatggcaagcaaagttcttctagaattccacatgcaattcactctggcgaccctgtgctttcctgacactgcgaatacattccttaacccgctgcctcagtggtaataaatggtgctagatattgctactattttatagatttcctggtgcttagccttataaaaaaggttgtaaaatgtacatttatattttatcttttttttttttttttttctgagacgcagtctggctctctgtcgcccaggctggagtgcagtggctcgatctcggctcactgcaagctccgcctcccgggttcacgccattctcctgcctcagcctcccgagtagctgggactacaggcgcccgccaccacgcccggctaattttttgtatttttagtagagacggggtttcaccgtgttagccaggatggtgtcgatctcctgacctcgtgatccacccgcctcggcctcccaaagtgctgggattacaggcttgagccaccgcgcccggctatattttatcttttatctttttctttgacatttaccaatcaccaagcatgcaccaaacactgctttaggcactggggacacaaaggggacagagccatcctcctttgacacctggtcttcagttctgtgcccaacgtatatagttttgacaatgaccaggttggactgtttaatgtctttcaacttaccacgtaatcctcttgtagggatcacatctttctttatgatattgtatttctctacctctaacagtaaaaattccattcaacccttaaagctcacttcaaattcttctttgagaagtttttcctttctccgcaaccagatgtacatatttgaactctctttgtacttggagggcacttctttcgtggtagttcttttatttttattaatctctgtatccttagatagtcctccaacaaccaaaggttgggactctgtcttacatatctgggtgcccctcatagtgcagtaataagtaagttgattatatacgagctatgtaacttatattttttaatggttggatatcactgagtttttttttttaagaatttttttattgaggtaaacttcacataacataaaattaactattttaaagtgagaagttcagtgccacttagtattgttaacaatgttgcataaccaccacctttatttaaagttccaaaaaaaatgttctcctctaaaaggaaaccccatcccattaagcagatactctccattccttccttcctccagcccccagcaaccaccaatctgctttctgtctctatggatttatctattcttgctattttatataaattgaattgtatgagaccttttgtgtctggcttctttcacttagtacaagtttttgagatttatttacatagtagcatgtatcaacacttcatttttatggccaaataaaattgtattatgtgtttatagcacaatttatttatccactcattcattgatggactttgggttgtttctgacttttggctattgggaatagtgctgctatgaatgtttgtgtacctgtatttgtttgaatgcctattttgcattctcttgggtatatatctaggagtggaactgctgggtcatatgttaattctatgtttagctttttgaggaacagacaaactgttttccacagcagttgaaccattccacattcccaccagcaatgtatgagaattccaatttctgtccacttcctcaccaacacttattattttccttttcctttttttaaaaaaaataagttatggccatcttagtgggtgtgaagtggtatctcattgtgttttttatttgcatttcctatgtaatgagctagaaactaaagtacaaactagatgggacatccagtccctttgatagataatgctgagtaaaaaatgagatgaaagacatttgtttgtttttagaacacgagtgacagtttgttaaaaagctttagaggaggaatgaaaacaaagtgaagtacacttagaaaagggccaagtggacatcttggatgtcaagtgcctagttcagtatcttttttttttttttttttttttttgagacagtgcctcactctgtcacccaggctggagtgtagtggcatgatctgggctcactgcaacctcctcctcctggattcaagcaattctcttgcttcagcctcccaagtagctgagactacaagcacccaccatcacacccagctaattttgtatttttcagtagagacggggtttcgccacattggccgtgttggtcttgaactcctggcctcaagcgatccgcctacctcagcctcccaaagtgctaggattacaggcataagccactgagcccagccctagttcagtatcttttatgtaaattacaaacatctgcaacattatgtatcatatgcagatacttattgcatttcttttattagtggtgaaagtgttctatgcatttattggctcttgaatttcctcatctatgaattgtcattcatacacctacttttctgcttcgtttttacatatgtctttgcctattaaagatattatccctctgttttatattttctctcattcttgtattgccttttaaattttgttatgatgtttcattaataaacagtgttttgttttcctctataatcaa

SEQ ID NO: 180570 - DNA, 1594 bp, Homo sapiens
  Payload ID: 15564
  Gene Symbol: SERPINC1
  Gene Name: serpin peptidase inhibitor, clade C (antithrombin), member 1
  Uniprot ID: P01008
  ENST ID: ENST00000367698
  CDS Start-End: 120-1514
tctgccccaccctgtcctctggaacctctgcgagatttagaggaaagaaccagttttcaggcggattgcctcagatcacactatctccacttgcccagccctgtggaagattagcggccatgtattccaatgtgataggaactgtaacctctggaaaaaggaaggtttatcttttgtccttgctgctcattggcttctgggactgcgtgacctgtcacgggagccctgtggacatctgcacagccaagccgcgggacattcccatgaatcccatgtgcatttaccgctccccggagaagaaggcaactgaggatgagggctcagaacagaagatcccggaggccaccaaccggcgtgtctgggaactgtccaaggccaattcccgctttgctaccactttctatcagcacctggcagattccaagaatgacaatgataacattttcctgtcacccctgagtatctccacggcttttgctatgaccaagctgggtgcctgtaatgacaccctccagcaactgatggaggtatttaagtttgacaccatatctgagaaaacatctgatcagatccacttcttctttgccaaactgaactgccgactctatcgaaaagccaacaaatcctccaagttagtatcagccaatcgcctttttggagacaaatcccttaccttcaatgagacctaccaggacatcagtgagttggtatatggagccaagctccagcccctggacttcaaggaaaatgcagagcaatccagagcggccatcaacaaatgggtgtccaataagaccgaaggccgaatcaccgatgtcattccctcggaagccatcaatgagctcactgttctggtgctggttaacaccatttacttcaagggcctgtggaagtcaaagttcagccctgagaacacaaggaaggaactgttctacaaggctgatggagagtcgtgttcagcatctatgatgtaccaggaaggcaagttccgttatcggcgcgtggctgaaggcacccaggtgcttgagttgcccttcaaaggtgatgacatcaccatggtcctcatcttgcccaagcctgagaagagcctggccaaggtagagaaggaactcaccccagaggtgctgcaagagtggctggatgaattggaggagatgatgctggtggtccacatgccccgcttccgcattgaggacggcttcagtttgaaggagcagctgcaagacatgggccttgtcgatctgttcagccctgaaaagtccaaactcccaggtattgttgcagaaggccgagatgacctctatgtctcagatgcattccataaggcatttcttgaggtaaatgaagaaggcagtgaagcagctgcaagtaccgctgttgtgattgctggccgttcgctaaaccccaacagggtgactttcaaggccaacaggcctttcctggtttttataagagaagttcctctgaacactattatcttcatgggcagagtagccaacccttgtgttaagtaaaatgttcttattctttgcacctcttcctatttttggtttgtgaacagaagtaaaaataaatacaaactacttccatctca

SEQ ID NO: 180571 - DNA, 984 bp, Homo sapiens
  Payload ID: 15564
  Gene Symbol: SERPINC1
  Gene Name: serpin peptidase inhibitor, clade C (antithrombin), member 1
  ENST ID: ENST00000617423
  CDS Start-End: 120-899
tctgccccaccctgtcctctggaacctctgcgagatttagaggaaagaaccagttttcaggcggattgcctcagatcacactatctccacttgcccagccctgtggaagattagcggccatgtattccaatgtgataggaactgtaacctctggaaaaaggaaggtttatcttttgtccttgctgctcattggcttctgggactgcgtgacctgtcacgggagccctgtggacatctgcacagccaagccgcgggacattcccatgaatcccatgtgcatttaccgctccccggagaagaaggcaactgaggatgagggctcagaacagaagatcccggaggccaccaaccggcgtgtctgggaactgtccaaggccaattcccgctttgctaccactttctatcagcacctggcagattccaagaatgacaatgataacattttcctgtcacccctgagtatctccacggcttttgctatgaccaagctgggtgcctgtaatgacaccctccagcaactgatggaggtatttaagtttgacaccatatctgagaaaacatctgatcagatccacttcttctttgccaaactgaactgccgactctatcgaaaagccaacaaatcctccaagttagtatcagccaatcgcctttttggagacaaatcccttaccttcaatgacctctatgtctcagatgcattccataaggcatttcttgaggtaaatgaagaaggcagtgaagcagctgcaagtaccgctgttgtgattgctggccgttcgctaaaccccaacagggtgactttcaaggccaacaggcctttcctggtttttataagagaagttcctctgaacactattatcttcatgggcagagtagccaacccttgtgttaagtaaaatgttcttattctttgcacctcttcctatttttggtttgtgaacagaagtaaaaataaatacaaactacttccatctcacatta

SEQ ID NO: 180572 - DNA, 2437 bp, Homo sapiens
  Payload ID: 15565
  Gene Symbol: SERPIND1
  Gene Name: serpin peptidase inhibitor, clade D (heparin cofactor), member 1
  Uniprot ID: P05546
  ENST ID: ENST00000215727
  CDS Start-End: 284-1783
atgtgtgcatgctaacacagtaaccgtcatatactcaaagtgtcagctctaagaactggagatgaggagctgcaagccactctacagttatcaaaggcacagctgagggggtttgtgctgaccaagctggttgcctggtgtttggattgggacttatttactttggaaaatatgcagcaacagcccagcaccaaagttcacatcaaaatcccactgatgaccttggctgctttcatctctgaagcgccacttctcagaaacacagagctttagctccgccaaaatgaaacactcattaaacgcacttctcattttcctcatcataacatctgcgtggggtgggagcaaaggcccgctggatcagctagagaaaggaggggaaactgctcagtctgcagatccccagtgggagcagttaaataacaaaaacctgagcatgcctcttctccctgccgacttccacaaggaaaacaccgtcaccaacgactggattccagagggggaggaggacgacgactatctggacctggagaagatattcagtgaagacgacgactacatcgacatcgtcgacagtctgtcagtttccccgacagactctgatgtgagtgctgggaacatcctccagctttttcatggcaagagccggatccagcgtcttaacatcctcaacgccaagttcgctttcaacctctaccgagtgctgaaagaccaggtcaacactttcgataacatcttcatagcacccgttggcatttctactgcgatgggtatgatttccttaggtctgaagggagagacccatgaacaagtgcactcgattttgcattttaaagactttgttaatgccagcagcaagtatgaaatcacgaccattcataatctcttccgtaagctgactcatcgcctcttcaggaggaattttgggtacacactgcggtcagtcaatgacctttatatccagaagcagtttccaatcctgcttgacttcaaaactaaagtaagagagtattactttgctgaggcccagatagctgacttctcagaccctgccttcatatcaaaaaccaacaaccacatcatgaagctcaccaagggcctcataaaagatgctctggagaatatagaccctgctacccagatgatgattctcaactgcatctacttcaaaggatcctgggtgaataaattcccagtggaaatgacacacaaccacaacttccggctgaatgagagagaggtagttaaggtttccatgatgcagaccaaggggaacttcctcgcagcaaatgaccaggagctggactgcgacatcctccagctggaatacgtggggggcatcagcatgctaattgtggtcccacacaagatgtctgggatgaagaccctcgaagcgcaactgacaccccgggtggtggagagatggcaaaaaagcatgacaaacagaactcgagaagtgcttctgccgaaattcaagctggagaagaactacaatctagtggagtccctgaagttgatggggatcaggatgctgtttgacaaaaatggcaacatggcaggcatctcagaccaaaggatcgccatcgacctgttcaagcaccaaggcacgatcacagtgaacgaggaaggcacccaagccaccactgtgaccacggtggggttcatgccgctgtccacccaagtccgcttcactgtcgaccgcccctttcttttcctcatctacgagcatcgcaccagctgcctgctcttcatgggaagagtggccaaccccagcaggtcctagaggtggaggtctaggtgtctgaagtgccttgggggcaccctcattttgtttccattccaacaacgagaacagagatgttctggcatcatttacgtagtttacgctaccaatctgaattcgaggcccatatgagaggagcttagaaacgaccaagaagagaggcttgttggaatcaattctgcacaatagcccatgctgtaagctcatagaagtcactgtaactgtagtgtgtctgctgttacctagagggtctcacctccccactcttcacagcaaacctgagcagcgcgtcctaagcacctcccgctccggtgaccccatccttgcacacctgactctgtcactcaagcctttctccaccaggcccctcatctgaataccaagcacagaaatgagtggtgtgactaattccttacctctcccaaggagggtacacaactagcaccattcttgatgtccagggaagaagccacctcaagacatatgaggggtgccctgggctaatgttagggcttaattttctcaaagcctgacctttcaaatccatgatgaatgccatcagtccctcctgctgttgcctccctgtgacctggaggacagtgtgtgccatgtctcccatactagagataaataaatgtagccacatttactgtg

SEQ ID NO: 180573 - DNA, 1798 bp, Homo sapiens
  Payload ID: 15565
  Gene Symbol: SERPIND1
  Gene Name: serpin peptidase inhibitor, clade D (heparin cofactor), member 1
  Uniprot ID: P05546
  ENST ID: ENST00000406799
  CDS Start-End: 133-1632
taatgctgtgagggcctcttcctgggtcaaagccacagggaacctgccatgtggatgctgcagcggggtgtggatcagccaggccgcctttcactgtgttctgttttccctcccagctttagctccgccaaaatgaaacactcattaaacgcacttctcattttcctcatcataacatctgcgtggggtgggagcaaaggcccgctggatcagctagagaaaggaggggaaactgctcagtctgcagatccccagtgggagcagttaaataacaaaaacctgagcatgcctcttctccctgccgacttccacaaggaaaacaccgtcaccaacgactggattccagagggggaggaggacgacgactatctggacctggagaagatattcagtgaagacgacgactacatcgacatcgtcgacagtctgtcagtttccccgacagactctgatgtgagtgctgggaacatcctccagctttttcatggcaagagccggatccagcgtcttaacatcctcaacgccaagttcgctttcaacctctaccgagtgctgaaagaccaggtcaacactttcgataacatcttcatagcacccgttggcatttctactgcgatgggtatgatttccttaggtctgaagggagagacccatgaacaagtgcactcgattttgcattttaaagactttgttaatgccagcagcaagtatgaaatcacgaccattcataatctcttccgtaagctgactcatcgcctcttcaggaggaattttgggtacacactgcggtcagtcaatgacctttatatccagaagcagtttccaatcctgcttgacttcaaaactaaagtaagagagtattactttgctgaggcccagatagctgacttctcagaccctgccttcatatcaaaaaccaacaaccacatcatgaagctcaccaagggcctcataaaagatgctctggagaatatagaccctgctacccagatgatgattctcaactgcatctacttcaaaggatcctgggtgaataaattcccagtggaaatgacacacaaccacaacttccggctgaatgagagagaggtagttaaggtttccatgatgcagaccaaggggaacttcctcgcagcaaatgaccaggagctggactgcgacatcctccagctggaatacgtggggggcatcagcatgctaattgtggtcccacacaagatgtctgggatgaagaccctcgaagcgcaactgacaccccgggtggtggagagatggcaaaaaagcatgacaaacagaactcgagaagtgcttctgccgaaattcaagctggagaagaactacaatctagtggagtccctgaagttgatggggatcaggatgctgtttgacaaaaatggcaacatggcaggcatctcagaccaaaggatcgccatcgacctgttcaagcaccaaggcacgatcacagtgaacgaggaaggcacccaagccaccactgtgaccacggtggggttcatgccgctgtccacccaagtccgcttcactgtcgaccgcccctttcttttcctcatctacgagcatcgcaccagctgcctgctcttcatgggaagagtggccaaccccagcaggtcctagaggtggaggtctaggtgtctgaagtgccttgggggcaccctcattttgtttccattccaacaacgagaacagagatgttctggcatcatttacgtagtttacgctaccaatctgaattcgaggcccatatgagaggagcttagaaacgaccaagaagagaggcttg

SEQ ID NO: 180574 - DNA, 3190 bp, Homo sapiens
  Payload ID: 15566
  Gene Symbol: SERPINE1
  Gene Name: serpin peptidase inhibitor, clade E (nexin, plasminogen activator inhibitor type 1), member 1
  Uniprot ID: P05121
  ENST ID: ENST00000223095
  CDS Start-End: 158-1366
ggcccacagaggagcacagctgtgtttggctgcagggccaagagcgctgtcaagaagacccacacgcccccctccagcagctgaattcctgcagctcagcagccgccgccagagcaggacgaaccgccaatcgcaaggcacctctgagaacttcaggatgcagatgtctccagccctcacctgcctagtcctgggcctggcccttgtctttggtgaagggtctgctgtgcaccatcccccatcctacgtggcccacctggcctcagacttcggggtgagggtgtttcagcaggtggcgcaggcctccaaggaccgcaacgtggttttctcaccctatggggtggcctcggtgttggccatgctccagctgacaacaggaggagaaacccagcagcagattcaagcagctatgggattcaagattgatgacaagggcatggcccccgccctccggcatctgtacaaggagctcatggggccatggaacaaggatgagatcagcaccacagacgcgatcttcgtccagcgggatctgaagctggtccagggcttcatgccccacttcttcaggctgttccggagcacggtcaagcaagtggacttttcagaggtggagagagccagattcatcatcaatgactgggtgaagacacacacaaaaggtatgatcagcaacttgcttgggaaaggagccgtggaccagctgacacggctggtgctggtgaatgccctctacttcaacggccagtggaagactcccttccccgactccagcacccaccgccgcctcttccacaaatcagacggcagcactgtctctgtgcccatgatggctcagaccaacaagttcaactatactgagttcaccacgcccgatggccattactacgacatcctggaactgccctaccacggggacaccctcagcatgttcattgctgccccttatgaaaaagaggtgcctctctctgccctcaccaacattctgagtgcccagctcatcagccactggaaaggcaacatgaccaggctgccccgcctcctggttctgcccaagttctccctggagactgaagtcgacctcaggaagcccctagagaacctgggaatgaccgacatgttcagacagtttcaggctgacttcacgagtctttcagaccaagagcctctccacgtcgcgcaggcgctgcagaaagtgaagatcgaggtgaacgagagtggcacggtggcctcctcatccacagctgtcatagtctcagcccgcatggcccccgaggagatcatcatggacagacccttcctctttgtggtccggcacaaccccacaggaacagtccttttcatgggccaagtgatggaaccctgaccctggggaaagacgccttcatctgggacaaaactggagatgcatcgggaaagaagaaactccgaagaaaagaattttagtgttaatgactctttctgaaggaagagaagacatttgccttttgttaaaagatggtaaaccagatctgtctccaagaccttggcctctccttggaggacctttaggtcaaactccctagtctccacctgagaccctgggagagaagtttgaagcacaactcccttaaggtctccaaaccagacggtgacgcctgcgggaccatctggggcacctgcttccacccgtctctctgcccactcgggtctgcagacctggttcccactgaggccctttgcaggatggaactacggggcttacaggagcttttgtgtgcctggtagaaactatttctgttccagtcacattgccatcactcttgtactgcctgccaccgcggaggaggctggtgacaggccaaaggccagtggaagaaacaccctttcatctcagagtccactgtggcactggccacccctccccagtacaggggtgctgcaggtggcagagtgaatgtcccccatcatgtggcccaactctcctggcctggccatctccctccccagaaacagtgtgcatgggttattttggagtgtaggtgacttgtttactcattgaagcagatttctgcttccttttatttttataggaatagaggaagaaatgtcagatgcgtgcccagctcttcaccccccaatctcttggtggggaggggtgtacctaaatatttatcatatccttgcccttgagtgcttgttagagagaaagagaactactaaggaaaataatattatttaaactcgctcctagtgtttctttgtggtctgtgtcaccgtatctcaggaagtccagccacttgactggcacacacccctccggacatccagcgtgacggagcccacactgccaccttgtggccgcctgagaccctcgcgccccccgcgcccctctttttccccttgatggaaattgaccatacaatttcatcctccttcaggggatcaaaaggacggagtggggggacagagactcagatgaggacagagtggtttccaatgtgttcaatagatttaggagcagaaatgcaaggggctgcatgacctaccaggacagaactttccccaattacagggtgactcacagccgcattggtgactcacttcaatgtgtcatttccggctgctgtgtgtgagcagtggacacgtgaggggggggtgggtgagagagacaggcagctcggattcaactaccttagataatatttctgaaaacctaccagccagagggtagggcacaaagatggatgtaatgcactttgggaggccaaggcgggaggattgcttgagcccaggagttcaagaccagcctgggcaacataccaagacccccgtctctttaaaaatatatatattttaaatatacttaaatatatatttctaatatctttaaatatatatatatattttaaagaccaatttatgggagaattgcacacagatgtgaaatgaatgtaatctaatagaagcctaatcagcccaccatgttctccactgaaaaatcctctttctttggggtttttctttctttcttttttgattttgcactggacggtgacgtcagccatgtacaggatccacaggggtggtgtcaaatgctattgaaattgtgttgaattgtatgctttttcacttttgataaataaacatgtaaaaatgtttcaaaaaaataataaaataaataaatacgaagaatatgtcaggacagtca

SEQ ID NO: 180575 - DNA, 2195 bp, Homo sapiens
  Payload ID: 15567
  Gene Symbol: SERPINE2
  Gene Name: serpin peptidase inhibitor, clade E (nexin, plasminogen activator inhibitor type 1), member 2
  Uniprot ID: P07093
  ENST ID: ENST00000258405
  CDS Start-End: 244-1440
cgataaagcccccgccgccgcggcagccagcttgcgctgtggggctgcccgggctgcgcggcgtctgcaggcgccaccgctgcctctttccggctgtgaccctcctcgccgccgccgcttggctgcgtcctccgactccccgcgccgccgagaccaggctcccgctccggttgcggccgcaccgccctccgcggccgccccctggggatccagcgagcgcggtcgtccttggtggaaggaaccatgaactggcatctccccctcttcctcttggcctctgtgacgctgccttccatctgctcccacttcaatcctctgtctctcgaggaactaggctccaacacggggatccaggttttcaatcagattgtgaagtcgaggcctcatgacaacatcgtgatctctccccatgggattgcgtcggtcctggggatgcttcagctgggggcggacggcaggaccaagaagcagctcgccatggtgatgagatacggcgtaaatggagttggtaaaatattaaagaagatcaacaaggccatcgtctccaagaagaataaagacattgtgacagtggctaacgccgtgtttgttaagaatgcctctgaaattgaagtgccttttgttacaaggaacaaagatgtgttccagtgtgaggtccggaatgtgaactttgaggatccagcctctgcctgtgattccatcaatgcatgggttaaaaatgaaaccagggatatgattgacaatctgctgtccccagatcttattgatggtgtgctcaccagactggtcctcgtcaacgcagtgtatttcaagggtctgtggaaatcacggttccaacccgagaacacaaagaaacgcactttcgtggcagccgacgggaaatcctatcaagtgccaatgctggcccagctctccgtgttccggtgtgggtcgacaagtgcccccaatgatttatggtacaacttcattgaactgccctaccacggggaaagcatcagcatgctgattgcactgccgactgagagctccactccgctgtctgccatcatcccacacatcagcaccaagaccatagacagctggatgagcatcatggtgcccaagagggtgcaggtgatcctgcccaagttcacagctgtagcacaaacagatttgaaggagccgctgaaagttcttggcattactgacatgtttgattcatcaaaggcaaattttgcaaaaataacaacagggtcagaaaacctccatgtttctcatatcttgcaaaaagcaaaaattgaagtcagtgaagatggaaccaaagcttcagcagcaacaactgcaattctcattgcaagatcatcgcctccctggtttatagtagacagaccttttctgtttttcatccgacataatcctacaggtgctgtgttattcatggggcagataaacaaaccctgaagagtatacaaaagaaaccatgcaaagcaacgactactttgctacgaagaaagactcctttcctgcatctttcatagttctgttaaatatttttgtacatcgcttctttttcaaaactagttcttaggaacagactcgatgcaagtgtttctgttctgggaggtattggagggaaaaaacaagcaggatggctggaacactgtactgaggaatgaatagaaaggcttccagatgtctaaaagattctttaaactactgaactgttacctaggttaacaaccctgttgagtatttgctgtttgtccagttcaggaatttttgttttgttttgtctatatgtgcggcttttcagaagaaatttaatcagtgtgacagaaaaaaaaatgttttatggtagcttttactttttatgaaaaaaaaattatttgccttttaaattcttttcccccatccccctccaaagtcttgatagcaagcgttattttggtggtagaaacggtgaaatctctagcctctttgtgtttttgttgttgttgttgttgttgttttatataatgcatgtattcactaaaataaaatttaaaaaactcctgtcttgctagacaaggttgctgttgtgcagtgtgcctgtcactactggtctgtactccttggatttgcatttttgtattttgtacaaagtaaaaataaactgttatgagtagtaaaaataaagctatttctctgctatttgaaaatacaatagaagaaactga

SEQ ID NO: 180576 - DNA, 2161 bp, Homo sapiens
  Payload ID: 15567
  Gene Symbol: SERPINE2
  Gene Name: serpin peptidase inhibitor, clade E (nexin, plasminogen activator inhibitor type 1), member 2
  Uniprot ID: P07093
  ENST ID: ENST00000409304
  CDS Start-End: 213-1406
ttgcgctgtggggctgcccgggctgcgcggcgtctgcaggcgccaccgctgcctctttccggctgtgaccctcctcgccgccgccgcttggctgcgtcctccgactccccgcgccgccgagaccaggctcccgctccggttgcggccgcaccgccctccgcggccgccccctggggatccagcgagcgcggtcgtccttggtggaaggaaccatgaactggcatctccccctcttcctcttggcctctgtgacgctgccttccatctgctcccacttcaatcctctgtctctcgaggaactaggctccaacacggggatccaggttttcaatcagattgtgaagtcgaggcctcatgacaacatcgtgatctctccccatgggattgcgtcggtcctggggatgcttcagctgggggcggacggcaggaccaagaagcagctcgccatggtgatgagatacggcgtaaatggagttggtaaaatattaaagaagatcaacaaggccatcgtctccaagaagaataaagacattgtgacagtggctaacgccgtgtttgttaagaatgcctctgaaattgaagtgccttttgttacaaggaacaaagatgtgttccagtgtgaggtccggaatgtgaactttgaggatccagcctctgcctgtgattccatcaatgcatgggttaaaaatgaaaccagggatatgattgacaatctgctgtccccagatcttattgatggtgtgctcaccagactggtcctcgtcaacgcagtgtatttcaagggtctgtggaaatcacggttccaacccgagaacacaaagaaacgcactttcgtggcagccgacgggaaatcctatcaagtgccaatgctggcccagctctccgtgttccggtgtgggtcgacaagtgcccccaatgatttatggtacaacttcattgaactgccctaccacggggaaagcatcagcatgctgattgcactgccgactgagagctccactccgctgtctgccatcatcccacacatcagcaccaagaccatagacagctggatgagcatcatggtgcccaagagggtgcaggtgatcctgcccaagttcacagctgtagcacaaacagatttgaaggagccgctgaaagttcttggcattactgacatgtttgattcatcaaaggcaaattttgcaaaaataacaaggtcagaaaacctccatgtttctcatatcttgcaaaaagcaaaaattgaagtcagtgaagatggaaccaaagcttcagcagcaacaactgcaattctcattgcaagatcatcgcctccctggtttatagtagacagaccttttctgtttttcatccgacataatcctacaggtgctgtgttattcatggggcagataaacaaaccctgaagagtatacaaaagaaaccatgcaaagcaacgactactttgctacgaagaaagactcctttcctgcatctttcatagttctgttaaatatttttgtacatcgcttctttttcaaaactagttcttaggaacagactcgatgcaagtgtttctgttctgggaggtattggagggaaaaaacaagcaggatggctggaacactgtactgaggaatgaatagaaaggcttccagatgtctaaaagattctttaaactactgaactgttacctaggttaacaaccctgttgagtatttgctgtttgtccagttcaggaatttttgttttgttttgtctatatgtgcggcttttcagaagaaatttaatcagtgtgacagaaaaaaaaatgttttatggtagcttttactttttatgaaaaaaaaattatttgccttttaaattcttttcccccatccccctccaaagtcttgatagcaagcgttattttggtggtagaaacggtgaaatctctagcctctttgtgtttttgttgttgttgttgttgttgttttatataatgcatgtattcactaaaataaaatttaaaaaactcctgtcttgctagacaaggttgctgttgtgcagtgtgcctgtcactactggtctgtactccttggatttgcatttttgtattttgtacaaagtaaaaataaactgttatgagtagtaaaaataaagctatttctctgctatttgaaaatacaatagaagaaactga

SEQ ID NO: 180577 - DNA, 2569 bp, Homo sapiens
  Payload ID: 15567
  Gene Symbol: SERPINE2
  Gene Name: serpin peptidase inhibitor, clade E (nexin, plasminogen activator inhibitor type 1), member 2
  Uniprot ID: P07093
  ENST ID: ENST00000409840
  CDS Start-End: 662-1855
aatccttggttaggaggaaagggagtggagaggaccgtgctgcctggcgttccccagctgcctttctttctgttttccccccaacggaatctctatgtggtctcctagagcctcgtgcctgcctctcagctagatgctgatatcattcccactcatgtagttgggaaggaagggtgtggcagagataaagggtccacggtcacgcagtatgtggggggtcacacagcctgtatgccaaagtggcacaccctgtgaatatgtagggtcgcacagcctttatgtgtcagtgccagagcctggacccgggtctgtagatgtgtgaaccgtgagctgataccatggatattcaaagatttacatcccatcaatgtttataccttcttgagaagaaatttgtgtcaaagcacactcctcctttcaagactacctcctcgccgtgctgcgtgatagccctagtatcacaaccaaaacacatgatacagaaagaggccagtatctgtgtggcttcaggctcttgtgcgttggccatgaagcaaaggaaggctgttgcatgaaataacctccttctgactccacccttgcatttgtgagatgtaaacagcagtgttaccaagaggtcttccagggaacacgttgcaggtcgtccttggtggaaggaaccatgaactggcatctccccctcttcctcttggcctctgtgacgctgccttccatctgctcccacttcaatcctctgtctctcgaggaactaggctccaacacggggatccaggttttcaatcagattgtgaagtcgaggcctcatgacaacatcgtgatctctccccatgggattgcgtcggtcctggggatgcttcagctgggggcggacggcaggaccaagaagcagctcgccatggtgatgagatacggcgtaaatggagttggtaaaatattaaagaagatcaacaaggccatcgtctccaagaagaataaagacattgtgacagtggctaacgccgtgtttgttaagaatgcctctgaaattgaagtgccttttgttacaaggaacaaagatgtgttccagtgtgaggtccggaatgtgaactttgaggatccagcctctgcctgtgattccatcaatgcatgggttaaaaatgaaaccagggatatgattgacaatctgctgtccccagatcttattgatggtgtgctcaccagactggtcctcgtcaacgcagtgtatttcaagggtctgtggaaatcacggttccaacccgagaacacaaagaaacgcactttcgtggcagccgacgggaaatcctatcaagtgccaatgctggcccagctctccgtgttccggtgtgggtcgacaagtgcccccaatgatttatggtacaacttcattgaactgccctaccacggggaaagcatcagcatgctgattgcactgccgactgagagctccactccgctgtctgccatcatcccacacatcagcaccaagaccatagacagctggatgagcatcatggtgcccaagagggtgcaggtgatcctgcccaagttcacagctgtagcacaaacagatttgaaggagccgctgaaagttcttggcattactgacatgtttgattcatcaaaggcaaattttgcaaaaataacaaggtcagaaaacctccatgtttctcatatcttgcaaaaagcaaaaattgaagtcagtgaagatggaaccaaagcttcagcagcaacaactgcaattctcattgcaagatcatcgcctccctggtttatagtagacagaccttttctgtttttcatccgacataatcctacaggtgctgtgttattcatggggcagataaacaaaccctgaagagtatacaaaagaaaccatgcaaagcaacgactactttgctacgaagaaagactcctttcctgcatctttcatagttctgttaaatatttttgtacatcgcttctttttcaaaactagttcttaggaacagactcgatgcaagtgtttctgttctgggaggtattggagggaaaaaacaagcaggatggctggaacactgtactgaggaatgaatagaaaggcttccagatgtctaaaagattctttaaactactgaactgttacctaggttaacaaccctgttgagtatttgctgtttgtccagttcaggaatttttgttttgttttgtctatatgtgcggcttttcagaagaaatttaatcagtgtgacagaaaaaaaaatgttttatggtagcttttactttttatgaaaaaaaaattatttgccttttaaattcttttcccccatccccctccaaagtcttgatagcaagcgttattttggtggtagaaacggtgaaatctctagcctctttgtgtttttgttgttgttgttgttgttgttttatataatgcatgtattcactaaaataaaatttaaaaaactcctgtcttgctagacaaggttgctgttgtgcagtgtgcctgtcactactggtctgtactccttggatttgcatttttgtattttgtacaaagtaaaaataaactgttatgagtagtaaaaataaa

SEQ ID NO: 180578 - DNA, 581 bp, Homo sapiens
  Payload ID: 15567
  Gene Symbol: SERPINE2
  Gene Name: serpin peptidase inhibitor, clade E (nexin, plasminogen activator inhibitor type 1), member 2
  ENST ID: ENST00000423446
  CDS Start-End: 455-581
atcacagaacaagtgtgccatgacttttcaaacatgcctaattgaactctgtttgcgatttaacttctttttcaaaggtttatagttacctttatttcaaaatttgtcattttaaaatatgtgtttcctccttttcctccactgtatagtaattaagagtgtggaggatttggaggccagcgggctttggtttgaatctagaggctacatattggagggtatgagccaaagccaaatttctaaacatctccaagcccatccgtgagttgggcctaaaggtgtttaggcttaagggccacccctgaagtgttgtgaggatgaagcgaagagtatatcttaggcgctaagcacagtggcaggaatggagctgactttcgggacacgaggtggctgtggttgtggcattgggtaatatttgtcacagaagtacaggtcgtccttggtggaaggaaccatgaactggcatctccccctcttcctcttggcctctgtgacgctgccttccatctgctcccacttcaatcctctgtctctcgaggaactaggctccaacacggggatccaggttttcaatcagattg

SEQ ID NO: 180579 - DNA, 546 bp, Homo sapiens
  Payload ID: 15567
  Gene Symbol: SERPINE2
  Gene Name: serpin peptidase inhibitor, clade E (nexin, plasminogen activator inhibitor type 1), member 2
  ENST ID: ENST00000454956
  CDS Start-End: 287-546
gataaagcccccgccgccgcggcagccagcttgcgctgtggggctgcccgggctgcgcggcgtctgcaggcgccaccgctgcctctttccggctgtgaccctcctcgccgccgccgcttggctgcgtcctccgactccccgcgccgccgagaccaggctcccgctccggttgcggccgcaccgccctccgcggccgccccctggggatccagcgagcgcgggaccatttggatgttgctgccatacttttcagcggctgaaaaggtcgtccttggtggaaggaaccatgaactggcatctccccctcttcctcttggcctctgtgacgctgccttccatctgctcccacttcaatcctctgtctctcgaggaactaggctccaacacggggatccaggttttcaatcagattgtgaagtcgaggcctcatgacaacatcgtgatctctccccatgggattgcgtcggtcctggggatgcttcagctgggggcggacggcaggaccaagaagcagctcgccatggtgatgagatacggcgtaaatgg

SEQ ID NO: 180580 - DNA, 988 bp, Homo sapiens
  Payload ID: 15567
  Gene Symbol: SERPINE2
  Gene Name: serpin peptidase inhibitor, clade E (nexin, plasminogen activator inhibitor type 1), member 2
  ENST ID: ENST00000432738
  CDS Start-End: 162-988
agcccaggttcatctacatcctgttgagaagtttggcagctggaggtggacatgcacacactacactgaacctcctgcaacaagcactgcggaagggaccatttggatgttgctgccatacttttcagcggctgaaaaggtcgtccttggtggaaggaaccatgaactggcatctccccctcttcctcttggcctctgtgacgctgccttccatctgctcccacttcaatcctctgtctctcgaggaactaggctccaacacggggatccaggttttcaatcagattgtgaagtcgaggcctcatgacaacatcgtgatctctccccatgggattgcgtcggtcctggggatgcttcagctgggggcggacggcaggaccaagaagcagctcgccatggtgatgagatacggcgtaaatggagttggtaaaatattaaagaagatcaacaaggccatcgtctccaagaagaataaagacattgtgacagtggctaacgccgtgtttgttaagaatgcctctgaaattgaagtgccttttgttacaaggaacaaagatgtgttccagtgtgaggtccggaatgtgaactttgaggatccagcctctgcctgtgattccatcaatgcatgggttaaaaatgaaaccagggatatgattgacaatctgctgtccccagatcttattgatggtgtgctcaccagactggtcctcgtcaacgcagtgtatttcaagggtctgtggaaatcacggttccaacccgagaacacaaagaaacgcactttcgtggcagccgacgggaaatcctatcaagtgccaatgctggcccagctctccgtgttccggtgtgggtcgacaagtgcccccaatgatttatggtacaacttcattgaactgccctaccacggggaaagcatcagcatgctgattgcactgccgactgagagctccactccgctgtctgccatcatcccacacatcagcaccaagac

SEQ ID NO: 180581 - DNA, 1716 bp, Homo sapiens
  Payload ID: 15567
  Gene Symbol: SERPINE2
  Gene Name: serpin peptidase inhibitor, clade E (nexin, plasminogen activator inhibitor type 1), member 2
  Uniprot ID: P07093
  ENST ID: ENST00000447280
  CDS Start-End: 302-1531
agtgatacccgcagctgggagcaccggggccggcgtggctcctgcccggccatccgagccggccctgaccctgaacctgaggtttccagctgctcgccggcaacccctaccccggacttaggctgcgcgccgccggatggggagagactggcgcactcttacttgttacctctgcctgggcagagggaggtgacgcgcggtgtggggaaagcctttaacttggcctctggcagccgatttaacccgagcgagcaggtctttgctattttcatcatctgtagaaacgggagttgcgaggcggatgagtgactgcaggtcgtccttggtggaaggaaccatgaactggcatctccccctcttcctcttggcctctgtgacgctgccttccatctgctcccacttcaatcctctgtctctcgaggaactaggctccaacacggggatccaggttttcaatcagattgtgaagtcgaggcctcatgacaacatcgtgatctctccccatgggattgcgtcggtcctggggatgcttcagctgggggcggacggcaggaccaagaagcagctcgccatggtgatgagatacggcgtaaatggagttggtaaaatattaaagaagatcaacaaggccatcgtctccaagaagaataaagacattgtgacagtggctaacgccgtgtttgttaagaatgcctctgaaattgaagtgccttttgttacaaggaacaaagatgtgttccagtgtgaggtccggaatgtgaactttgaggatccagcctctgcctgtgattccatcaatgcatgggttaaaaatgaaaccagggatatgattgacaatctgctgtccccagatcttattgatggtgtgctcaccagactggtcctcgtcaacgcagtgtatttcaagggtctgtggaaatcacggttccaacccgagaacacaaagaaacgcactttcgtggcagccgacgggaaatcctatcaagtgccaatgctggcccagctctccgtgttccggtgtgggtcgacaagtgcccccaatgatttatggtacaacttcattgaactgccctaccacggggaaagcatcagcatgctgattgcactgccgactgagagctccactccgctgtctgccatcatcccacacatcagcaccaagaccatagacagctggatgagcatcatggtgcccaagagggtgcaggtgatcctgcccaagttcacagctgtagcacaaacagatttgaaggagccgctgaaagttcttggcattactgacatgtttgattcatcaaaggcaaattttgcaaaaataacaaggtcagaaaacctccatgtttctcatatcttgcaaaaagcaaaaattgaagtcagtgaagatggaaccaaagcttcagcagcaacaactgcaattctcattgcaagatcatcgcctccctggtttatagtagacagaccttttctgtttttcatccgacataatcctacaggtgctgtgttattcatggggcagataaacaaaccctgaagagtatacaaaagaaaccatgcaaagcaacgactactttgctacgaagaaagactcctttcctgcatctttcatagttctgttaaatatttttgtacatcgcttctttttcaaaactagttcttaggaacagactcgatgcaagtgtttctgttctgggaggtattggagggaaaaaacaagca

SEQ ID NO: 180582 - DNA, 356 bp, Homo sapiens
  Payload ID: 15568
  Gene Symbol: SERPINE3
  Gene Name: serpin peptidase inhibitor, clade E (nexin, plasminogen activator inhibitor type 1), member 3
  ENST ID: ENST00000419898
  CDS Start-End: 214-356
gacccacaagaacagagtcgagcaaggaaacgtgcaacagtgatacaaaagtctggctttgctaaagtcacacatccagtaagtggccgaagcagatcttcagacccacagtttggctgccaaaggaccacagtgagtatttctaatgctgaaacaagagggtgcagctctgcagcccagacggctgggcctcagggaaccctcccagcctccatgccgcctttcctgatcaccctcttcctctttcactcttgctgcctccgagcaaatggccacctccgtgaaggaatgacattgctgaagactgagtttgcacttcacctctaccagagtgtggccgcgtgtagaaatgagac

SEQ ID NO: 180583 - DNA, 1439 bp, Homo sapiens
  Payload ID: 15568
  Gene Symbol: SERPINE3
  Gene Name: serpin peptidase inhibitor, clade E (nexin, plasminogen activator inhibitor type 1), member 3
  Uniprot ID: A8MV23
  ENST ID: ENST00000521255
  CDS Start-End: 61-1335
ccagcttccagcctaccctgcatctcttccctctgaattgcaggaaccctcccagcctccatgccgcctttcctgatcaccctcttcctctttcactcttgctgcctccgagcaaatggccacctccgtgaaggaatgacattgctgaagactgagtttgcacttcacctctaccagagtgtggccgcgtgtagaaatgagacgaactttgtcatctctcctgctggtgtgtccctccccctggagatcctgcagtttggagcagaagggagcactggtcagcagctggcagatgccctggggtacactgtccatgacaaaagggtgaaagatttcttgcatgctgtttatgccacactacccacctccagccaaggcaccgagatggagctggcctgcagcctttttgtgcaagtgggaacgccactgtccccctgctttgtggagcacgtctcctggtgggctaacagcagcctggaaccagccgacctcagtgagcccaatagcaccgccatccagactagcgaaggggcctccagagagactgcaggtgggggccccagtgagggccctggtggctggccgtgggagcaagtcagtgcagcatttgctcagcttgtgcttgtgagcaccatgtccttccaaggcacttggcgaaagagattctcctccacagacacacagatcctgcctttcacctgtgcctatggcctcgtccttcaggtccccatgatgcaccaaacgaccgaggtcaactacggtcagttccaggacactgcaggccatcaggtgggggtgctggagcttccttacctgggaagtgcagtgagtctgttcctggtgctgccccgtgacaaagacacccccctgagccacatcgagccacacctcacagccagcaccatccacctctggaccaccagcctgaggagagccaggatggatgtgttcctgcccaggtttaggatccaaaatcaattcaacttaaaaagcattttaaattcttggggagtcaccgatctttttgatccactcaaagctaacttgaaaggaatttcaggccaagatggcttttatgtttctgaagcaatccacaaggccaagattgaagttttggaggaaggcaccaaggcatctggagccacagctctgttgttattgaaaaggtctcggattcctatttttaaagcagatcggccattcatctatttcctgagagaacctaacacaggtattacagtattttttgacaggattcagataatttatcagtgtctctctagcaacaagggctcatttgtccactatcccctcaaaaataagcattctttctagctgtttttatggtgcttcagaagctacccagttgctatcttctatcctaagaaaggggactatttcgtaagtacaaaggaaacttatcctccatgttttttacc

SEQ ID NO: 180584 - DNA, 2293 bp, Homo sapiens
  Payload ID: 15568
  Gene Symbol: SERPINE3
  Gene Name: serpin peptidase inhibitor, clade E (nexin, plasminogen activator inhibitor type 1), member 3
  Uniprot ID: A8MV23
  ENST ID: ENST00000524365
  CDS Start-End: 626-1840
atcagatgcatgcatagcaccacacagctacatcttaaaaaacgtagtgtttactcaaaaacattagggaataacgaaatacataacataaaagcaggaggaggggggaagcattaggtacctggtacccagcaaaagcccaacaagcaaagttatcagtggaattcctcaatgtgacaaagggctggatgaggggttccttgctggtacaaccaggtcacaagcctaagaaggcttgacgggtgtggctggctctccccccacggccctgctctgttcccgatctgggctttgctgccctgggctgggctgcttctcctggctctctgcaggacctccaggctccaggaatttggaccgagtggtagagacatcgccggcagagacggcaatcgccagcttcctctctgtgctgtcttgtgattcaaagcagattctgctccacttttttaaaaggggagcacatgaatgctggagacccacaagaacagagtcgagcaaggaaacgtgcaacagtgatacaaaagtctggctttgctaaagtcacacatccagtaagtggccgaagcagatcttcagacccacagtttggctgccaaaggaccacagaaccctcccagcctccatgccgcctttcctgatcaccctcttcctctttcactcttgctgcctccgagcaaatggccacctccgtgaaggaatgacattgctgaagactgagtttgcacttcacctctaccagagtgtggccgcgtgtagaaatgagacgaactttgtcatctctcctgctggtgtgtccctccccctggagatcctgcagtttggagcagaagggagcactggtcagcagctggcagatgccctggggtacactgtccatgacaaaagggtgaaagatttcttgcatgctgtttatgccacactacccacctccagccaaggcaccgagatggagctggcctgcagcctttttgtgcaagtgggaacgccactgtccccctgctttgtggagcacgtctcctggtgggctaacagcagcctggaaccagccgacctcagtgagcccaatagcaccgccatccagactagcgaaggggcctccagagagactgcaggtgggggccccagtgagggccctggtggctggccgtgggagcaagtcagtgcagcatttgctcagcttgtgcttgtgagcaccatgtccttccaaggcacttggcgaaagagattctcctccacagacacacagatcctgcctttcacctgtgcctatggcctcgtccttcaggtccccatgatgcaccaaacgaccgaggtcaactacggtcagttccaggacactgcaggccatcaggtgggggtgctggagcttccttacctgggaagtgcagtgagtctgttcctggtgctgccccgtgacaaagacacccccctgagccacatcgagccacacctcacagccagcaccatccacctctggaccaccagcctgaggagagccaggatggatgtgttcctgcccaggtttaggatccaaaatcaattcaacttaaaaagcattttaaattcttggggagtcaccgatctttttgatccactcaaagctaacttgaaaggaatttcaggccaagatggcttttatgtttctgaagcaatccacaaggccaagattgaagttttggaggaaggcaccaaggcatctggagccacagctctgttgttattgaaaaggtctcggattcctatttttaaagcagatcggccattcatctatttcctgagagaacctaacacagggtttgtcttcagtattgggagagtttcaaatcccctagactaaatgcatgttctccactttcatcaatgcttttcttcataaagttataatttcattttgctatacccttgaaatttaaaaaaatgtctgataaagtgtaaaaagctaagggtatgtgattttcaatattataaacctaaaaatacttcagtttttaaatgttataagtttattttgcctactcttaatccaaatctattttgaccttcttttctactgcttaccccccaaaccactaaaaggcacagcagtgatcatgaatggtgagtgagtcaggccataagattgcttcctcagtacggatactctaggccatgttgaattgagggtggagaatgaatagcgtggttttccttatcctgtgaaactcaggggggatgcaaaatgagcaaagtcatcttaaaggtgtttcctttccatttagcttataaataaaacagagtttaagtgtgagaa

SEQ ID NO: 180585 - DNA, 1218 bp, Homo sapiens
  Payload ID: 15568
  Gene Symbol: SERPINE3
  Gene Name: serpin peptidase inhibitor, clade E (nexin, plasminogen activator inhibitor type 1), member 3
  Uniprot ID: A8MV23
  ENST ID: ENST00000400389
  CDS Start-End: 4-1218
tccatgccgcctttcctgatcaccctcttcctctttcactcttgctgcctccgagcaaatggccacctccgtgaaggaatgacattgctgaagactgagtttgcacttcacctctaccagagtgtggccgcgtgtagaaatgagacgaactttgtcatctctcctgctggtgtgtccctccccctggagatcctgcagtttggagcagaagggagcactggtcagcagctggcagatgccctggggtacactgtccatgacaaaagggtgaaagatttcttgcatgctgtttatgccacactacccacctccagccaaggcaccgagatggagctggcctgcagcctttttgtgcaagtgggaacgccactgtccccctgctttgtggagcacgtctcctggtgggctaacagcagcctggaaccagccgacctcagtgagcccaatagcaccgccatccagactagcgaaggggcctccagagagactgcaggtgggggccccagtgagggccctggtggctggccgtgggagcaagtcagtgcagcatttgctcagcttgtgcttgtgagcaccatgtccttccaaggcacttggcgaaagagattctcctccacagacacacagatcctgcctttcacctgtgcctatggcctcgtccttcaggtccccatgatgcaccaaacgaccgaggtcaactacggtcagttccaggacactgcaggccatcaggtgggggtgctggagcttccttacctgggaagtgcagtgagtctgttcctggtgctgccccgtgacaaagacacccccctgagccacatcgagccacacctcacagccagcaccatccacctctggaccaccagcctgaggagagccaggatggatgtgttcctgcccaggtttaggatccaaaatcaattcaacttaaaaagcattttaaattcttggggagtcaccgatctttttgatccactcaaagctaacttgaaaggaatttcaggccaagatggcttttatgtttctgaagcaatccacaaggccaagattgaagttttggaggaaggcaccaaggcatctggagccacagctctgttgttattgaaaaggtctcggattcctatttttaaagcagatcggccattcatctatttcctgagagaacctaacacagggtttgtcttcagtattgggagagtttcaaatcccctagactaa

SEQ ID NO: 180586 - DNA, 1548 bp, Homo sapiens
  Payload ID: 15569
  Gene Symbol: SERPINF1
  Gene Name: serpin peptidase inhibitor, clade F (alpha-2 antiplasmin, pigment epithelium derived factor), member 1
  Uniprot ID: P36955
  ENST ID: ENST00000254722
  CDS Start-End: 164-1420
agtgcaggtcgctttaagaaaggagtagctgtaatctgaagcctgctggacgctggattagaaggcagcaaaaaaagctctgtgctggctggagccccctcagtgtgcaggcttagagggactaggctgggtgtggagctgcagcgtatccacaggccccaggatgcaggccctggtgctactcctctgcattggagccctcctcgggcacagcagctgccagaaccctgccagccccccggaggagggctccccagaccccgacagcacaggggcgctggtggaggaggaggatcctttcttcaaagtccccgtgaacaagctggcagcggctgtctccaacttcggctatgacctgtaccgggtgcgatccagcacgagccccacgaccaacgtgctcctgtctcctctcagtgtggccacggccctctcggccctctcgctgggagcggagcagcgaacagaatccatcattcaccgggctctctactatgacttgatcagcagcccagacatccatggtacctataaggagctccttgacacggtcactgccccccagaagaacctcaagagtgcctcccggatcgtctttgagaagaagctgcgcataaaatccagctttgtggcacctctggaaaagtcatatgggaccaggcccagagtcctgacgggcaaccctcgcttggacctgcaagagatcaacaactgggtgcaggcgcagatgaaagggaagctcgccaggtccacaaaggaaattcccgatgagatcagcattctccttctcggtgtggcgcacttcaaggggcagtgggtaacaaagtttgactccagaaagacttccctcgaggatttctacttggatgaagagaggaccgtgagggtccccatgatgtcggaccctaaggctgttttacgctatggcttggattcagatctcagctgcaagattgcccagctgcccttgaccggaagcatgagtatcatcttcttcctgcccctgaaagtgacccagaatttgaccttgatagaggagagcctcacctccgagttcattcatgacatagaccgagaactgaagaccgtgcaggcggtcctcactgtccccaagctgaagctgagttatgaaggcgaagtcaccaagtccctgcaggagatgaagctgcaatccttgtttgattcaccagactttagcaagatcacaggcaaacccatcaagctgactcaggtggaacaccgggctggctttgagtggaacgaggatggggcgggaaccacccccagcccagggctgcagcctgcccacctcaccttcccgctggactatcaccttaaccagcctttcatcttcgtactgagggacacagacacaggggcccttctcttcattggcaagattctggaccccaggggcccctaatatcccagtttaatattccaataccctagaagaaaacccgagggacagcagattccacaggacacgaaggctgcccctgtaaggtttcaatgcatacaataaaagagctttatccctaacttctgtta

SEQ ID NO: 180587 - DNA, 573 bp, Homo sapiens
  Payload ID: 15569
  Gene Symbol: SERPINF1
  Gene Name: serpin peptidase inhibitor, clade F (alpha-2 antiplasmin, pigment epithelium derived factor), member 1
  ENST ID: ENST00000572048
  CDS Start-End: 276-573
gccagcagaagtcctggcaagtcacaggaagatgctggctgggaagtcagggcctgctgagcgctaaaccagaacccgagcctggcaggctctcaaagacgggatgcttgtcgtcgagtctcatacgctaacctctgctccgcctcttctcagagctgcgcataaaatccagctttgtggcacctctggaaaagtcatatgggaccaggcccagagtcctgacgggcaaccctcgcttggacctgcaagagatcaacaactgggtgcaggcgcagatgaaagggaagctcgccaggtccacaaaggaaattcccgatgagatcagcattctccttctcggtgtggcgcacttcaaggggcagtgggtaacaaagtttgactccagaaagacttccctcgaggatttctacttggatgaagagaggaccgtgagggtccccatgatgtcggaccctaaggctgttttacgctatggcttggattcagatctcagctgcaagattgcccagctgcccttgaccggaagcatgagtatcatcttcttcctgcccctgaaagtgacccagaatttga

SEQ ID NO: 180588 - DNA, 789 bp, Homo sapiens
  Payload ID: 15569
  Gene Symbol: SERPINF1
  Gene Name: serpin peptidase inhibitor, clade F (alpha-2 antiplasmin, pigment epithelium derived factor), member 1
  ENST ID: ENST00000573770
  CDS Start-End: 55-399
ggcttagagggactaggctgggtgtggagctgcagcgtatccacaggccccaggatgcaggccctggtgctactcctctgcattggagccctcctcgggcacagcagctgccagaaccctgccagccccccggaggagggctccccagaccccgacagcacaggggcgctggtggaggaggaggatcctttcttcaaagtccccgtgaacaagctggcagcggctgtctccaacttcggctatgacctgtaccgggtgcgatccagcacgagccccacgaccaacgtgctcctgtctcctctcagtgtggccacggccctctcggccctctcgctgggcctgatgcctttaacctacttcaggaaaatctctaaggatgaaaattccttggccacctagattgtcttgaagatcagcctacttgggctctcagcagacaaaaaagatgagtatagtgtctgtgttctgggagggggcttgatttggggccctggtgtgcagttatcaacgtccacatccttgtctctggcaggagcggagcagcgaacagaatccatcattcaccgggctctctactatgacttgatcagcagcccagacatccatggtacctataaggagctccttgacacggtcactgccccccagaagaacctcaagagtgcctcccggatcgtctttgagaagaagctgcgcataaaatccagctttgtggcacctctggaaaagtcatatgggaccaggcccagagtcctgacgggcaaccctcgcttggacctgcaagagatc

SEQ ID NO: 180589 - DNA, 459 bp, Homo sapiens
  Payload ID: 15569
  Gene Symbol: SERPINF1
  Gene Name: serpin peptidase inhibitor, clade F (alpha-2 antiplasmin, pigment epithelium derived factor), member 1
  ENST ID: ENST00000570731
  CDS Start-End: 64-459
gacaagggccgtccgagatgaaccctttctgctgcctgccaagccactgggaggggccccaggatgcaggccctggtgctactcctctgcattggagccctcctcgggcacagcagctgccagaaccctgccagccccccggaggagggctccccagaccccgacagcacaggggcgctggtggaggaggaggatcctttcttcaaagtccccgtgaacaagctggcagcggctgtctccaacttcggctatgacctgtaccgggtgcgatccagcacgagccccacgaccaacgtgctcctgtctcctctcagtgtggccacggccctctcggccctctcgctgggagcggagcagcgaacagaatccatcattcaccgggctctctactatgacttgatcagcagcccagacatccatggtacctataaggagctccttgacacggtcactgccccc

SEQ ID NO: 180590 - DNA, 731 bp, Homo sapiens
  Payload ID: 15569
  Gene Symbol: SERPINF1
  Gene Name: serpin peptidase inhibitor, clade F (alpha-2 antiplasmin, pigment epithelium derived factor), member 1
  ENST ID: ENST00000577053
  CDS Start-End: 397-731
ggccaggtgtaatggctcacacctataaccctagcactttgggaggctgaagcaggtggatagcctgaggtcaggagtttgagacaagcctgatgaacgtggtgaaaccccatcgctattaaaatacaaaaaattagccgggcatggtggcaggtgcctgtaattccagctacttgggaggctgaggcgggagaatcgcttgaacccaggaggcggaggttgcagtgagccaagatcgctccactgtactccagcctgggcgacagagccagactctgtttcaaaaaataaaatataaataaataaataaataaataaataaataaaagctttaggcttaaaggagggtcccctgacgcagacagtggaacaaaagcacaagcttatggccccaggatgcaggccctggtgctactcctctgcattggagccctcctcgggcacagcagctgccagaaccctgccagccccccggaggagggctccccagaccccgacagcacaggggcgctggtggaggaggaggatcctttcttcaaagtccccgtgaacaagctggcagcggctgtctccaacttcggctatgacctgtaccgggtgcgatccagcacgagccccacgaccaacgtgctcctgtctcctctcagtgtggccacggccctctcggccctctcgctgggagcggagcagcgaacagaatccatcattcaccgggctctctactatgactt

SEQ ID NO: 180591 - DNA, 431 bp, Homo sapiens
  Payload ID: 15569
  Gene Symbol: SERPINF1
  Gene Name: serpin peptidase inhibitor, clade F (alpha-2 antiplasmin, pigment epithelium derived factor), member 1
  ENST ID: ENST00000571149
  CDS Start-End: 171-431
aggtaaagcagctccctggctgctctgatgccagggacggcgggagaggctcccctgggctggggggacaggggagaggcaggggcactccagggagcagaaaagaggggtgcaagggagaggaaatgcggagacagcagcccctgcaatttgggcaaaagggccccaggatgcaggccctggtgctactcctctgcattggagccctcctcgggcacagcagctgccagaaccctgccagccccccggaggagggctccccagaccccgacagcacaggggcgctggtggaggaggaggatcctttcttcaaagtccccgtgaacaagctggcagcggctgtctccaacttcggctatgacctgtaccgggtgcgatccagcacgagccccacgaccaacgtgctcctgtctcctctcagtgtggccacg

SEQ ID NO: 180592 - DNA, 795 bp, Homo sapiens
  Payload ID: 15569
  Gene Symbol: SERPINF1
  Gene Name: serpin peptidase inhibitor, clade F (alpha-2 antiplasmin, pigment epithelium derived factor), member 1
  ENST ID: ENST00000576406
  CDS Start-End: 524-795
ggcttagagggactaggctgggtgtggagctgcagcgtatccacagggctccccagaccccgacagcacaggggcgctggtggaggaggaggatcctttcttcaaagtccccgtgaacaagctggcagcggctgtctccaacttcggctatgacctgtaccgggtgcgatccagcacgagccccacgaccaacgtgctcctgtctcctctcagtgtggccacggccctctcggccctctcgctgggagcggagcagcgaacagaatccatcattcaccgggctctctactatgacttgatcagcagcccagacatccatggtacctataaggagctccttgacacggtcactgccccccagaagaacctcaagagtgcctcccggatcgtctttgagaagaagctgcgcataaaatccagctttgtggcacctctggaaaagtcatatgggaccaggcccagagtcctgacgggcaaccctcgcttggacctgcaagagatcaacaactgggtgcaggcgcagatgaaagggaagctcgccaggtccacaaaggaaattcccgatgagatcagcattctccttctcggtgtggcgcacttcaaggggcagtgggtaacaaagtttgactccagaaagacttccctcgaggatttctacttggatgaagagaggaccgtgagggtccccatgatgtcggaccctaaggctgttttacgctatggcttggattcagatctcagctgcaagattgcccagctgcccttgaccggaagcatgagtatcatcttcttcct

SEQ ID NO: 180593 - DNA, 729 bp, Homo sapiens
  Payload ID: 15569
  Gene Symbol: SERPINF1
  Gene Name: serpin peptidase inhibitor, clade F (alpha-2 antiplasmin, pigment epithelium derived factor), member 1
  ENST ID: ENST00000573763
  CDS Start-End: 316-729
gccagcagaagtcctggcaagtcacaggaagatgctggctgggaagtcagggcctgctgagcgctaaaccagaacccgagcctggcaggctctcaaagacgggatgcttgtcgtcgagtctcatacgctaacctctgctccgcctcttctcagagctgcgcataaaatccagctttgtggcacctctggaaaagtcatatgggaccaggcccagagtcctgacgggcaaccctcgcttggacctgcaagagatcaacaactgggtgcaggcgcagatgaaagggaagctcgccaggtccacaaaggaaattcccgatgagatcagcattctccttctcggtgtggcgcacttcaaggtgggtaacaaagtttgactccagaaagacttccctcgaggatttctacttggatgaagagaggaccgtgagggtccccatgatgtcggaccctaaggctgttttacgctatggcttggattcagatctcagctgcaagattgcccagctgcccttgaccggaagcatgagtatcatcttcttcctgcccctgaaagtgacccagaatttgaccttgatagaggagagcctcacctccgagttcattcatgacatagaccgagaactgaagaccgtgcaggcggtcctcactgtccccaagctgaagctgagttatgaaggcgaagtcaccaagtccctgcaggagatgaagctgcaatccttgtttgattca

SEQ ID NO: 180594 - DNA, 478 bp, Homo sapiens
  Payload ID: 15569
  Gene Symbol: SERPINF1
  Gene Name: serpin peptidase inhibitor, clade F (alpha-2 antiplasmin, pigment epithelium derived factor), member 1
  ENST ID: ENST00000571360
  CDS Start-End: 94-478
aaaaaagctctgtgctggctggagccccctcagtgtgcaggcttagagggactaggctgggtgtggagctgcagcgtatccacaggccccaggatgcaggccctggtgctactcctctgcattggagccctcctcgggcacagcagctgccagaaccctgccagccccccggaggaggaggaggatcctttcttcaaagtccccgtgaacaagctggcagcggctgtctccaacttcggctatgacctgtaccgggtgcgatccagcacgagccccacgaccaacgtgctcctgtctcctctcagtgtggccacggccctctcggccctctcgctgggagcggagcagcgaacagaatccatcattcaccgggctctctactatgacttgatcagcagcccagacatccatggtacctataaggagctccttgacacggtcactgccccccagaagaacctcaagagtgcctcccgga

SEQ ID NO: 180595 - DNA, 480 bp, Homo sapiens
  Payload ID: 15569
  Gene Symbol: SERPINF1
  Gene Name: serpin peptidase inhibitor, clade F (alpha-2 antiplasmin, pigment epithelium derived factor), member 1
  ENST ID: ENST00000632188
  CDS Start-End: 397-480
ggccaggtgtaatggctcacacctataaccctagcactttgggaggctgaagcaggtggatagcctgaggtcaggagtttgagacaagcctgatgaacgtggtgaaaccccatcgctattaaaatacaaaaaattagccgggcatggtggcaggtgcctgtaattccagctacttgggaggctgaggcgggagaatcgcttgaacccaggaggcggaggttgcagtgagccaagatcgctccactgtactccagcctgggcgacagagccagactctgtttcaaaaaataaaatataaataaataaataaataaataaataaataaaagctttaggcttaaaggagggtcccctgacgcagacagtggaacaaaagcacaagcttatggccccaggatgcaggccctggtgctactcctctgcattggagccctcctcgggcacagcagctgccagaaccctgccagccccccggaggag

SEQ ID NO: 180596 - DNA, 247 bp, Homo sapiens
  Payload ID: 15569
  Gene Symbol: SERPINF1
  Gene Name: serpin peptidase inhibitor, clade F (alpha-2 antiplasmin, pigment epithelium derived factor), member 1
  ENST ID: ENST00000633761
  CDS Start-End: 164-247
agtgcaggtcgctttaagaaaggagtagctgtaatctgaagcctgctggacgctggattagaaggcagcaaaaaaagctctgtgctggctggagccccctcagtgtgcaggcttagagggactaggctgggtgtggagctgcagcgtatccacaggccccaggatgcaggccctggtgctactcctctgcattggagccctcctcgggcacagcagctgccagaaccctgccagccccccggaggag

SEQ ID NO: 180597 - DNA, 254 bp, Homo sapiens
  Payload ID: 15569
  Gene Symbol: SERPINF1
  Gene Name: serpin peptidase inhibitor, clade F (alpha-2 antiplasmin, pigment epithelium derived factor), member 1
  ENST ID: ENST00000632258
  CDS Start-End: 126-254
aggtaaagcagctccctggctgctctgatgccagggacggcgggagaggctcccctgggctggggggacaggggagaggcaggggcactccagggagcagaaaagaggggtgcaagggagaggaaatgcggagacagcagcccctgcaatttgggcaaaagggccccaggatgcaggccctggtgctactcctctgcattggagccctcctcgggcacagcagctgccagaaccctgccagccccccggaggag

SEQ ID NO: 180598 - DNA, 147 bp, Homo sapiens
  Payload ID: 15569
  Gene Symbol: SERPINF1
  Gene Name: serpin peptidase inhibitor, clade F (alpha-2 antiplasmin, pigment epithelium derived factor), member 1
  ENST ID: ENST00000632001
  CDS Start-End: 64-147
gacaagggccgtccgagatgaaccctttctgctgcctgccaagccactgggaggggccccaggatgcaggccctggtgctactcctctgcattggagccctcctcgggcacagcagctgccagaaccctgccagccccccggaggag

SEQ ID NO: 180599 - DNA, 2284 bp, Homo sapiens
  Payload ID: 15570
  Gene Symbol: SERPINF2
  Gene Name: serpin peptidase inhibitor, clade F (alpha-2 antiplasmin, pigment epithelium derived factor), member 2
  Uniprot ID: P08697
  ENST ID: ENST00000324015
  CDS Start-End: 78-1553
cctgggcagagagtgaggagcacccaagtggggccagaggaacgttgtgtgtggcagcaaggagcccgcagaggaacatggcgctgctctgggggctcctggtgctcagctggtcctgcctgcaaggcccctgctccgtgttctcccctgtgagcgccatggagcccttgggccggcagctaactagcgggccgaaccaggagcaggtgtccccacttaccctcctcaagttgggcaaccaggagcctggtggccagactgccctgaagagtcccccaggagtctgcagcagagaccccaccccagagcagacccacaggctggcccgggccatgatggccttcactgccgacctgttctccctggtggctcaaacgtccacctgccccaacctcatcctgtcacccctgagtgtggccctggcgctgtctcacctggcactaggtgctcagaaccacacgttgcagaggctgcaacaggtgctgcacgcaggctcagggccctgcctcccccatctgctgagccgcctctgccaggacctgggccccggcgcgttccgactggctgccaggatgtacctgcagaaaggatttcccatcaaagaagatttcctggaacaatccgaacagctatttggggcaaagcccgtgagcctgacgggaaagcaggaagatgacctggcaaacatcaaccaatgggtgaaggaggccacggaggggaagattcaggaattcctctctgggctgccggaagacaccgtgttgcttctcctcaacgccatccacttccagggtttctggaggaacaagtttgacccgagccttacccagagagactccttccacctggacgagcagttcacggtgcccgtggaaatgatgcaggcccgcacgtacccgctgcgctggttcttgctggagcagcctgagatccaggtggctcatttcccctttaagaacaacatgagctttgtggtccttgtacccacccactttgaatggaacgtgtcccaggtactggccaacctgagttgggacaccctgcacccacctctggtgtgggagaggcccaccaaggtccggctgcctaagctgtatctgaaacaccaaatggacctggtggccaccctcagccagctgggcctgcaggagttgttccaggccccagacctgcgtgggatctccgagcagagcctggtggtgtccggcgtgcagcatcagtccaccctggagctcagcgaggtcggcgtggaggcggcggcggccaccagcattgccatgtcccgcatgtccctgtcctccttcagcgtgaaccgccccttcctcttcttcatcttcgaggacaccacaggccttcccctcttcgtgggcagcgtgaggaaccccaaccccagtgcaccgcgggagctcaaggaacagcaggattccccgggcaacaaggacttcctccagagcctgaaaggcttcccccgcggagacaagcttttcggccctgacttaaaacttgtgccccccatggaggaggattacccccagtttggcagccccaagtgaggggccgtggctgtggcatccagagtccctgcctggaccagcctctccactcatgtgactctttccaaccggctttgtggcactggggcaggggccgggggcagtctgagagaggccattctttcccaacacctcttggggagtttagggtggggggggggcgcggctgggaggagggcaggcatcggggagccgggagcctgaccctcatctttcttccaaacaggctcagagggtgtcctgcaccggggcctgggcaggagggaggtgcttctagttctgccaggagacaggttagctgctccccacgtcagctgggacaccccgacttttgtttaccagagaaaaagggagggggagagggctgcctttggacttgtcccgggacacctaggctagggtggggagagacgggccctggtggtggctcgggaggcgaagcgttgtcctcagccccgcgtggaactcgtgtctggcacagcctggctgtggcctaacctgccgagagtccatcagcctccatcctaccccctgtgccttgtcacgccagacttcccacggctcctcgagatcccaacactgccagcatttcccttccttcctctcctgtctccctcctctgcccgggagctcaggaaccgaggcagggaaggatcccatgagctccttaaggctcttttgtaaggtttttgtagtgatttttatgccacctgaataaagaatgaatgggc

SEQ ID NO: 180600 - DNA, 2265 bp, Homo sapiens
  Payload ID: 15570
  Gene Symbol: SERPINF2
  Gene Name: serpin peptidase inhibitor, clade F (alpha-2 antiplasmin, pigment epithelium derived factor), member 2
  Uniprot ID: P08697
  ENST ID: ENST00000382061
  CDS Start-End: 56-1531
gggacttgaaaaactggagcctgttcttggcaagaagattctaatgcccaggaacatggcgctgctctgggggctcctggtgctcagctggtcctgcctgcaaggcccctgctccgtgttctcccctgtgagcgccatggagcccttgggccggcagctaactagcgggccgaaccaggagcaggtgtccccacttaccctcctcaagttgggcaaccaggagcctggtggccagactgccctgaagagtcccccaggagtctgcagcagagaccccaccccagagcagacccacaggctggcccgggccatgatggccttcactgccgacctgttctccctggtggctcaaacgtccacctgccccaacctcatcctgtcacccctgagtgtggccctggcgctgtctcacctggcactaggtgctcagaaccacacgttgcagaggctgcaacaggtgctgcacgcaggctcagggccctgcctcccccatctgctgagccgcctctgccaggacctgggccccggcgcgttccgactggctgccaggatgtacctgcagaaaggatttcccatcaaagaagatttcctggaacaatccgaacagctatttggggcaaagcccgtgagcctgacgggaaagcaggaagatgacctggcaaacatcaaccaatgggtgaaggaggccacggaggggaagattcaggaattcctctctgggctgccggaagacaccgtgttgcttctcctcaacgccatccacttccagggtttctggaggaacaagtttgacccgagccttacccagagagactccttccacctggacgagcagttcacggtgcccgtggaaatgatgcaggcccgcacgtacccgctgcgctggttcttgctggagcagcctgagatccaggtggctcatttcccctttaagaacaacatgagctttgtggtccttgtacccacccactttgaatggaacgtgtcccaggtactggccaacctgagttgggacaccctgcacccacctctggtgtgggagaggcccaccaaggtccggctgcctaagctgtatctgaaacaccaaatggacctggtggccaccctcagccagctgggcctgcaggagttgttccaggccccagacctgcgtgggatctccgagcagagcctggtggtgtccggcgtgcagcatcagtccaccctggagctcagcgaggtcggcgtggaggcggcggcggccaccagcattgccatgtcccgcatgtccctgtcctccttcagcgtgaaccgccccttcctcttcttcatcttcgaggacaccacaggccttcccctcttcgtgggcagcgtgaggaaccccaaccccagtgcaccgcgggagctcaaggaacagcaggattccccgggcaacaaggacttcctccagagcctgaaaggcttcccccgcggagacaagcttttcggccctgacttaaaacttgtgccccccatggaggaggattacccccagtttggcagccccaagtgaggggccgtggctgtggcatccagagtccctgcctggaccagcctctccactcatgtgactctttccaaccggctttgtggcactggggcaggggccgggggcagtctgagagaggccattctttcccaacacctcttggggagtttagggtggggggggggcgcggctgggaggagggcaggcatcggggagccgggagcctgaccctcatctttcttccaaacaggctcagagggtgtcctgcaccggggcctgggcaggagggaggtgcttctagttctgccaggagacaggttagctgctccccacgtcagctgggacaccccgacttttgtttaccagagaaaaagggagggggagagggctgcctttggacttgtcccgggacacctaggctagggtggggagagacgggccctggtggtggctcgggaggcgaagcgttgtcctcagccccgcgtggaactcgtgtctggcacagcctggctgtggcctaacctgccgagagtccatcagcctccatcctaccccctgtgccttgtcacgccagacttcccacggctcctcgagatcccaacactgccagcatttcccttccttcctctcctgtctccctcctctgcccgggagctcaggaaccgaggcagggaaggatcccatgagctccttaaggctcttttgtaaggtttttgtagtgatttttatgccacctgaataaagaatgaatgggcctg

SEQ ID NO: 180601 - DNA, 838 bp, Homo sapiens
  Payload ID: 15570
  Gene Symbol: SERPINF2
  Gene Name: serpin peptidase inhibitor, clade F (alpha-2 antiplasmin, pigment epithelium derived factor), member 2
  ENST ID: ENST00000453723
  CDS Start-End: 45-838
ccagaggaacgttgtgtgtggcagcaaggagcccgcagaggaacatggcgctgctctgggggctcctggtgctcagctggtcctgcctgcaaggcccctgctccgtgttctcccctgtgagcgccatggagcccttgggccggcagctaactagcgggccgaaccaggagcaggtgtccccacttaccctcctcaagttgggcaaccaggagcctggtggccagactgccctgaagagtcccccaggagtctgcagcagagaccccaccccagagcagacccacaggctggcccgggccatgatggccttcactgccgacctgttctccctggtggctcaaacgtccacctgccccaacctcatcctgtcacccctgagtgtggccctggcgctgtctcacctggcactaggtttctggaggaacaagtttgacccgagccttacccagagagactccttccacctggacgagcagttcacggtgcccgtggaaatgatgcaggcccgcacgtacccgctgcgctggttcttgctggagcagcctgagatccaggtggctcatttcccctttaagaacaacatgagctttgtggtccttgtacccacccactttgaatggaacgtgtcccaggtactggccaacctgagttgggacaccctgcacccacctctggtgtgggagaggcccaccaaggtccggctgcctaagctgtatctgaaacaccaaatggacctggtggccaccctcagccagctgggcctgcaggagttgttccaggccccagacctgcgtgggatctccgagcagagcctggtggtgtccggcgtgcagcatca

SEQ ID NO: 180602 - DNA, 842 bp, Homo sapiens
  Payload ID: 15570
  Gene Symbol: SERPINF2
  Gene Name: serpin peptidase inhibitor, clade F (alpha-2 antiplasmin, pigment epithelium derived factor), member 2
  ENST ID: ENST00000453066
  CDS Start-End: 78-842
cctgggcagagagtgaggagcacccaagtggggccagaggaacgttgtgtgtggcagcaaggagcccgcagaggaacatggcgctgctctgggggctcctggtgctcagctggtcctgcctgcaaggcccctgctccgtgttctcccctgtgagcgccatggagcccttgggccggcagctaactagcgggccgaaccaggagcaggtgtccccacttaccctcctcaagttgggcaaccaggagcctggtggccagactgccctgaagagtcccccaggagtctgcagcagagaccccaccccagagcagacccacaggctggcccgggccatgatggccttcactgccgacctgttctccctggtggctcaaacgtccacctgccccaacctcatcctgtcacccctgagtgtggccctggcgctgtctcacctggcactaggtgctcagaaccacacgttgcagaggctgcaacaggtgctgcacgcaggctcagggccctgcctcccccatctgctgagccgcctctgccaggacctgggccccggcgcgttccgactggctgccaggatgtacctgcagaaaggatttcccatcaaagaagatttcctggaacaatccgaacagctatttggggcaaagcccgtgagcctgacgggaaagcaggaagatgacctggcaaacatcaaccaatgggtgaaggaggccacggaggggaagattcaggaattcctctctgggctgccggaagacaccgtgttgcttctcctcaacgccatccacttccagggtttctggaggaacaagtttgacccgagccttacccagagagactccttc

SEQ ID NO: 180603 - DNA, 1462 bp, Homo sapiens
  Payload ID: 15570
  Gene Symbol: SERPINF2
  Gene Name: serpin peptidase inhibitor, clade F (alpha-2 antiplasmin, pigment epithelium derived factor), member 2
  Uniprot ID: P08697
  ENST ID: ENST00000450523
  CDS Start-End: 71-1354
agagagtgaggagcacccaagtggggccagaggaacgttgtgtgtggcagcaaggagcccgcagaggaacatggcgctgctctgggggctcctggtgctcagctggtcctgcctgcaaggcccctgctccgtgttctcccctgtgagcgccatggagcccttgggccggcagctaactagcgggccgaaccaggagcaggtgtccccacttaccctcctcaagttgggcaaccaggtacaaccaggtgctcagaaccacacgttgcagaggctgcaacaggtgctgcacgcaggctcagggccctgcctcccccatctgctgagccgcctctgccaggacctgggccccggcgcgttccgactggctgccaggatgtacctgcagaaaggatttcccatcaaagaagatttcctggaacaatccgaacagctatttggggcaaagcccgtgagcctgacgggaaagcaggaagatgacctggcaaacatcaaccaatgggtgaaggaggccacggaggggaagattcaggaattcctctctgggctgccggaagacaccgtgttgcttctcctcaacgccatccacttccagggtttctggaggaacaagtttgacccgagccttacccagagagactccttccacctggacgagcagttcacggtgcccgtggaaatgatgcaggcccgcacgtacccgctgcgctggttcttgctggagcagcctgagatccaggtggctcatttcccctttaagaacaacatgagctttgtggtccttgtacccacccactttgaatggaacgtgtcccaggtactggccaacctgagttgggacaccctgcacccacctctggtgtgggagaggcccaccaaggtccggctgcctaagctgtatctgaaacaccaaatggacctggtggccaccctcagccagctgggcctgcaggagttgttccaggccccagacctgcgtgggatctccgagcagagcctggtggtgtccggcgtgcagcatcagtccaccctggagctcagcgaggtcggcgtggaggcggcggcggccaccagcattgccatgtcccgcatgtccctgtcctccttcagcgtgaaccgccccttcctcttcttcatcttcgaggacaccacaggccttcccctcttcgtgggcagcgtgaggaaccccaaccccagtgcaccgcgggagctcaaggaacagcaggattccccgggcaacaaggacttcctccagagcctgaaaggcttcccccgcggagacaagcttttcggccctgacttaaaacttgtgccccccatggaggaggattacccccagtttggcagccccaagtgaggggccgtggctgtggcatccagagtccctgcctggaccagcctctccactcatgtgactctttccaaccggctttgtggcactggggcaggggccgggggcagtctg

SEQ ID NO: 180604 - DNA, 2284 bp, Homo sapiens
  Payload ID: 15570
  Gene Symbol: SERPINF2
  Gene Name: serpin peptidase inhibitor, clade F (alpha-2 antiplasmin, pigment epithelium derived factor), member 2
  Uniprot ID: P08697
  ENST ID: ENST00000618883
  CDS Start-End: 78-1553
cctgggcagagagtgaggagcacccaagtggggccagaggaacgttgtgtgtggcagcaaggagcccgcagaggaacatggcgctgctctgggggctcctggtgctcagctggtcctgcctgcaaggcccctgctccgtgttctcccctgtgagcgccatggagcccttgggctggcagctaactagcgggccgaaccaggagcaggtgtccccacttaccctcctcaagttgggcaaccaggagcctggtggccagactgccctgaagagtcccccaggagtctgcagcagagaccccaccccagagcagacccacaggctggcccgggccatgatggccttcactgccgacctgttctccctggtggctcaaacgtccacctgccccaacctcatcctgtcacccctgagtgtggccctggcgctgtctcacctggcactaggtgctcagaaccacacgttgcagaggctgcaacaggtgctgcacgcaggctcagggccctgcctcccccatctgctgagccgcctctgccaggacctgggccccggcgcgttccgactggctgccaggatgtacctgcagaaaggatttcccatcaaagaagatttcctggaacaatccgaacagctatttggggcaaagcccgtgagcctgacgggaaagcaggaagatgacctggcaaacatcaaccaatgggtgaaggaggccacggaggggaagattcaggaattcctctctgggctgccggaagacaccgtgttgcttctcctcaacgccatccacttccagggtttctggaggaacaagtttgacccgagccttacccagagagactccttccacctggacgagcagttcacggtgcccgtggaaatgatgcaggcccgcacgtacccgctgcgctggttcttgctggagcagcctgagatccaggtggctcatttcccctttaagaacaacatgagctttgtggtccttgtacccacccactttgaatggaacgtgtcccaggtactggccaacctgagttgggacaccctgcacccacctctggtgtgggagaggcccaccaaggtccggctgcctaagctgtatctgaaacaccaaatggacctggtggccaccctcagccagctgggcctgcaggagttgttccaggccccagacctgcgtgggatctccgagcagagcctggtggtgtccggcgtgcagcatcagtccaccctggagctcagcgaggtcggcgtggaggcggcggcggccaccagcattgccatgtcccgcatgtccctgtcctccttcagcgtgaaccgccccttcctcttcttcatcttcgaggacaccacaggccttcccctcttcgtgggcagcgtgaggaaccccaaccccagtgcaccgcgggagctcaaggaacagcaggattccccgggcaacaaggacttcctccagagcctgaaaggcttcccccgcggagacaagcttttcggccctgacttaaaacttgtgccccccatggaggaggattacccccagtttggcagccccaagtgaggggccgtggctgtggcatccagagtccctgcctggaccagcctctccactcatgtgactctttccaaccggctttgtggcactggggcaggggccgggggcagtctgagagaggccattctttcccaacacctcttggggagtttagggtggggggggggcgcggctgggaggagggcaggcatcggggagccgggagcctgaccctcatctttcttccaaacaggctcagagggtgtcctgcaccggggcctgggcaggagggaggtgcttctagttctgccaggagacaggttagctgctccccacgtcagctgggacaccccgacttttgtttaccagagaaaaagggagggggagagggctgcctttggacttgtcccgggacacctaggctagggtggggagagacgggccctggtggtggctcgggaggcgaagcgttgtcctcagccccgcgtggaactcgtgtctggcacagcctggctgtggcctaacctgccgagagtccatcagcctccatcctaccccctgtgccttgtcacgccagacttcccacggctcctcgagatcccaacactgccagcatttcccttccttcctctcctgtctccctcctctgcccgggagctcaggaaccgaggcagggaaggatcccatgagctccttaaggctcttttgtaaggtttttgtagtgatttttatgccacctgaataaagaatgaatgggc

SEQ ID NO: 180605 - DNA, 2265 bp, Homo sapiens
  Payload ID: 15570
  Gene Symbol: SERPINF2
  Gene Name: serpin peptidase inhibitor, clade F (alpha-2 antiplasmin, pigment epithelium derived factor), member 2
  Uniprot ID: P08697
  ENST ID: ENST00000622842
  CDS Start-End: 56-1531
gggacttgaaaaactggagcctgttcttggcaagaagattctaatgcccaggaacatggcgctgctctgggggctcctggtgctcagctggtcctgcctgcaaggcccctgctccgtgttctcccctgtgagcgccatggagcccttgggctggcagctaactagcgggccgaaccaggagcaggtgtccccacttaccctcctcaagttgggcaaccaggagcctggtggccagactgccctgaagagtcccccaggagtctgcagcagagaccccaccccagagcagacccacaggctggcccgggccatgatggccttcactgccgacctgttctccctggtggctcaaacgtccacctgccccaacctcatcctgtcacccctgagtgtggccctggcgctgtctcacctggcactaggtgctcagaaccacacgttgcagaggctgcaacaggtgctgcacgcaggctcagggccctgcctcccccatctgctgagccgcctctgccaggacctgggccccggcgcgttccgactggctgccaggatgtacctgcagaaaggatttcccatcaaagaagatttcctggaacaatccgaacagctatttggggcaaagcccgtgagcctgacgggaaagcaggaagatgacctggcaaacatcaaccaatgggtgaaggaggccacggaggggaagattcaggaattcctctctgggctgccggaagacaccgtgttgcttctcctcaacgccatccacttccagggtttctggaggaacaagtttgacccgagccttacccagagagactccttccacctggacgagcagttcacggtgcccgtggaaatgatgcaggcccgcacgtacccgctgcgctggttcttgctggagcagcctgagatccaggtggctcatttcccctttaagaacaacatgagctttgtggtccttgtacccacccactttgaatggaacgtgtcccaggtactggccaacctgagttgggacaccctgcacccacctctggtgtgggagaggcccaccaaggtccggctgcctaagctgtatctgaaacaccaaatggacctggtggccaccctcagccagctgggcctgcaggagttgttccaggccccagacctgcgtgggatctccgagcagagcctggtggtgtccggcgtgcagcatcagtccaccctggagctcagcgaggtcggcgtggaggcggcggcggccaccagcattgccatgtcccgcatgtccctgtcctccttcagcgtgaaccgccccttcctcttcttcatcttcgaggacaccacaggccttcccctcttcgtgggcagcgtgaggaaccccaaccccagtgcaccgcgggagctcaaggaacagcaggattccccgggcaacaaggacttcctccagagcctgaaaggcttcccccgcggagacaagcttttcggccctgacttaaaacttgtgccccccatggaggaggattacccccagtttggcagccccaagtgaggggccgtggctgtggcatccagagtccctgcctggaccagcctctccactcatgtgactctttccaaccggctttgtggcactggggcaggggccgggggcagtctgagagaggccattctttcccaacacctcttggggagtttagggtggggggggggcgcggctgggaggagggcaggcatcggggagccgggagcctgaccctcatctttcttccaaacaggctcagagggtgtcctgcaccggggcctgggcaggagggaggtgcttctagttctgccaggagacaggttagctgctccccacgtcagctgggacaccccgacttttgtttaccagagaaaaagggagggggagagggctgcctttggacttgtcccgggacacctaggctagggtggggagagacgggccctggtggtggctcgggaggcgaagcgttgtcctcagccccgcgtggaactcgtgtctggcacagcctggctgtggcctaacctgccgagagtccatcagcctccatcctaccccctgtgccttgtcacgccagacttcccacggctcctcgagatcccaacactgccagcatttcccttccttcctctcctgtctccctcctctgcccgggagctcaggaaccgaggcagggaaggatcccatgagctccttaaggctcttttgtaaggtttttgtagtgatttttatgccacctgaataaagaatgaatgggcctg

SEQ ID NO: 180606 - DNA, 1462 bp, Homo sapiens
  Payload ID: 15570
  Gene Symbol: SERPINF2
  Gene Name: serpin peptidase inhibitor, clade F (alpha-2 antiplasmin, pigment epithelium derived factor), member 2
  ENST ID: ENST00000615103
  CDS Start-End: 71-1354
agagagtgaggagcacccaagtggggccagaggaacgttgtgtgtggcagcaaggagcccgcagaggaacatggcgctgctctgggggctcctggtgctcagctggtcctgcctgcaaggcccctgctccgtgttctcccctgtgagcgccatggagcccttgggctggcagctaactagcgggccgaaccaggagcaggtgtccccacttaccctcctcaagttgggcaaccaggtacaaccaggtgctcagaaccacacgttgcagaggctgcaacaggtgctgcacgcaggctcagggccctgcctcccccatctgctgagccgcctctgccaggacctgggccccggcgcgttccgactggctgccaggatgtacctgcagaaaggatttcccatcaaagaagatttcctggaacaatccgaacagctatttggggcaaagcccgtgagcctgacgggaaagcaggaagatgacctggcaaacatcaaccaatgggtgaaggaggccacggaggggaagattcaggaattcctctctgggctgccggaagacaccgtgttgcttctcctcaacgccatccacttccagggtttctggaggaacaagtttgacccgagccttacccagagagactccttccacctggacgagcagttcacggtgcccgtggaaatgatgcaggcccgcacgtacccgctgcgctggttcttgctggagcagcctgagatccaggtggctcatttcccctttaagaacaacatgagctttgtggtccttgtacccacccactttgaatggaacgtgtcccaggtactggccaacctgagttgggacaccctgcacccacctctggtgtgggagaggcccaccaaggtccggctgcctaagctgtatctgaaacaccaaatggacctggtggccaccctcagccagctgggcctgcaggagttgttccaggccccagacctgcgtgggatctccgagcagagcctggtggtgtccggcgtgcagcatcagtccaccctggagctcagcgaggtcggcgtggaggcggcggcggccaccagcattgccatgtcccgcatgtccctgtcctccttcagcgtgaaccgccccttcctcttcttcatcttcgaggacaccacaggccttcccctcttcgtgggcagcgtgaggaaccccaaccccagtgcaccgcgggagctcaaggaacagcaggattccccgggcaacaaggacttcctccagagcctgaaaggcttcccccgcggagacaagcttttcggccctgacttaaaacttgtgccccccatggaggaggattacccccagtttggcagccccaagtgaggggccgtggctgtggcatccagagtccctgcctggaccagcctctccactcatgtgactctttccaaccggctttgtggcactggggcaggggccgggggcagtctg

SEQ ID NO: 180607 - DNA, 838 bp, Homo sapiens
  Payload ID: 15570
  Gene Symbol: SERPINF2
  Gene Name: serpin peptidase inhibitor, clade F (alpha-2 antiplasmin, pigment epithelium derived factor), member 2
  ENST ID: ENST00000631718
  CDS Start-End: 45-838
ccagaggaacgttgtgtgtggcagcaaggagcccgcagaggaacatggcgctgctctgggggctcctggtgctcagctggtcctgcctgcaaggcccctgctccgtgttctcccctgtgagcgccatggagcccttgggctggcagctaactagcgggccgaaccaggagcaggtgtccccacttaccctcctcaagttgggcaaccaggagcctggtggccagactgccctgaagagtcccccaggagtctgcagcagagaccccaccccagagcagacccacaggctggcccgggccatgatggccttcactgccgacctgttctccctggtggctcaaacgtccacctgccccaacctcatcctgtcacccctgagtgtggccctggcgctgtctcacctggcactaggtttctggaggaacaagtttgacccgagccttacccagagagactccttccacctggacgagcagttcacggtgcccgtggaaatgatgcaggcccgcacgtacccgctgcgctggttcttgctggagcagcctgagatccaggtggctcatttcccctttaagaacaacatgagctttgtggtccttgtacccacccactttgaatggaacgtgtcccaggtactggccaacctgagttgggacaccctgcacccacctctggtgtgggagaggcccaccaaggtccggctgcctaagctgtatctgaaacaccaaatggacctggtggccaccctcagccagctgggcctgcaggagttgttccaggccccagacctgcgtgggatctccgagcagagcctggtggtgtccggcgtgcagcatca

SEQ ID NO: 180608 - DNA, 842 bp, Homo sapiens
  Payload ID: 15570
  Gene Symbol: SERPINF2
  Gene Name: serpin peptidase inhibitor, clade F (alpha-2 antiplasmin, pigment epithelium derived factor), member 2
  ENST ID: ENST00000632520
  CDS Start-End: 78-842
cctgggcagagagtgaggagcacccaagtggggccagaggaacgttgtgtgtggcagcaaggagcccgcagaggaacatggcgctgctctgggggctcctggtgctcagctggtcctgcctgcaaggcccctgctccgtgttctcccctgtgagcgccatggagcccttgggctggcagctaactagcgggccgaaccaggagcaggtgtccccacttaccctcctcaagttgggcaaccaggagcctggtggccagactgccctgaagagtcccccaggagtctgcagcagagaccccaccccagagcagacccacaggctggcccgggccatgatggccttcactgccgacctgttctccctggtggctcaaacgtccacctgccccaacctcatcctgtcacccctgagtgtggccctggcgctgtctcacctggcactaggtgctcagaaccacacgttgcagaggctgcaacaggtgctgcacgcaggctcagggccctgcctcccccatctgctgagccgcctctgccaggacctgggccccggcgcgttccgactggctgccaggatgtacctgcagaaaggatttcccatcaaagaagatttcctggaacaatccgaacagctatttggggcaaagcccgtgagcctgacgggaaagcaggaagatgacctggcaaacatcaaccaatgggtgaaggaggccacggaggggaagattcaggaattcctctctgggctgccggaagacaccgtgttgcttctcctcaacgccatccacttccagggtttctggaggaacaagtttgacccgagccttacccagagagactccttc

SEQ ID NO: 180609 - DNA, 2002 bp, Homo sapiens
  Payload ID: 15571
  Gene Symbol: SERPING1
  Gene Name: serpin peptidase inhibitor, clade G (C1 inhibitor), member 1
  Uniprot ID: P05155
  ENST ID: ENST00000278407
  CDS Start-End: 228-1730
aagaagaccaagcggtcagtcccattccgtcccatcctgatttacaggaactcacaccagcgatcaatcttccttaatttgtaactgggcagtgtcccgggccagccaatagctaagactgccccccccgcaccccaccctccctgaccctgggggactctctactcagtctgcactggagctgcctggtgaccagaagtttggagtccgctgacgtcgccgcccagatggcctccaggctgaccctgctgaccctcctgctgctgctgctggctggggatagagcctcctcaaatccaaatgctaccagctccagctcccaggatccagagagtttgcaagacagaggcgaagggaaggtcgcaacaacagttatctccaagatgctattcgttgaacccatcctggaggtttccagcttgccgacaaccaactcaacaaccaattcagccaccaaaataacagctaataccactgatgaacccaccacacaacccaccacagagcccaccacccaacccaccatccaacccacccaaccaactacccagctcccaacagattctcctacccagcccactactgggtccttctgcccaggacctgttactctctgctctgacttggagagtcattcaacagaggccgtgttgggggatgctttggtagatttctccctgaagctctaccacgccttctcagcaatgaagaaggtggagaccaacatggccttttccccattcagcatcgccagcctccttacccaggtcctgctcggggctggggagaacaccaaaacaaacctggagagcatcctctcttaccccaaggacttcacctgtgtccaccaggccctgaagggcttcacgaccaaaggtgtcacctcagtctctcagatcttccacagcccagacctggccataagggacacctttgtgaatgcctctcggaccctgtacagcagcagccccagagtcctaagcaacaacagtgacgccaacttggagctcatcaacacctgggtggccaagaacaccaacaacaagatcagccggctgctagacagtctgccctccgatacccgccttgtcctcctcaatgctatctacctgagtgccaagtggaagacaacatttgatcccaagaaaaccagaatggaaccctttcacttcaaaaactcagttataaaagtgcccatgatgaatagcaagaagtaccctgtggcccatttcattgaccaaactttgaaagccaaggtggggcagctgcagctctcccacaatctgagtttggtgatcctggtaccccagaacctgaaacatcgtcttgaagacatggaacaggctctcagcccttctgttttcaaggccatcatggagaaactggagatgtccaagttccagcccactctcctaacactaccccgcatcaaagtgacgaccagccaggatatgctctcaatcatggagaaattggaattcttcgatttttcttatgaccttaacctgtgtgggctgacagaggacccagatcttcaggtttctgcgatgcagcaccagacagtgctggaactgacagagactggggtggaggcggctgcagcctccgccatctctgtggcccgcaccctgctggtctttgaagtgcagcagcccttcctcttcgtgctctgggaccagcagcacaagttccctgtcttcatggggcgagtatatgaccccagggcctgagacctgcaggatcaggttagggcgagcgctacctctccagcctcagctctcagttgcagccctgctgctgcctgcctggacttggcccctgccacctcctgcctcaggtgtccgctatccaccaaaagggctccctgagggtctgggcaagggacctgcttctattagcccttctccatggccctgccatgctctccaaaccactttttgcagctttctctagttcaagttcaccagactctataaataaaacctgacagaccatgactttc

SEQ ID NO: 180610 - DNA, 1719 bp, Homo sapiens
  Payload ID: 15571
  Gene Symbol: SERPING1
  Gene Name: serpin peptidase inhibitor, clade G (C1 inhibitor), member 1
  ENST ID: ENST00000340687
  CDS Start-End: 63-1454
tcagtctgcactggagctgcctggtgaccagaagtttggagtccgctgacgtcgccgcccagatggcctccaggctgaccctgctgaccctcctgctgctgctgctggctggggatagagcctcctcaaatccaaatgctaccagctccagctcccaggatccagagagtttgcaagacagaggcgaagggaaggtcgcaacaacagttatctccaagatgctattcgttgaacccatcctggaggtttccagcttgccgacaaccaactcaacaaccaattcagccaccaaaataacagctaataccactgatgaacccaccacacaacccaccacagagcccaccacccaacccaccatccaacccacccaaccaactacccagctcccaacagattctcctacccagcccactactgggtccttctgcccaggacctgttactctctgctctgacttggagagtcattcaacagaggccgtgttgggggatgctttggtagatttctccctgaagctctaccacgccttctcagcaatgaagaaggtggagaccaacatggccttttccccattcagcatcgccagcctccttacccaggtcctgctcggggctggggagaacaccaaaacaaacctggagagcatcctctcttaccccaaggacttcacctgtgtccaccaggccctgaagggcttcacgaccaaaggtgtcacctcagtctctcagatcttccacagcccagacctggccataagggacacctttgtgaatgcctctcggaccctgtacagcagcagccccagagtcctaagcaacaacagtgacgccaacttggagctcatcaacacctgggtggccaagaacaccaacaacaagatcagccggctgctagacagtctgccctccgatacccgccttgtcctcctcaatgctatctacctgagtgccaagtggaagacaacatttgatcccaagaaaaccagaatggaaccctttcacttcaaaaactcagttataaaagtgcccatgatgaatagcaagaagtaccctgtggcccatttcattgaccaaactttgaaagccaaggccatcatggagaaactggagatgtccaagttccagcccactctcctaacactaccccgcatcaaagtgacgaccagccaggatatgctctcaatcatggagaaattggaattcttcgatttttcttatgaccttaacctgtgtgggctgacagaggacccagatcttcaggtttctgcgatgcagcaccagacagtgctggaactgacagagactggggtggaggcggctgcagcctccgccatctctgtggcccgcaccctgctggtctttgaagtgcagcagcccttcctcttcgtgctctgggaccagcagcacaagttccctgtcttcatggggcgagtatatgaccccagggcctgagacctgcaggatcaggttagggcgagcgctacctctccagcctcagctctcagttgcagccctgctgctgcctgcctggacttggcccctgccacctcctgcctcaggtgtccgctatccaccaaaagggctccctgagggtctgggcaagggacctgcttctattagcccttctccatggccctgccatgctctccaaaccactttttgcagctttctctagttcaagttcaccagactctataaataaaacctgacagaccat

SEQ ID NO: 180611 - DNA, 1733 bp, Homo sapiens
  Payload ID: 15571
  Gene Symbol: SERPING1
  Gene Name: serpin peptidase inhibitor, clade G (C1 inhibitor), member 1
  Uniprot ID: P05155
  ENST ID: ENST00000378323
  CDS Start-End: 58-1575
ctgcactggagctgcctggtgaccagaagtttggagtccgctgacgtcgccgcccagatggcctccaggctgaccctgctgaccctcctgctgctgctgctggctgggtttcttgaaccacaggatagagcctcctcaaatccaaatgctaccagctccagctcccaggatccagagagtttgcaagacagaggcgaagggaaggtcgcaacaacagttatctccaagatgctattcgttgaacccatcctggaggtttccagcttgccgacaaccaactcaacaaccaattcagccaccaaaataacagctaataccactgatgaacccaccacacaacccaccacagagcccaccacccaacccaccatccaacccacccaaccaactacccagctcccaacagattctcctacccagcccactactgggtccttctgcccaggacctgttactctctgctctgacttggagagtcattcaacagaggccgtgttgggggatgctttggtagatttctccctgaagctctaccacgccttctcagcaatgaagaaggtggagaccaacatggccttttccccattcagcatcgccagcctccttacccaggtcctgctcggggctggggagaacaccaaaacaaacctggagagcatcctctcttaccccaaggacttcacctgtgtccaccaggccctgaagggcttcacgaccaaaggtgtcacctcagtctctcagatcttccacagcccagacctggccataagggacacctttgtgaatgcctctcggaccctgtacagcagcagccccagagtcctaagcaacaacagtgacgccaacttggagctcatcaacacctgggtggccaagaacaccaacaacaagatcagccggctgctagacagtctgccctccgatacccgccttgtcctcctcaatgctatctacctgagtgccaagtggaagacaacatttgatcccaagaaaaccagaatggaaccctttcacttcaaaaactcagttataaaagtgcccatgatgaatagcaagaagtaccctgtggcccatttcattgaccaaactttgaaagccaaggtggggcagctgcagctctcccacaatctgagtttggtgatcctggtaccccagaacctgaaacatcgtcttgaagacatggaacaggctctcagcccttctgttttcaaggccatcatggagaaactggagatgtccaagttccagcccactctcctaacactaccccgcatcaaagtgacgaccagccaggatatgctctcaatcatggagaaattggaattcttcgatttttcttatgaccttaacctgtgtgggctgacagaggacccagatcttcaggtttctgcgatgcagcaccagacagtgctggaactgacagagactggggtggaggcggctgcagcctccgccatctctgtggcccgcaccctgctggtctttgaagtgcagcagcccttcctcttcgtgctctgggaccagcagcacaagttccctgtcttcatggggcgagtatatgaccccagggcctgagacctgcaggatcaggttagggcgagcgctacctctccagcctcagctctcagttgcagccctgctgctgcctgcctggacttggcccctgccacctcctgcctcaggtgtccgctatccaccaaaagggctccctgagggtctgggcaagggacctg

SEQ ID NO: 180612 - DNA, 1751 bp, Homo sapiens
  Payload ID: 15571
  Gene Symbol: SERPING1
  Gene Name: serpin peptidase inhibitor, clade G (C1 inhibitor), member 1
  Uniprot ID: P05155
  ENST ID: ENST00000378324
  CDS Start-End: 139-1485
gcactggagctgcctggtgaccagaagtttggagatagagcctcctcaaatccaaatgctaccagctccagctcccaggatccagagagtttgcaagacagaggcgaagggaaggtcgcaacaacagttatctccaagatgctattcgttgaacccatcctggaggtttccagcttgccgacaaccaactcaacaaccaattcagccaccaaaataacagctaataccactgatgaacccaccacacaacccaccacagagcccaccacccaacccaccatccaacccacccaaccaactacccagctcccaacagattctcctacccagcccactactgggtccttctgcccaggacctgttactctctgctctgacttggagagtcattcaacagaggccgtgttgggggatgctttggtagatttctccctgaagctctaccacgccttctcagcaatgaagaaggtggagaccaacatggccttttccccattcagcatcgccagcctccttacccaggtcctgctcggggctggggagaacaccaaaacaaacctggagagcatcctctcttaccccaaggacttcacctgtgtccaccaggccctgaagggcttcacgaccaaaggtgtcacctcagtctctcagatcttccacagcccagacctggccataagggacacctttgtgaatgcctctcggaccctgtacagcagcagccccagagtcctaagcaacaacagtgacgccaacttggagctcatcaacacctgggtggccaagaacaccaacaacaagatcagccggctgctagacagtctgccctccgatacccgccttgtcctcctcaatgctatctacctgagtgccaagtggaagacaacatttgatcccaagaaaaccagaatggaaccctttcacttcaaaaactcagttataaaagtgcccatgatgaatagcaagaagtaccctgtggcccatttcattgaccaaactttgaaagccaaggtggggcagctgcagctctcccacaatctgagtttggtgatcctggtaccccagaacctgaaacatcgtcttgaagacatggaacaggctctcagcccttctgttttcaaggccatcatggagaaactggagatgtccaagttccagcccactctcctaacactaccccgcatcaaagtgacgaccagccaggatatgctctcaatcatggagaaattggaattcttcgatttttcttatgaccttaacctgtgtgggctgacagaggacccagatcttcaggtttctgcgatgcagcaccagacagtgctggaactgacagagactggggtggaggcggctgcagcctccgccatctctgtggcccgcaccctgctggtctttgaagtgcagcagcccttcctcttcgtgctctgggaccagcagcacaagttccctgtcttcatggggcgagtatatgaccccagggcctgagacctgcaggatcaggttagggcgagcgctacctctccagcctcagctctcagttgcagccctgctgctgcctgcctggacttggcccctgccacctcctgcctcaggtgtccgctatccaccaaaagggctccctgagggtctgggcaagggacctgcttctattagcccttctccatggccctgccatgctctccaaaccactttttgcagctttctctagttcaagttcaccagactctataaataaaacctgacagaccatg

SEQ ID NO: 180613 - DNA, 2231 bp, Homo sapiens
  Payload ID: 15571
  Gene Symbol: SERPING1
  Gene Name: serpin peptidase inhibitor, clade G (C1 inhibitor), member 1
  ENST ID: ENST00000403558
  CDS Start-End: 367-1998
cccgccttcctgcccgccttgatctcgggggtctctataggcttgcttccacctgggacttctgcctcctcctaccccagcccctcccgcctcaggcctgttgtgctcagccccccaggacctcccctcccccacgcctctggcctcattgtttggttaaagcaggaccccctccccctcccaccacctcccctccgactgaacagatggacagagacccgggcccacggggagaggaagggccagccggtgccgggaaagggaagcggtttggggaaaacaaaacagagggaggagccagggagaaggtggccccaggagggaggaggagggaattcgctaagagggactggggcctgagacggaatgggggcgggccccgggcggggtgggggcccctgggctcccagggtgggagctggctccgaggctggctggctccgcaggtccgctgacgtcgccgcccagatggcctccaggctgaccctgctgaccctcctgctgctgctgctggctggggatagagcctcctcaaatccaaatgctaccagctccagctcccaggatccagagagtttgcaagacagaggcgaagggaaggtcgcaacaacagttatctccaagatgctattcgttgaacccatcctggaggtttccagcttgccgacaaccaactcaacaaccaattcagccaccaaaataacagctaataccactgatgaacccaccacacaacccaccacagagcccaccacccaacccaccatccaacccacccaaccaactacccagctcccaacagattctcctacccagcccactactgggtccttctgcccaggacctgttactctctgctctgacttggagagtcattcaacagaggccgtgttgggggatgctttggtagatttctccctgaagctctaccacgccttctcagcaatgaagaaggtggagaccaacatggccttttccccattcagcatcgccagcctccttacccaggtcctgctcggggctggggagaacaccaaaacaaacctggagagcatcctctcttaccccaaggacttcacctgtgtccaccaggccctgaagggcttcacgaccaaaggtgtcacctcagtctctcagatcttccacagcccagacctggccataagggacacctttgtgaatgcctctcggaccctgtacagcagcagccccagagtcctaagcaacaacagtgacgccaacttggagctcatcaacacctgggtggccaagaacaccaacaacaagatcagccggctgctagacagtctgccctccgatacccgccttgtcctcctcaatgctatctacctgagtgagcaaccctcccacctcttccctctagccaagtggaagacaacatttgatcccaagaaaaccagaatggaaccctttcacttcaaaaactcagttataaaagtgcccatgatgaatagcaagaagtaccctgtggcccatttcattgaccaaactttgaaagccaaggtggggcagctgcagctctcccacaatctgagtttggtgatcctggtaccccagaacctgaaacatcgtcttgaagacatggaacaggctctcagcccttctgttttcaaggccatcatggagaaactggagatgtccaagttccagcccactctcctaacactaccccgcatcaaagtgacgaccagccaggatatgctctcaatcatggagaaattggaattcttcgatttttcttatgaccttaacctgtgtgggctgacagaggacccagatcttcaggtttctgcgatgcagcaccagacagtgctggaactgacagagactggggtggaggcggctgcagcctccgccatctctgtggcccgcaccctgctggtctttgaagtgcagcagcccttcctcttcgtgctctgggaccagcagcacaagttccctgtcttcatggggcgagtatatgaccccagggcctgagacctgcaggatcaggttagggcgagcgctacctctccagcctcagctctcagttgcagccctgctgctgcctgcctggacttggcccctgccacctcctgcctcaggtgtccgctatccaccaaaagggctccctgagggtctgggcaagggacctgcttctattagcccttctccatggccctgccatgctctccaaaccactttttgcagctttctctagttcaagttca

SEQ ID NO: 180614 - DNA, 648 bp, Homo sapiens
  Payload ID: 15571
  Gene Symbol: SERPING1
  Gene Name: serpin peptidase inhibitor, clade G (C1 inhibitor), member 1
  ENST ID: ENST00000405496
  CDS Start-End: 168-648
atgctgtttttattgttactcatgaagacgcgggggaagctttggttgtgtaaagctgagaactgcacccaagcttccccgttcaccccacctaccaggggatttgggctaaattcctggcctggcccacaaagaagaccaagcggtccgctgacgtcgccgcccagatggcctccaggctgaccctgctgaccctcctgctgctgctgctggctggggatagagcctcctcaaatccaaatgctaccagctccagctcccaggatccagagagtttgcaagacagaggcgaagggaaggtcgcaacaacagttatctccaagatgctattcgttgaacccatcctggaggtttccagcttgccgacaaccaactcaacaaccaattcagccaccaaaataacagctaataccactgatgaacccaccacacaacccaccacagagcccaccacccaacccaccatccaacccacccaaccaactacccagctcccaacagattctcctacccagcccactactgggtccttctgcccaggacctgttactctctgctctgacttggagagtcattcaacagaggccgtgttgggggatgctttggtagatttctccctgaagctctaccacgccttctcagcaatga

SEQ ID NO: 180615 - DNA, 569 bp, Homo sapiens
  Payload ID: 15571
  Gene Symbol: SERPING1
  Gene Name: serpin peptidase inhibitor, clade G (C1 inhibitor), member 1
  ENST ID: ENST00000457869
  CDS Start-End: 203-569
actcagtctgcactggagctgcctggtgaccagaagtttggaatggacagagacccgggcccacggggagaggaagggccagccggtgccgggaaagggaagcggtttggggaaaacaaaacagagggaggagccagggagaaggtggccccaggagggaggaggagggaattcgctaagagggactggggcctgagacggaatgggggcgggccccgggcggggtgggggcccctgggctcccagggtgggagctggctccgaggctggctggctccgcaggtccgctgacgtcgccgcccagatggcctccaggctgaccctgctgaccctcctgctgctgctgctggctggggatagagcctcctcaaatccaaatgctaccagctccagctcccaggatccagagagtttgcaagacagaggcgaagggaaggtcgcaacaacagttatctccaagatgctattcgttgaacccatcctggaggtttccagcttgccgacaaccaactcaacaaccaattcagccaccaaaataacagctaataccactgatgaacccaccacac

SEQ ID NO: 180616 - DNA, 956 bp, Homo sapiens
  Payload ID: 15571
  Gene Symbol: SERPING1
  Gene Name: serpin peptidase inhibitor, clade G (C1 inhibitor), member 1
  ENST ID: ENST00000528996
  CDS Start-End: 1-261
gccaagtggaagacaacatttgatcccaagaaaaccagaatggaaccctttcacttcaaaaactcagttataaaagtgcccatgatgaatagcaagaagtaccctgtggcccatttcattgaccaaactttgaaagccaagccttggccaaggcagacattgtatattttaggctggaaacaggattctcaagtttcttcatgcatctctactatattgaatggcaaaatgtggggcagctgcagctctcccacaatctgagtttggtgatcctggtaccccagaacctgaaacatcgtcttgaagacatggaacaggctctcagcccttctgttttcaaggccatcatggagaaactggagatgtccaagttccagcccactctcctaacactaccccgcatcaaagtgacgaccagccaggatatgctctcaatcatggagaaattggaattcttcgatttttcttatgaccttaacctgtgtgggctgacagaggacccagatcttcaggtttctgcgatgcagcaccagacagtgctggaactgacagagactggggtggaggcggctgcagcctccgccatctctgtggcccgcaccctgctggtctttgaagtgcagcagcccttcctcttcgtgctctgggaccagcagcacaagttccctgtcttcatggggcgagtatatgaccccagggcctgagacctgcaggatcaggttagggcgagcgctacctctccagcctcagctctcagttgcagccctgctgctgcctgcctggacttggcccctgccacctcctgcctcaggtgtccgctatccaccaaaagggctccctgagggtctgggcaagggacctgcttctattagcccttctccatggccctgccatgctctccaaaccactttttgcagctttctctagttcaagttcaccagactctataaataaaa

SEQ ID NO: 180617 - DNA, 907 bp, Homo sapiens
  Payload ID: 15571
  Gene Symbol: SERPING1
  Gene Name: serpin peptidase inhibitor, clade G (C1 inhibitor), member 1
  ENST ID: ENST00000531797
  CDS Start-End: 39-170
ctggctggctccgcaggtccgctgacgtcgccgcccagatggcctccaggctgaccctgctgaccctcctgctgctgctgctggctggggggctggggagaacaccaaaacaaacctggagagcatcctctcttaccccaaggacttcacctgtgtccaccaggccctgaagggcttcacgaccaaaggtgtcacctcagtctctcagatcttccacagcccaggtggggcagctgcagctctcccacaatctgagtttggtgatcctggtaccccagaacctgaaacatcgtcttgaagacatggaacaggctctcagcccttctgttttcaaggccatcatggagaaactggagatgtccaagttccagcccactctcctaacactaccccgcatcaaagtgacgaccagccaggatatgctctcaatcatggagaaattggaattcttcgatttttcttatgaccttaacctgtgtgggctgacagaggacccagatcttcaggtttctgcgatgcagcaccagacagtgctggaactgacagagactggggtggaggcggctgcagcctccgccatctctgtggcccgcaccctgctggtctttgaagtgcagcagcccttcctcttcgtgctctgggaccagcagcacaagttccctgtcttcatggggcgagtatatgaccccagggcctgagacctgcaggatcaggttagggcgagcgctacctctccagcctcagctctcagttgcagccctgctgctgcctgcctggacttggcccctgccacctcctgcctcaggtgtccgctatccaccaaaagggctccctgagggtctgggcaagggacctgcttctattagcccttctccatggccctgccatgctctccaaaccacttttt

SEQ ID NO: 180618 - DNA, 1004 bp, Homo sapiens
  Payload ID: 15571
  Gene Symbol: SERPING1
  Gene Name: serpin peptidase inhibitor, clade G (C1 inhibitor), member 1
  ENST ID: ENST00000531133
  CDS Start-End: 1-132
atggcctccaggctgaccctgctgaccctcctgctgctgctgctggctggggggctggggagaacaccaaaacaaacctggagagcatcctctcttaccccaaggacttcacctgtgtccaccaggccctgaagggcttcacgaccaaaggtgtcacctcagtctctcagatcttccacagcccagacctggccataagggacacctttgtgaatgcctctcggaccctgtacagcagcagccccagagtcctaagcaacaacagtgacgccaacttggagctcatcaacacctgggtggccaagaacaccaacaacaagatcagccggctgctagacagtctgccctccgatacccgccttgtcctcctcaatgctatctacctgagtgccaagtggaagacaacatttgatcccaagaaaaccagaatggaaccctttcacttcaaaaactcagttataaaagtgcccatgatgaatagcaagaagtaccctgtggcccatttcattgaccaaactttgaaagccaaggtggggcagctgcagctctcccacaatctgagtttggtgatcctggtaccccagaacctgaaacatcgtcttgaagacatggaacaggctctcagcccttctgttttcaaggccatcatggagaaactggagatgtccaagttccagcccactctcctaacactaccccgcatcaaagtgacgaccagccaggatatgctctcaatcatggagaaattggaattcttcgatttttcttatgaccttaacctgtgtgggctgacagaggacccagatcttcaggtttctgcgatgcagcaccagacagtgctggaactgacagagactggggtggaggcggctgcagcctccgccatctctgtggcccgcaccctgctggtctttgaagtgcagcagcccttcctcttcgtgctctgggaccagcagcacaagttccctgtcttcatggggcgagtatatgaccccagggcctga

SEQ ID NO: 180619 - DNA, 634 bp, Homo sapiens
  Payload ID: 15571
  Gene Symbol: SERPING1
  Gene Name: serpin peptidase inhibitor, clade G (C1 inhibitor), member 1
  ENST ID: ENST00000619430
  CDS Start-End: 1-402
atggcctccaggctgaccctgctgaccctcctgctgctgctgctggctggggatagagcctcctcaaatccaaatgctaccagctccagctcccaggatccagagagtttgcaagacagaggcgaagggaaggtcgcaacaacagttatctccaagatgctattcgttgaacccatcctggaggtttccagcttgccgacaaccaactcaacaaccaattcagccaccaaaataacagctaataccactgatgaacccaccacacaacccaccacagagcccaccacccaacccaccatccaacccacccaaccaactacccagctcccaacagattctcctacccagccaggatatgctctcaatcatggagaaattggaattcttcgatttttcttatgaccttaacctgtgtgggctgacagaggacccagatcttcaggtttctgcgatgcagcaccagacagtgctggaactgacagagactggggtggaggcggctgcagcctccgccatctctgtggcccgcaccctgctggtctttgaagtgcagcagcccttcctcttcgtgctctgggaccagcagcacaagttccctgtcttcatggggcgagtatatgaccccagggcctga

SEQ ID NO: 180620 - DNA, 2225 bp, Homo sapiens
  Payload ID: 15572
  Gene Symbol: SERPINH1
  Gene Name: serpin peptidase inhibitor, clade H (heat shock protein 47), member 1, (collagen binding protein 1)
  Uniprot ID: P50454
  ENST ID: ENST00000358171
  CDS Start-End: 269-1525
agagggaggggccgggggccggggaggttttgagggaggtctttggctttttttggcggagctggggcgccctccggaagcgtttccaactttccagaagtttctcgggacgggcaggagggggtggggactgccatatatagatcccgggagcaggggagcgggctaagagtagaatcgtgtcgcggctcgagagcgagagtcacgtcccggcgctagcccagcccgacccaggcccaccgtggtgcacgcaaaccacttcctggccatgcgctccctcctgcttctcagcgccttctgcctcctggaggcggccctggccgccgaggtgaagaaacctgcagccgcagcagctcctggcactgcggagaagttgagccccaaggcggccacgcttgccgagcgcagcgccggcctggccttcagcttgtaccaggccatggccaaggaccaggcagtggagaacatcctggtgtcacccgtggtggtggcctcgtcgctagggctcgtgtcgctgggcggcaaggcgaccacggcgtcgcaggccaaggcagtgctgagcgccgagcagctgcgcgacgaggaggtgcacgccggcctgggcgagctgctgcgctcactcagcaactccacggcgcgcaacgtgacctggaagctgggcagccgactgtacggacccagctcagtgagcttcgctgatgacttcgtgcgcagcagcaagcagcactacaactgcgagcactccaagatcaacttccgcgacaagcgcagcgcgctgcagtccatcaacgagtgggccgcgcagaccaccgacggcaagctgcccgaggtcaccaaggacgtggagcgcacggacggcgccctgctagtcaacgccatgttcttcaagccacactgggatgagaaattccaccacaagatggtggacaaccgtggcttcatggtgactcggtcctataccgtgggtgtcatgatgatgcaccggacaggcctctacaactactacgacgacgagaaggaaaagctgcaaatcgtggagatgcccctggcccacaagctctccagcctcatcatcctcatgccccatcacgtggagcctctcgagcgccttgaaaagctgctaaccaaagagcagctgaagatctggatggggaagatgcagaagaaggctgttgccatctccttgcccaagggtgtggtggaggtgacccatgacctgcagaaacacctggctgggctgggcctgactgaggccattgacaagaacaaggccgacttgtcacgcatgtcaggcaagaaggacctgtacctggccagcgtgttccacgccaccgcctttgagttggacacagatggcaacccctttgaccaggacatctacgggcgcgaggagctgcgcagccccaagctgttctacgccgaccaccccttcatcttcctagtgcgggacacccaaagcggctccctgctattcattgggcgcctggtccggcctaagggtgacaagatgcgagacgagttatagggcctcagggtgcacacaggatggcaggaggcatccaaaggctcctgagacacatgggtgctattggggttgggggggaggtgaggtaccagccttggatactccatggggtgggggtggaaaaacagaccggggttcccgtgtgcctgagcggaccttcccagctagaattcactccacttggacatgggccccagataccatgatgctgagcccggaaactccacatcctgtgggacctgggccatagtcattctgcctgccctgaaagtcccagatcaagcctgcctcaatcagtattcatatttatagccaggtaccttctcacctgtgagaccaaattgagctaggggggtcagccagccctcttctgacactaaaacacctcagctgcctccccagctctatcccaacctctcccaactataaaactaggtgctgcagcccctgggaccaggcacccccagaatgacctggccgcagtgaggcggattgagaaggagctcccaggaggggcttctgggcagactctggtcaagaagcatcgtgtctggcgttgtggggatgaactttttgttttgtttcttccttttttagttcttcaaagatagggagggaagggggaacatgagcctttgttgctatcaatccaagaacttatttgtacattttttttttcaataaaacttttccaatgaca

SEQ ID NO: 180621 - DNA, 474 bp, Homo sapiens
  Payload ID: 15572
  Gene Symbol: SERPINH1
  Gene Name: serpin peptidase inhibitor, clade H (heat shock protein 47), member 1, (collagen binding protein 1)
  ENST ID: ENST00000526242
  CDS Start-End: 218-474
tttggcggagctggggcgccctccggaagcgtttccaactttccagaagtttctcgggacgggcaggagggggtggggactgccatatatagatcccgggagcaggggagcgggctaagagtagaatcgtgtcgcggctcgagagcgagagtcacgtcccggcgctagcccagcccgacccaggcccaccgtggtgcacgcaaaccacttcctggccatgcgctccctcctgcttctcagcgccttctgcctcctggaggcggccacgcttgccgagcgcagcgccggcctggccttcagcttgtaccaggccatggccaaggaccaggcagtggagaacatcctggtgtcacccgtggtggtggcctcgtcgctagggctcgtgtcgctgggcggcaaggcgaccacggcgtcgcaggccaaggcagtgctgagcgccgagcagctgcgcgacgaggaggtgcacgccggcct

SEQ ID NO: 180622 - DNA, 582 bp, Homo sapiens
  Payload ID: 15572
  Gene Symbol: SERPINH1
  Gene Name: serpin peptidase inhibitor, clade H (heat shock protein 47), member 1, (collagen binding protein 1)
  ENST ID: ENST00000533449
  CDS Start-End: 131-582
aatttgagcttccggtggtgggaaaggaggtgaaatcgtctcgactcctgggaatgaaaaaggcaggcattgacctccctctgaggcagtttccaggcccaccgtggtgcacgcaaaccacttcctggccatgcgctccctcctgcttctcagcgccttctgcctcctggaggcggccctggccgccgaggtgaagaaacctgcagccgcagcagctcctggcactgcggagaagttgagccccaaggcggccacgcttgccgagcgcagcgccggcctggccttcagcttgtaccaggccatggccaaggaccaggcagtggagaacatcctggtgtcacccgtggtggtggcctcgtcgctagggctcgtgtcgctgggcggcaaggcgaccacggcgtcgcaggccaaggcagtgctgagcgccgagcagctgcgcgacgaggaggtgcacgccggcctgggcgagctgctgcgctcactcagcaactccacggcgcgcaacgtgacctggaagctgggcagccgactgtacggacccagctcagtgagcttcgctgatgacttcgtgcgcagcagcaa

SEQ ID NO: 180623 - DNA, 587 bp, Homo sapiens
  Payload ID: 15572
  Gene Symbol: SERPINH1
  Gene Name: serpin peptidase inhibitor, clade H (heat shock protein 47), member 1, (collagen binding protein 1)
  ENST ID: ENST00000528990
  CDS Start-End: 93-587
tgagggaatttgagcttccggtggtgggaaaggaggtgaaatcgtctcgactcctggggcccaccgtggtgcacgcaaaccacttcctggccatgcgctccctcctgcttctcagcgccttctgcctcctggaggcggccctggccgccgaggtgaagaaacctgcagccgcagcagctcctggcactgcggagaagttgagccccaaggcggccacgcttgccgagcgcagcgccggcctggccttcagcttgtaccaggccatggccaaggaccaggcagtggagaacatcctggtgtcacccgtggtggtggcctcgtcgctagggctcgtgtcgctgggcggcaaggcgaccacggcgtcgcaggccaaggcagtgctgagcgccgagcagctgcgcgacgaggaggtgcacgccggcctgggcgagctgctgcgctcactcagcaactccacggcgcgcaacgtgacctggaagctgggcagccgactgtacggacccagctcagtgagcttcgctgatgacttcgtgcgcagcagcaagcagcactacaactgcgagcactccaagatcaacttccgcgac

SEQ ID NO: 180624 - DNA, 2283 bp, Homo sapiens
  Payload ID: 15572
  Gene Symbol: SERPINH1
  Gene Name: serpin peptidase inhibitor, clade H (heat shock protein 47), member 1, (collagen binding protein 1)
  ENST ID: ENST00000525876
  CDS Start-End: 979-1584
gagtacctccatagacaacactattctcacagtttgctgtgagaatgaagtaaccctcgttttacaaatgaggccaagctaggagagctgaggtctccccgagtcagtggctgagcttggattggaacacaggtctggctgtgagcaagggcagggttcaggccactctcagacattttttgttgttattttctggtcatggagacagaacttgcagaggaaaacgaagggtgggctgagcacagtagctcatgcctgtaatcctagcactttgggaggccaaggtgggtggatcacatgagcccaggaatttgagaccagcctgggtaagatggcgaaaccccatgtctacaaaaaattagccaggcgtggtggcgcatgctggtagtcccagctactctggaggctgaggtgggaggatcgctggagcctgggaattcaagactgcagtgtgtcatgattgtaccactgcactccagctgtaggatggagtgggacggaccttgtctcaaaaagaaaaagataaaaaaaaaattaagggtggtcatggggcactccctgcccagggcacagctgtcccccaggtaccagggagggtagaaagcccacctcagagcatgtttccaaaatatctgacaagtgctagagccgggggtggccatagaggtggctgacctgagggcggaattaattctctatcatatgggagcagcaggcactgactgtagggaaccgcatcctcagatggcatgtcctggggccaagaccccttcccaaagctgggaacatagactctgtgggctgggtgctctatagctgggccctgaagaatggagcaaagacctgtggcaaggataaatcaaggtctgcagccgggggtggctgtgggctgtgattgtgtttgggggcggccatgtgtctctgaccctgtgttttgccccaactacagcacactgggatgagaaattccaccacaagatggtggacaaccgtggcttcatggtgactcggtcctataccgtgggtgtcatgatgatgcaccggacaggcctctacaactactacgacgacgagaaggaaaagctgcaaatcgtggagatgcccctggcccacaagctctccagcctcatcatcctcatgccccatcacgtggagcctctcgagcgccttgaaaagctgctaaccaaagagcagctgaagatctggatggggaagatgcagaagaaggctgttgccatctccttgcccaagggtgtggtggaggtgacccatgacctgcagaaacacctggctgggctgggcctgactgaggccattgacaagaacaaggccgacttgtcacgcatgtcaggcaagaaggacctgtacctggccagcgtgttccacgccaccgcctttgagttggacacagatggcaacccctttgaccaggacatctacgggcgcgaggagctgcgcagccccaagctgttctacgccgaccaccccttcatcttcctagtgcgggacacccaaagcggctccctgctattcattgggcgcctggtccggcctaagggtgacaagatgcgagacgagttatagggcctcagggtgcacacaggatggcaggaggcatccaaaggctcctgagacacatgggtgctattggggttgggggggaggtgaggtaccagccttggatactccatggggtgggggtggaaaaacagaccggggttcccgtgtgcctgagcggaccttcccagctagaattcactccacttggacatgggccccagataccatgatgctgagcccggaaactccacatcctgtgggacctgggccatagtcattctgcctgccctgaaagtcccagatcaagcctgcctcaatcagtattcatatttatagccaggtaccttctcacctgtgagaccaaattgagctaggggggtcagccagccctcttctgacactaaaacacctcagctgcctccccagctctatcccaacctctcccaactataaaactaggtgctgcagcccctgggaccaggcacccccagaatgacctggccgcagtgaggcggattgagaaggagctcccaggaggggcttctgggcagactctggtcaagaagcatcgtgtctggcgttgtggggatgaactttttgttttgtttcttccttttttagttcttcaaagatagggagggaagggggaacatgagcctttgttgctatcaatccaagaacttatttgtacattttttttttcaataaaacttttccaatgac

SEQ ID NO: 180625 - DNA, 3391 bp, Homo sapiens
  Payload ID: 15572
  Gene Symbol: SERPINH1
  Gene Name: serpin peptidase inhibitor, clade H (heat shock protein 47), member 1, (collagen binding protein 1)
  Uniprot ID: P50454
  ENST ID: ENST00000524558
  CDS Start-End: 1436-2692
aatctgggggtgcgcgagggagtaagaggggcgaggggaccctgcgaagcgttgggtgccgagccagagcctacaaattggagtcctcggcactttgggggccgctggagggtttggaatcgagagcccagggctagccagtgatggtgccagctgagggctagggcggagatcggagccgggttgggagtccgtgcactcggaggactgggaaaaagtgcagggacccctaaaaggtggtggtggcagatacgagactaggtgctgtgtaaagggggctgggggcagagagcagagcctctgcggaaagaaacagaggaggaaggagatgggtctggtgcctcttcccgcaagggtagggaggataggccggcctcgcagttccaggtcacttccgttctggggttgaggctcaggggcagcggtgattggtggcccagcctcctcacaggcttgctgagggaatttgagcttccggtggtgggaaaggaggtgaaatcgtctcgactcctggggtccgtgtgctctggtagaagtgggcgacagtggctcaatttctgatcagcagcttgcagcctagatgatggcagccaaaggaaagacttggccagcgaggctccctaccactccgaaaaaagagagtgggggtcagcagggtctgctctgctctggggattaaggggctgactagaaggatttgagtctttccttctgtccactgccacagggttcttggagtaactgcagggtttaaactgcagggtctaacttccagaggctggggttccctgccccccagcttagagacattcctgaggtggctgaagagcaggaaggagaatgaatgcacttccagactggcccagagtctcagcccctcctcttccttgtttcccgctggtccctctgggctgtacggcccggatggaggcctgaggaaaatgagggggctttggttctccggaattccggccggggccacaccctcctgtcttcagatggttcatgtacccatccccccttcccgtcctctcctttgtctcctctgtcaccgggactcccagcagagattttttttttgtactggctgtgtaacaggacaccgcatgcagccctcaggaggggctctgtgcttctgtgaggaaggacccctgtgctgggaaggcagacccctgtttatcccgagggacctggggtgaccccctgccctggccttgtttctcccattttacagtgaggtggtcgatctccaaggtccctgtagattggggactggttgtgccctctgcgccaggggcctcctcaccatctctcctttgccggctcccgccctcttcactcttctgttttctttcagaatgaaaaaggcaggcattgacctccctctgaggcagtttccaggcccaccgtggtgcacgcaaaccacttcctggccatgcgctccctcctgcttctcagcgccttctgcctcctggaggcggccctggccgccgaggtgaagaaacctgcagccgcagcagctcctggcactgcggagaagttgagccccaaggcggccacgcttgccgagcgcagcgccggcctggccttcagcttgtaccaggccatggccaaggaccaggcagtggagaacatcctggtgtcacccgtggtggtggcctcgtcgctagggctcgtgtcgctgggcggcaaggcgaccacggcgtcgcaggccaaggcagtgctgagcgccgagcagctgcgcgacgaggaggtgcacgccggcctgggcgagctgctgcgctcactcagcaactccacggcgcgcaacgtgacctggaagctgggcagccgactgtacggacccagctcagtgagcttcgctgatgacttcgtgcgcagcagcaagcagcactacaactgcgagcactccaagatcaacttccgcgacaagcgcagcgcgctgcagtccatcaacgagtgggccgcgcagaccaccgacggcaagctgcccgaggtcaccaaggacgtggagcgcacggacggcgccctgctagtcaacgccatgttcttcaagccacactgggatgagaaattccaccacaagatggtggacaaccgtggcttcatggtgactcggtcctataccgtgggtgtcatgatgatgcaccggacaggcctctacaactactacgacgacgagaaggaaaagctgcaaatcgtggagatgcccctggcccacaagctctccagcctcatcatcctcatgccccatcacgtggagcctctcgagcgccttgaaaagctgctaaccaaagagcagctgaagatctggatggggaagatgcagaagaaggctgttgccatctccttgcccaagggtgtggtggaggtgacccatgacctgcagaaacacctggctgggctgggcctgactgaggccattgacaagaacaaggccgacttgtcacgcatgtcaggcaagaaggacctgtacctggccagcgtgttccacgccaccgcctttgagttggacacagatggcaacccctttgaccaggacatctacgggcgcgaggagctgcgcagccccaagctgttctacgccgaccaccccttcatcttcctagtgcgggacacccaaagcggctccctgctattcattgggcgcctggtccggcctaagggtgacaagatgcgagacgagttatagggcctcagggtgcacacaggatggcaggaggcatccaaaggctcctgagacacatgggtgctattggggttgggggggaggtgaggtaccagccttggatactccatggggtgggggtggaaaaacagaccggggttcccgtgtgcctgagcggaccttcccagctagaattcactccacttggacatgggccccagataccatgatgctgagcccggaaactccacatcctgtgggacctgggccatagtcattctgcctgccctgaaagtcccagatcaagcctgcctcaatcagtattcatatttatagccaggtaccttctcacctgtgagaccaaattgagctaggggggtcagccagccctcttctgacactaaaacacctcagctgcctccccagctctatcccaacctctcccaactataaaactaggtgctgcagcccctgggaccaggcacccccagaatgacctggccgcagtgaggcggattgagaaggagctcccaggaggggcttctgggcagactctggtcaagaagcatcgtgtctggcgttgtggggatgaactttttgttttgtttcttccttttttagttcttcaaagatagggagggaagggggaacatgagcctttgttgctatcaatccaagaacttatttgtacattttttttttcaataaaacttttccaatgac

SEQ ID NO: 180626 - DNA, 529 bp, Homo sapiens
  Payload ID: 15572
  Gene Symbol: SERPINH1
  Gene Name: serpin peptidase inhibitor, clade H (heat shock protein 47), member 1, (collagen binding protein 1)
  ENST ID: ENST00000525492
  CDS Start-End: 102-529
aagagtagaatcgtgtcgcggctcgagagcgagagtcacgtcccggcgctagcccagcccgacccaggcccaccgtggtgcacgcaaaccacttcctggccatgcgctccctcctgcttctcagcgccttctgcctcctggaggcggccctggccgccgaggtgaagaaacctgcagccgcagcagctcctggcactgcggagaagttgagccccaaggcgaccacggcgtcgcaggccaaggcagtgctgagcgccgagcagctgcgcgacgaggaggtgcacgccggcctgggcgagctgctgcgctcactcagcaactccacggcgcgcaacgtgacctggaagctgggcagccgactgtacggacccagctcagtgagcttcgctgatgacttcgtgcgcagcagcaagcagcactacaactgcgagcactccaagatcaacttccgcgacaagcgcagcgcgctgcagtccatcaacgagtgggccgcgcagaccaccgacggcaagctgcccgaggtcaccaa

SEQ ID NO: 180627 - DNA, 2299 bp, Homo sapiens
  Payload ID: 15572
  Gene Symbol: SERPINH1
  Gene Name: serpin peptidase inhibitor, clade H (heat shock protein 47), member 1, (collagen binding protein 1)
  Uniprot ID: P50454
  ENST ID: ENST00000533603
  CDS Start-End: 343-1599
agtaggacccaggggccgggaggcgccggcagagggaggggccgggggccggggaggttttgagggaggtctttggctttttttggcggagctggggcgccctccggaagcgtttccaactttccagaagtttctcgggacgggcaggagggggtggggactgccatatatagatcccgggagcaggggagcgggctaagagtagaatcgtgtcgcggctcgagagcgagagtcacgtcccggcgctagcccagcccgacccagaatgaaaaaggcaggcattgacctccctctgaggcagtttccaggcccaccgtggtgcacgcaaaccacttcctggccatgcgctccctcctgcttctcagcgccttctgcctcctggaggcggccctggccgccgaggtgaagaaacctgcagccgcagcagctcctggcactgcggagaagttgagccccaaggcggccacgcttgccgagcgcagcgccggcctggccttcagcttgtaccaggccatggccaaggaccaggcagtggagaacatcctggtgtcacccgtggtggtggcctcgtcgctagggctcgtgtcgctgggcggcaaggcgaccacggcgtcgcaggccaaggcagtgctgagcgccgagcagctgcgcgacgaggaggtgcacgccggcctgggcgagctgctgcgctcactcagcaactccacggcgcgcaacgtgacctggaagctgggcagccgactgtacggacccagctcagtgagcttcgctgatgacttcgtgcgcagcagcaagcagcactacaactgcgagcactccaagatcaacttccgcgacaagcgcagcgcgctgcagtccatcaacgagtgggccgcgcagaccaccgacggcaagctgcccgaggtcaccaaggacgtggagcgcacggacggcgccctgctagtcaacgccatgttcttcaagccacactgggatgagaaattccaccacaagatggtggacaaccgtggcttcatggtgactcggtcctataccgtgggtgtcatgatgatgcaccggacaggcctctacaactactacgacgacgagaaggaaaagctgcaaatcgtggagatgcccctggcccacaagctctccagcctcatcatcctcatgccccatcacgtggagcctctcgagcgccttgaaaagctgctaaccaaagagcagctgaagatctggatggggaagatgcagaagaaggctgttgccatctccttgcccaagggtgtggtggaggtgacccatgacctgcagaaacacctggctgggctgggcctgactgaggccattgacaagaacaaggccgacttgtcacgcatgtcaggcaagaaggacctgtacctggccagcgtgttccacgccaccgcctttgagttggacacagatggcaacccctttgaccaggacatctacgggcgcgaggagctgcgcagccccaagctgttctacgccgaccaccccttcatcttcctagtgcgggacacccaaagcggctccctgctattcattgggcgcctggtccggcctaagggtgacaagatgcgagacgagttatagggcctcagggtgcacacaggatggcaggaggcatccaaaggctcctgagacacatgggtgctattggggttgggggggaggtgaggtaccagccttggatactccatggggtgggggtggaaaaacagaccggggttcccgtgtgcctgagcggaccttcccagctagaattcactccacttggacatgggccccagataccatgatgctgagcccggaaactccacatcctgtgggacctgggccatagtcattctgcctgccctgaaagtcccagatcaagcctgcctcaatcagtattcatatttatagccaggtaccttctcacctgtgagaccaaattgagctaggggggtcagccagccctcttctgacactaaaacacctcagctgcctccccagctctatcccaacctctcccaactataaaactaggtgctgcagcccctgggaccaggcacccccagaatgacctggccgcagtgaggcggattgagaaggagctcccaggaggggcttctgggcagactctggtcaagaagcatcgtgtctggcgttgtggggatgaactttttgttttgtttcttccttttttagttcttcaaagatagggagggaagggggaacatgagcctttgttgctatcaatccaagaacttatttgtacattttttttttcaataaaacttttccaatgaca

SEQ ID NO: 180628 - DNA, 882 bp, Homo sapiens
  Payload ID: 15572
  Gene Symbol: SERPINH1
  Gene Name: serpin peptidase inhibitor, clade H (heat shock protein 47), member 1, (collagen binding protein 1)
  ENST ID: ENST00000526397
  CDS Start-End: 134-882
ggagcgggctaagagtagaatcgtgtcgcggctcgagagcgagagtcacgtcccggcgctagcccagcccgacccaggtgaggggcgggagacgcctgcgcccaccgtggtgcacgcaaaccacttcctggccatgcgctccctcctgcttctcagcgccttctgcctcctggaggcggccctggccgccgaggtgaagaaacctgcagccgcagcagctcctggcactgcggagaagttgagccccaaggcggccacgcttgccgagcgcagcgccggcctggccttcagcttgtaccaggccatggccaaggaccaggcagtggagaacatcctggtgtcacccgtggtggtggcctcgtcgctagggctcgtgtcgctgggcggcaaggcgaccacggcgtcgcaggccaaggcagtgctgagcgccgagcagctgcgcgacgaggaggtgcacgccggcctgggcgagctgctgcgctcactcagcaactccacggcgcgcaacgtgacctggaagctgggcagccgactgtacggacccagctcagtgagcttcgctgatgacttcgtgcgcagcagcaagcagcactacaactgcgagcactccaagatcaacttccgcgacaagcgcagcgcgctgcagtccatcaacgagtgggccgcgcagaccaccgacggcaagctgcccgaggtcaccaaggacgtggagcgcacggacggcgccctgctagtcaacgccatgttcttcaagccacactgggatgagaaattccaccacaagatggtggacaaccgtggcttcatggtgactcggtcctataccgtgggtgtcatgatgatgcaccggacaggcctctacaactactacgacgacgagaa

SEQ ID NO: 180629 - DNA, 974 bp, Homo sapiens
  Payload ID: 15572
  Gene Symbol: SERPINH1
  Gene Name: serpin peptidase inhibitor, clade H (heat shock protein 47), member 1, (collagen binding protein 1)
  ENST ID: ENST00000525611
  CDS Start-End: 232-974
gaaatcgtctcgactcctggggtccgtgtgctctggtagaagtgggcgacagtggctcaatttctgatcagcagcttgcagcctagatgatggcagccaaaggaaagacttggccagcgaggctccctaccactccgaaaaaagagagtggggaatgaaaaaggcaggcattgacctccctctgaggcagtttccaggcccaccgtggtgcacgcaaaccacttcctggccatgcgctccctcctgcttctcagcgccttctgcctcctggaggcggccctggccgccgaggtgaagaaacctgcagccgcagcagctcctggcactgcggagaagttgagccccaaggcggccacgcttgccgagcgcagcgccggcctggccttcagcttgtaccaggccatggccaaggaccaggcagtggagaacatcctggtgtcacccgtggtggtggcctcgtcgctagggctcgtgtcgctgggcggcaaggcgaccacggcgtcgcaggccaaggcagtgctgagcgccgagcagctgcgcgacgaggaggtgcacgccggcctgggcgagctgctgcgctcactcagcaactccacggcgcgcaacgtgacctggaagctgggcagccgactgtacggacccagctcagtgagcttcgctgatgacttcgtgcgcagcagcaagcagcactacaactgcgagcactccaagatcaacttccgcgacaagcgcagcgcgctgcagtccatcaacgagtgggccgcgcagaccaccgacggcaagctgcccgaggtcaccaaggacgtggagcgcacggacggcgccctgctagtcaacgccatgttcttcaagccacactgggatgagaaattccaccacaagatggtggacaaccgtggcttcatggtgactcggtcctataccgtgggtgtcatgatgatgcaccggacaggcctctacaactactacgacga

SEQ ID NO: 180630 - DNA, 660 bp, Homo sapiens
  Payload ID: 15572
  Gene Symbol: SERPINH1
  Gene Name: serpin peptidase inhibitor, clade H (heat shock protein 47), member 1, (collagen binding protein 1)
  ENST ID: ENST00000529643
  CDS Start-End: 161-660
aagagtagaatcgtgtcgcggctcgagagcgagagtcacgtcccggcgctagcccagcccgacccaggtgaggggcgggagacgcctgcgtgcgtgcggcccgggggagcgccgagcaatctgggggcccaccgtggtgcacgcaaaccacttcctggccatgcgctccctcctgcttctcagcgccttctgcctcctggaggcggccctggccgccgaggtgaagaaacctgcagccgcagcagctcctggcactgcggagaagttgagccccaaggcggccacgcttgccgagcgcagcgccggcctggccttcagcttgtaccaggccatggccaaggaccaggcagtggagaacatcctggtgtcacccgtggtggtggcctcgtcgctagggctcgtgtcgctgggcggcaaggcgaccacggcgtcgcaggccaaggcagtgctgagcgccgagcagctgcgcgacgaggaggtgcacgccggcctgggcgagctgctgcgctcactcagcaactccacggcgcgcaacgtgacctggaagctgggcagccgactgtacggacccagctcagtgagcttcgctgatgacttcgtgcgcagcagcaagcagcactacaactgcgagcactccaagatcaacttccgcgacaagcg

SEQ ID NO: 180631 - DNA, 998 bp, Homo sapiens
  Payload ID: 15572
  Gene Symbol: SERPINH1
  Gene Name: serpin peptidase inhibitor, clade H (heat shock protein 47), member 1, (collagen binding protein 1)
  ENST ID: ENST00000532356
  CDS Start-End: 112-998
gtgcggcccgggggagcgccgagcaatctggggaatgaaaaaggcaggcattgacctccctctgaggcagtttccaggcccaccgtggtgcacgcaaaccacttcctggccatgcgctccctcctgcttctcagcgccttctgcctcctggaggcggccctggccgccgaggtgaagaaacctgcagccgcagcagctcctggcactgcggagaagttgagccccaaggcggccacgcttgccgagcgcagcgccggcctggccttcagcttgtaccaggccatggccaaggaccaggcagtggagaacatcctggtgtcacccgtggtggtggcctcgtcgctagggctcgtgtcgctgggcggcaaggcgaccacggcgtcgcaggccaaggcagtgctgagcgccgagcagctgcgcgacgaggaggtgcacgccggcctgggcgagctgctgcgctcactcagcaactccacggcgcgcaacgtgacctggaagctgggcagccgactgtacggacccagctcagtgagcttcgctgatgacttcgtgcgcagcagcaagcagcactacaactgcgagcactccaagatcaacttccgcgacaagcgcagcgcgctgcagtccatcaacgagtgggccgcgcagaccaccgacggcaagctgcccgaggtcaccaaggacgtggagcgcacggacggcgccctgctagtcaacgccatgttcttcaagccacactgggatgagaaattccaccacaagatggtggacaaccgtggcttcatggtgactcggtcctataccgtgggtgtcatgatgatgcaccggacaggcctctacaactactacgacgacgagaaggaaaagctgcaaatcgtggagatgcccctggcccacaagctctccagcctcatcatcctcatgccccatcacgtggagcctctcgagcgccttgaaaagctgctaaccaaagagcagctgaagatctggatggggaa

SEQ ID NO: 180632 - DNA, 1358 bp, Homo sapiens
  Payload ID: 15572
  Gene Symbol: SERPINH1
  Gene Name: serpin peptidase inhibitor, clade H (heat shock protein 47), member 1, (collagen binding protein 1)
  ENST ID: ENST00000530284
  CDS Start-End: 146-1120
aagagtagaatcgtgtcgcggctcgagagcgagagtcacgtcccggcgctagcccagcccgacccagaatgaaaaaggcaggcattgacctccctctgaggcagtttccaggcccaccgtggtgcacgcaaaccacttcctggccatgcgctccctcctgcttctcagcgccttctgcctcctggaggcggccctggccgccgaggtgaagaaacctgcagccgcagcagctcctggcactgcggagaagttgagccccaaggcggccacgcttgccgagcgcagcgccggcctggccttcagcttgtaccaggccatggccaaggaccaggcagtggagaacatcctggtgtcacccgtggtggtggcctcgtcgctagggctcgtgtcgctgggcggcaaggcgaccacggcgtcgcaggccaaggcagtgctgagcgccgagcagctgcgcgacgaggaggtgcacgccggcctgggcgagctgctgcgctcactcagcaactccacggcgcgcaacgtgacctggaagctgggcagccgactgtacggacccagctcagtgagcttcgctgatgacttcgtgcgcagcagcaagcagcactacaactgcgagcactccaagatcaacttccgcgacaagcgcagcgcgctgcagtccatcaacgagtgggccgcgcagaccaccgacggcaagctgcccgaggtcaccaaggacgtggagcgcacggacggcgccctgctagtcaacgccatgttcttcaagccacactgggatgagaaattccaccacaagatggtggacaaccgtggcttcatggtgactcggtcctataccgtgggtgtcatgatgatgcaccggacaggcctctacaactactacgacgacgagaaggaaaagctgcaaatcgtggagatgcccctggcccacaagctctccagcctcatcatcctcatgccccatcacgtggagcctctcgagcgccttgaaaagctgctaaccaaagagcagctgaagatctggatggggaagatgcagaagaaggctgttgccatctccttgcccaagggtgtggtggaggtgacccatgacctgcaggtaaggggtggcccagcctaggggcctgcaggccttggagccagggggaggtgcttgggggacccactcaccaattcagcaggtctgtcccaagaccccctggatgtccaggcagtgctgggctctgtgatgggggaagctggggcaggaggtgtgggccatgcccttgggaagatgatgataataccagcagctaaatataacggaacattcctgtatgctaggcgttcttctaagcactttatatgtattattatta

SEQ ID NO: 180633 - DNA, 719 bp, Homo sapiens
  Payload ID: 15572
  Gene Symbol: SERPINH1
  Gene Name: serpin peptidase inhibitor, clade H (heat shock protein 47), member 1, (collagen binding protein 1)
  ENST ID: ENST00000526638
  CDS Start-End: 1-170
gcaacccctttgaccaggacatctacgggcgcgaggagctgcgcagccccaagctgttctacgccgaccaccccttcatcttcctagtgcgggacacccaaagcggctccctgctattcattgggcgcctggtccggcctaagggtgacaagatgcgagacgagttatagggcctcagggtgcacacaggatggcaggaggcatccaaaggctcctgagacacatgggtgctattggggttgggggggaggtgaggtaccagccttggatactccatggggtgggggtggaaaaacagaccggggttcccgtgtgcctgagcggaccttcccagctagaattcactccacttggacatgggccccagataccatgatgctgagcccggaaactccacatcctgtgggacctgggccatagtcattctgcctgccctgaaagtcccagatcaagcctgcctcaatcagtattcatatttatagccagaatgacctggccgcagtgaggcggattgagaaggagctcccaggaggggcttctgggcagactctggtcaagaagcatcgtgtctggcgttgtggggatgaactttttgttttgtttcttccttttttagttcttcaaagatagggagggaagggggaacatgagcctttgttgctatcaatccaagaacttatttgtacattttttttttcaataaaacttttccaatgaca

SEQ ID NO: 180634 - DNA, 773 bp, Homo sapiens
  Payload ID: 15572
  Gene Symbol: SERPINH1
  Gene Name: serpin peptidase inhibitor, clade H (heat shock protein 47), member 1, (collagen binding protein 1)
  ENST ID: ENST00000528760
  CDS Start-End: 164-773
cgggactcccagcagagattttttttttgtactggctgtgtaacaggacaccgcatgcagccctcaggaggggctctgtgcttctaatgaaaaaggcaggcattgacctccctctgaggcagtttccaggcccaccgtggtgcacgcaaaccacttcctggccatgcgctccctcctgcttctcagcgccttctgcctcctggaggcggccctggccgccgaggtgaagaaacctgcagccgcagcagctcctggcactgcggagaagttgagccccaaggcggccacgcttgccgagcgcagcgccggcctggccttcagcttgtaccaggccatggccaaggaccaggcagtggagaacatcctggtgtcacccgtggtggtggcctcgtcgctagggctcgtgtcgctgggcggcaaggcgaccacggcgtcgcaggccaaggcagtgctgagcgccgagcagctgcgcgacgaggaggtgcacgccggcctgggcgagctgctgcgctcactcagcaactccacggcgcgcaacgtgacctggaagctgggcagccgactgtacggacccagctcagtgagcttcgctgatgacttcgtgcgcagcagcaagcagcactacaactgcgagcactccaagatcaacttccgcgacaagcgcagcgcgctgcagtccatcaacgagtgggccgcgcagaccaccgacggcaagctgcccgaggtcaccaaggacgtggagcgcacggacggcgccctgctagtcaacgcca

SEQ ID NO: 180635 - DNA, 1907 bp, Homo sapiens
  Payload ID: 15573
  Gene Symbol: SERPINI1
  Gene Name: serpin peptidase inhibitor, clade I (neuroserpin), member 1
  Uniprot ID: Q99574
  ENST ID: ENST00000295777
  CDS Start-End: 432-1664
agtttcccgggagagacgaaagcaggaacgagagcggagcggagcacagtccgccgagcacaagctccagcatcccgtcaggggttgcaggtgtgtgggaggtaagcgtgggtccttcttcggggcgtctgcactgccctggagaaaacgtcttccaataggaattacatcaagacacagctaaaagagtccgcgttgggttaggaaaccggtgcaaaacctctcgggtgaaagatttacatttttcgactttaagggcaaaaaagcaaaaggaagcttgactctgggtataaagggcgtggttagtgtttttggtttgagttgcaccagtaaaactgttctgggagatctgaagattgagaaaaatcctgctaattgaggacgaggtggatgttatctggtggatgttataggcttgaaactgttacaatatggctttccttggactcttctctttgctggttctgcaaagtatggctacaggggccactttccctgaggaagccattgctgacttgtcagtgaatatgtataatcgtcttagagccactggtgaagatgaaaatattctcttctctccattgagtattgctcttgcaatgggaatgatggaacttggggcccaaggatctacccagaaagaaatccgccactcaatgggatatgacagcctaaaaaatggtgaagaattttctttcttgaaggagttttcaaacatggtaactgctaaagagagccaatatgtgatgaaaattgccaattccttgtttgtgcaaaatggatttcatgtcaatgaggagtttttgcaaatgatgaaaaaatattttaatgcagcagtaaatcatgtggacttcagtcaaaatgtagccgtggccaactacatcaataagtgggtggagaataacacaaacaatctggtgaaagatttggtatccccaagggattttgatgctgccacttatctggccctcattaatgctgtctatttcaaggggaactggaagtcgcagtttaggcctgaaaatactagaaccttttctttcactaaagatgatgaaagtgaagtccaaattccaatgatgtatcagcaaggagaattttattatggggaatttagtgatggctccaatgaagctggtggtatctaccaagtcctagaaataccatatgaaggagatgaaataagcatgatgctggtgctgtccagacaggaagttcctcttgctactctggagccattagtcaaagcacagctggttgaagaatgggcaaactctgtgaagaagcaaaaagtagaagtatacctgcccaggttcacagtggaacaggaaattgatttaaaagatgttttgaaggctcttggaataactgaaattttcatcaaagatgcaaatttgacaggcctctctgataataaggagatttttctttccaaagcaattcacaagtccttcctagaggttaatgaagaaggctcagaagctgctgctgtctcaggaatgattgcaattagtaggatggctgtgctgtatcctcaagttattgtcgaccatccatttttctttcttatcagaaacaggagaactggtacaattctattcatgggacgagtcatgcatcctgaaacaatgaacacaagtggacatgatttcgaagaactttaagttactttatttgaataacaaggaaaacagtaactaagcacattatgtttgcaactggtatatatttaggatttgtgttttacagtatatcttaagataatatttaaaatagttccagataaaaacaatatatgtaaattataagtaacttgtcaaggaatgttatcagtattaagctaatggtcctgttatgtcattgtgtttgtgtgctgttgtttaaaataaaagtacctattgaacatg

SEQ ID NO: 180636 - DNA, 1890 bp, Homo sapiens
  Payload ID: 15573
  Gene Symbol: SERPINI1
  Gene Name: serpin peptidase inhibitor, clade I (neuroserpin), member 1
  Uniprot ID: Q99574
  ENST ID: ENST00000446050
  CDS Start-End: 413-1645
gaaggataggctgagccggggctcccagcagagacgcctgggtggggcaggaggccgctccaggtgtgagccacagaggaggggagagggacccccacgggagtggaagtggcagagcagctgcagaagtgcagggagcggaaaggtaccagggcagctgctttccgctgcctccggtccgggcagctgcagaaacagcagggggaggagcaacagctgccaaattcgccaactagaggagggagaggcggagcttgggtccctgtagaagccagaggcgcagtctggactgtagtttcccgggagagacgaaagcaggaacgagagcggagcggagcacagtccgccgagcacaagctccagcatcccgtcaggggttgcaggtgtgtgggaggcttgaaactgttacaatatggctttccttggactcttctctttgctggttctgcaaagtatggctacaggggccactttccctgaggaagccattgctgacttgtcagtgaatatgtataatcgtcttagagccactggtgaagatgaaaatattctcttctctccattgagtattgctcttgcaatgggaatgatggaacttggggcccaaggatctacccagaaagaaatccgccactcaatgggatatgacagcctaaaaaatggtgaagaattttctttcttgaaggagttttcaaacatggtaactgctaaagagagccaatatgtgatgaaaattgccaattccttgtttgtgcaaaatggatttcatgtcaatgaggagtttttgcaaatgatgaaaaaatattttaatgcagcagtaaatcatgtggacttcagtcaaaatgtagccgtggccaactacatcaataagtgggtggagaataacacaaacaatctggtgaaagatttggtatccccaagggattttgatgctgccacttatctggccctcattaatgctgtctatttcaaggggaactggaagtcgcagtttaggcctgaaaatactagaaccttttctttcactaaagatgatgaaagtgaagtccaaattccaatgatgtatcagcaaggagaattttattatggggaatttagtgatggctccaatgaagctggtggtatctaccaagtcctagaaataccatatgaaggagatgaaataagcatgatgctggtgctgtccagacaggaagttcctcttgctactctggagccattagtcaaagcacagctggttgaagaatgggcaaactctgtgaagaagcaaaaagtagaagtatacctgcccaggttcacagtggaacaggaaattgatttaaaagatgttttgaaggctcttggaataactgaaattttcatcaaagatgcaaatttgacaggcctctctgataataaggagatttttctttccaaagcaattcacaagtccttcctagaggttaatgaagaaggctcagaagctgctgctgtctcaggaatgattgcaattagtaggatggctgtgctgtatcctcaagttattgtcgaccatccatttttctttcttatcagaaacaggagaactggtacaattctattcatgggacgagtcatgcatcctgaaacaatgaacacaagtggacatgatttcgaagaactttaagttactttatttgaataacaaggaaaacagtaactaagcacattatgtttgcaactggtatatatttaggatttgtgttttacagtatatcttaagataatatttaaaatagttccagataaaaacaatatatgtaaattataagtaacttgtcaaggaatgttatcagtattaagctaatggtcctgttatgtcattgtgtttgtgtgctgttgtttaaaataaaagtacctattgaacatgtg

SEQ ID NO: 180637 - DNA, 582 bp, Homo sapiens
  Payload ID: 15573
  Gene Symbol: SERPINI1
  Gene Name: serpin peptidase inhibitor, clade I (neuroserpin), member 1
  ENST ID: ENST00000472941
  CDS Start-End: 102-582
gaggggcctgtggtggggatcctggggctgtcgggctgagtatgccgtgtgggtggagaggaagcctcggggaaatcgcccaggcttgaaactgttacaatatggctttccttggactcttctctttgctggttctgcaaagtatggctacaggggccactttccctgaggaagccattgctgacttgtcagtgaatatgtataatcgtcttagagccactggtgaagatgaaaatattctcttctctccattgagtattgctcttgcaatgggaatgatggaacttggggcccaaggatctacccagaaagaaatccgccactcaatgggatatgacagcctaaaaaatggtgaagaattttctttcttgaaggagttttcaaacatggtaactgctaaagagagccaatatgtgatgaaaattgccaattccttgtttgtgcaaaatggatttcatgtcaatgaggagtttttgcaaatgatgaaaaaatattttaatgcagcagtaaatcatgtggacttcagtcaaaatgtagccgtggccaactacatcaataagtgggtggagaataacacaaaca

SEQ ID NO: 180638 - DNA, 842 bp, Homo sapiens
  Payload ID: 15573
  Gene Symbol: SERPINI1
  Gene Name: serpin peptidase inhibitor, clade I (neuroserpin), member 1
  ENST ID: ENST00000472747
  CDS Start-End: 107-842
tttcccgggagagacgaaagcaggaacgagagcggagcggagcacagtccgccgagcacaagctccagcatcccgtcaggggttgcaggcttgaaactgttacaatatggctttccttggactcttctctttgctggttctgcaaagtatggctacaggggccactttccctgaggaagccattgctgacttgtcagtgaatatgtataatcgtcttagagccactggtgaagatgaaaatattctcttctctccattgagtattgctcttgcaatgggaatgatggaacttggggcccaaggatctacccagaaagaaatccgccactcaatgggatatgacagcctaaaaaatggtgaagaattttctttcttgaaggagttttcaaacatggtaactgctaaagagagccaatatgtgatgaaaattgccaattccttgtttgtgcaaaatggatttcatgtcaatgaggagtttttgcaaatgatgaaaaaatattttaatgcagcagtaaatcatgtggacttcagtcaaaatgtagccgtggccaactacatcaataagtgggtggagaataacacaaacaatctggtgaaagatttggtatccccaagggattttgatgctgccacttatctggccctcattaatgctgtctatttcaaggggaactggaagtcgcagtttaggcctgaaaatactagaaccttttctttcactaaagatgatgaaagtgaagtccaaattccaatgatgtatcagcaaggagaattttattatggggaatttagtgatggctccaatgaagctggtggtatctaccaagtcctagaaataccat

SEQ ID NO: 180639 - DNA, 595 bp, Homo sapiens
  Payload ID: 15573
  Gene Symbol: SERPINI1
  Gene Name: serpin peptidase inhibitor, clade I (neuroserpin), member 1
  ENST ID: ENST00000466865
  CDS Start-End: 1-358
ctccaggttcacagtggaacaggaaattgatttaaaagatgttttgaaggctcttggaataactgaaattttcatcaaagatgcaaatttgacaggcctctctgataataaggagatttttctttccaaagcaattcacaagtccttcctagaggttaatgaagaaggctcagaagctgctgctgtctcaggaatgattgcaattagtaggatggctgtgctgtatcctcaagttattgtcgaccatccatttttctttcttatcagaaacaggagaactggtacaattctattcatgggacgagtcatgcatcctgaaacaatgaacacaagtggacatgatttcgaagaactttaagttactttatttgaataacaaggaaaacagtaactaagcacattatgtttgcaactggtatatatttaggatttgtgttttacagtatatcttaagataatatttaaaatagttccagataaaaacaatatatgtaaattataagtaacttgtcaaggaatgttatcagtattaagctaatggtcctgttatgtcattgtgtttgtgtgctgttgtttaaaataaaagtacctattg

SEQ ID NO: 180640 - DNA, 1678 bp, Homo sapiens
  Payload ID: 15574
  Gene Symbol: SERPINI2
  Gene Name: serpin peptidase inhibitor, clade I (pancpin), member 2
  Uniprot ID: O75830
  ENST ID: ENST00000264677
  CDS Start-End: 141-1358
aggaattaatcaagcaatggtcaagataaatggagttggccttgatcgctcaggtgtttatgtacaagagttttccagcaagcgtattttagttgtaacattccagtgaataatcagaagtcagtttgggagaagtcaaaatggacacaatcttcttgtggagtcttctattgctgttttttggaagtcaagcctcaagatgctcagctcaaaaaaataccgaatttgcagtggatctttatcaagaggtttccttatctcataaggacaacattatattttcaccccttggaataactttggttcttgagatggtacaactgggagccaaaggaaaagcacagcagcagataagacaaactttaaaacaacaggaaacctcagctggggaagaattttttgtactgaagtcatttttctctgccatctcagagaaaaaacaagaatttacatttaatcttgccaatgccctctaccttcaagaaggattcactgtgaaagaacagtatctccatggcaacaaggaattttttcagagtgctataaaactggtggattttcaagatgcaaaggcttgtgcagagatgataagtacctgggtagaaagaaaaacagatggaaaaattaaagacatgttttcaggggaagaatttggccctctgactcggcttgtcctggtgaatgctatttatttcaaaggagattggaaacagaaattcagaaaagaggacacacagctgataaattttactaagaaaaatggttcaactgtcaaaattccaatgatgaaggctcttctgagaacaaaatatggttatttttctgaatcttccctgaactaccaagttttagaattgtcttacaaaggtgatgaatttagcttaattatcatacttcctgcagaaggtatggatatagaagaagtggaaaaactaattactgctcaacaaatcctaaaatggctctctgagatgcaagaagaggaagtagaaataagcctccctagatttaaagtagaacaaaaagtagacttcaaagacgttttgtattctttgaacataaccgagatatttagtggtggctgcgacctttctggaataacagattcatctgaagtgtatgtttcccaagtgacgcaaaaagttttctttgagataaatgaagatggtagtgaagctgcaacatcaactggcatacacatccctgtgatcatgagtctggctcaaagccaatttatagcaaatcatccatttctgtttattatgaagcataatccaacagaatcaattctgtttatgggaagagtgacaaatcctgacacccaggagataaaaggaagagatttagattcactgtgaatgaaaagcacagcctcagaataaaagatgatttctcaaaaatagctgattggcaaaatatcgtcatcttgacaatatttgctctatatcttatgtcttttctgttttaaactgtgcctgtagtaatagatatctgtcttgatgaataagtaaaattaggtatgcatttgtttccattccttctgtatgttttagaaaatctatatgcatctaaaaccttgagcgtacgtaaaatattaccattcatatgttagaacaatcctgtctataatatcttaaataccaaattcttgtcttagatagcaaatttattattccct

SEQ ID NO: 180641 - DNA, 1514 bp, Homo sapiens
  Payload ID: 15574
  Gene Symbol: SERPINI2
  Gene Name: serpin peptidase inhibitor, clade I (pancpin), member 2
  Uniprot ID: O75830
  ENST ID: ENST00000461846
  CDS Start-End: 102-1319
aagatccagttcttataggactattcatcaggttgtttagttcagcattactttgtgctttctgataagatatgatccaaaacctgatgagagaagtcaaaatggacacaatcttcttgtggagtcttctattgctgttttttggaagtcaagcctcaagatgctcagctcaaaaaaataccgaatttgcagtggatctttatcaagaggtttccttatctcataaggacaacattatattttcaccccttggaataactttggttcttgagatggtacaactgggagccaaaggaaaagcacagcagcagataagacaaactttaaaacaacaggaaacctcagctggggaagaattttttgtactgaagtcatttttctctgccatctcagagaaaaaacaagaatttacatttaatcttgccaatgccctctaccttcaagaaggattcactgtgaaagaacagtatctccatggcaacaaggaattttttcagagtgctataaaactggtggattttcaagatgcaaaggcttgtgcagagatgataagtacctgggtagaaagaaaaacagatggaaaaattaaagacatgttttcaggggaagaatttggccctctgactcggcttgtcctggtgaatgctatttatttcaaaggagattggaaacagaaattcagaaaagaggacacacagctgataaattttactaagaaaaatggttcaactgtcaaaattccaatgatgaaggctcttctgagaacaaaatatggttatttttctgaatcttccctgaactaccaagttttagaattgtcttacaaaggtgatgaatttagcttaattatcatacttcctgcagaaggtatggatatagaagaagtggaaaaactaattactgctcaacaaatcctaaaatggctctctgagatgcaagaagaggaagtagaaataagcctccctagatttaaagtagaacaaaaagtagacttcaaagacgttttgtattctttgaacataaccgagatatttagtggtggctgcgacctttctggaataacagattcatctgaagtgtatgtttcccaagtgacgcaaaaagttttctttgagataaatgaagatggtagtgaagctgcaacatcaactggcatacacatccctgtgatcatgagtctggctcaaagccaatttatagcaaatcatccatttctgtttattatgaagcataatccaacagaatcaattctgtttatgggaagagtgacaaatcctgacacccaggagataaaaggaagagatttagattcactgtgaatgaaaagcacagcctcagaataaaagatgatttctcaaaaatagctgattggcaaaatatcgtcatcttgacaatatttgctctatatcttatgtcttttctgttttaaactgtgcctgtagtaatagatatctgtcttgatgaataagtaaaattaggtatgcatttgtttccattccttctgtatgttttag

SEQ ID NO: 180642 - DNA, 743 bp, Homo sapiens
  Payload ID: 15574
  Gene Symbol: SERPINI2
  Gene Name: serpin peptidase inhibitor, clade I (pancpin), member 2
  ENST ID: ENST00000466903
  CDS Start-End: 126-743
tgaataatcagaagtcagtttgggaagatccagttcttataggactattcatcaggttgtttagttcagcattactttgtgctttctgataagatatgatccaaaacctgatgagagaagtcaaaatggacacaatcttcttgtggagtcttctattgctgttttttggaagtcaagcctcaagatgctcagctcaaaaaaataccgaatttgcagtggatctttatcaagaggtttccttatctcataaggacaacattatattttcaccccttggaataactttggttcttgagatggtacaactgggagccaaaggaaaagcacagcagcagataagacaaactttaaaacaacaggaaacctcagctggggaagaattttttgtactgaagtcatttttctctgccatctcagagaaaaaacaagaatttacatttaatcttgccaatgccctctaccttcaagaaggattcactgtgaaagaacagtatctccatggcaacaaggaattttttcagagtgctataaaactggtggattttcaagatgcaaaggcttgtgcagagatgataagtacctgggtagaaagaaaaacagatggaaaaattaaagacatgttttcaggggaagaatttggccctctgactcggcttgtcctggtgaatgctatttatttcaaaggagattggaaacagaaattcagaaaagaggacacacagctgataaattttactaagaaa

SEQ ID NO: 180643 - DNA, 477 bp, Homo sapiens
  Payload ID: 15574
  Gene Symbol: SERPINI2
  Gene Name: serpin peptidase inhibitor, clade I (pancpin), member 2
  ENST ID: ENST00000467583
  CDS Start-End: 6-477
tcaaaatggacacaatcttcttgtggagtcttctattgctgttttttggaagtcaagcctcaagatgctcagctcaaaaaaataccgaatttgcagtggatctttatcaagaggtttccttatctcataaggacaacattatattttcaccccttggaataactttggttcttgagatggtacaactgggagccaaaggaaaagcacagcagcagataagacaaactttaaaacaacaggaaacctcagctgagaaaaaacaagaatttacatttaatcttgccaatgccctctaccttcaagaaggattcactgtgaaagaacagtatctccatggcaacaaggaattttttcagagtgctataaaactggtggattttcaagatgcaaaggcttgtgcagagatgataagtacctgggtagaaagaaaaacagatggaaaaattaaagacatgttttcaggggaagaatttggcc

SEQ ID NO: 180644 - DNA, 1331 bp, Homo sapiens
  Payload ID: 15574
  Gene Symbol: SERPINI2
  Gene Name: serpin peptidase inhibitor, clade I (pancpin), member 2
  Uniprot ID: O75830
  ENST ID: ENST00000471111
  CDS Start-End: 70-1287
gagctctctgtggaaaactctattttgaaaatgaatatattttgatttaaacaatacagagaagtcaaaatggacacaatcttcttgtggagtcttctattgctgttttttggaagtcaagcctcaagatgctcagctcaaaaaaataccgaatttgcagtggatctttatcaagaggtttccttatctcataaggacaacattatattttcaccccttggaataactttggttcttgagatggtacaactgggagccaaaggaaaagcacagcagcagataagacaaactttaaaacaacaggaaacctcagctggggaagaattttttgtactgaagtcatttttctctgccatctcagagaaaaaacaagaatttacatttaatcttgccaatgccctctaccttcaagaaggattcactgtgaaagaacagtatctccatggcaacaaggaattttttcagagtgctataaaactggtggattttcaagatgcaaaggcttgtgcagagatgataagtacctgggtagaaagaaaaacagatggaaaaattaaagacatgttttcaggggaagaatttggccctctgactcggcttgtcctggtgaatgctatttatttcaaaggagattggaaacagaaattcagaaaagaggacacacagctgataaattttactaagaaaaatggttcaactgtcaaaattccaatgatgaaggctcttctgagaacaaaatatggttatttttctgaatcttccctgaactaccaagttttagaattgtcttacaaaggtgatgaatttagcttaattatcatacttcctgcagaaggtatggatatagaagaagtggaaaaactaattactgctcaacaaatcctaaaatggctctctgagatgcaagaagaggaagtagaaataagcctccctagatttaaagtagaacaaaaagtagacttcaaagacgttttgtattctttgaacataaccgagatatttagtggtggctgcgacctttctggaataacagattcatctgaagtgtatgtttcccaagtgacgcaaaaagttttctttgagataaatgaagatggtagtgaagctgcaacatcaactggcatacacatccctgtgatcatgagtctggctcaaagccaatttatagcaaatcatccatttctgtttattatgaagcataatccaacagaatcaattctgtttatgggaagagtgacaaatcctgacacccaggagataaaaggaagagatttagattcactgtgaatgaaaagcacagcctcagaataaaagatgatttctcaaaaata

SEQ ID NO: 180645 - DNA, 1837 bp, Homo sapiens
  Payload ID: 15574
  Gene Symbol: SERPINI2
  Gene Name: serpin peptidase inhibitor, clade I (pancpin), member 2
  Uniprot ID: O75830
  ENST ID: ENST00000476257
  CDS Start-End: 300-1517
ttttgtagctttgaaagctgtatttgatgagaaaaacctgtttcccaaggaaattctgcatcatgaacgaaaagccaagcaattatgccaagaaaaaagttgtgaagtgaagaaaaataagaagtaattacaacagaaaaaccttcactgttacataagaggaattaatcaagcaatggtcaagataaatggagttggccttgatcgctcaggtgtttatgtacaagagttttccagcaagcgtattttagttgtaacattccagtgaataatcagaagtcagtttgggagaagtcaaaatggacacaatcttcttgtggagtcttctattgctgttttttggaagtcaagcctcaagatgctcagctcaaaaaaataccgaatttgcagtggatctttatcaagaggtttccttatctcataaggacaacattatattttcaccccttggaataactttggttcttgagatggtacaactgggagccaaaggaaaagcacagcagcagataagacaaactttaaaacaacaggaaacctcagctggggaagaattttttgtactgaagtcatttttctctgccatctcagagaaaaaacaagaatttacatttaatcttgccaatgccctctaccttcaagaaggattcactgtgaaagaacagtatctccatggcaacaaggaattttttcagagtgctataaaactggtggattttcaagatgcaaaggcttgtgcagagatgataagtacctgggtagaaagaaaaacagatggaaaaattaaagacatgttttcaggggaagaatttggccctctgactcggcttgtcctggtgaatgctatttatttcaaaggagattggaaacagaaattcagaaaagaggacacacagctgataaattttactaagaaaaatggttcaactgtcaaaattccaatgatgaaggctcttctgagaacaaaatatggttatttttctgaatcttccctgaactaccaagttttagaattgtcttacaaaggtgatgaatttagcttaattatcatacttcctgcagaaggtatggatatagaagaagtggaaaaactaattactgctcaacaaatcctaaaatggctctctgagatgcaagaagaggaagtagaaataagcctccctagatttaaagtagaacaaaaagtagacttcaaagacgttttgtattctttgaacataaccgagatatttagtggtggctgcgacctttctggaataacagattcatctgaagtgtatgtttcccaagtgacgcaaaaagttttctttgagataaatgaagatggtagtgaagctgcaacatcaactggcatacacatccctgtgatcatgagtctggctcaaagccaatttatagcaaatcatccatttctgtttattatgaagcataatccaacagaatcaattctgtttatgggaagagtgacaaatcctgacacccaggagataaaaggaagagatttagattcactgtgaatgaaaagcacagcctcagaataaaagatgatttctcaaaaatagctgattggcaaaatatcgtcatcttgacaatatttgctctatatcttatgtcttttctgttttaaactgtgcctgtagtaatagatatctgtcttgatgaataagtaaaattaggtatgcatttgtttccattccttctgtatgttttagaaaatctatatgcatctaaaaccttgagcgtacgtaaaatattaccattcatatgttagaacaatcctgtctataatatcttaaataccaaattcttgtcttagatagcaaatttattattccct

SEQ ID NO: 180646 - DNA, 1769 bp, Homo sapiens
  Payload ID: 15574
  Gene Symbol: SERPINI2
  Gene Name: serpin peptidase inhibitor, clade I (pancpin), member 2
  ENST ID: ENST00000616363
  CDS Start-End: 202-1449
aggaattaatcaagcaatggtcaagataaatggagttggccttgatcgctcaggtgtttatgtacaagagttttccagcaagcgtattttagttgtaacattccagtgaataatcagaagtcagtttgggaagatccagttcttataggactattcatcaggttgtttagttcagcattactttgtgctttctgataagatatgatccaaaacctgatgagagaagtcaaaatggacacaatcttcttgtggagtcttctattgctgttttttggaagtcaagcctcaagatgctcagctcaaaaaaataccgaatttgcagtggatctttatcaagaggtttccttatctcataaggacaacattatattttcaccccttggaataactttggttcttgagatggtacaactgggagccaaaggaaaagcacagcagcagataagacaaactttaaaacaacaggaaacctcagctggggaagaattttttgtactgaagtcatttttctctgccatctcagagaaaaaacaagaatttacatttaatcttgccaatgccctctaccttcaagaaggattcactgtgaaagaacagtatctccatggcaacaaggaattttttcagagtgctataaaactggtggattttcaagatgcaaaggcttgtgcagagatgataagtacctgggtagaaagaaaaacagatggaaaaattaaagacatgttttcaggggaagaatttggccctctgactcggcttgtcctggtgaatgctatttatttcaaaggagattggaaacagaaattcagaaaagaggacacacagctgataaattttactaagaaaaatggttcaactgtcaaaattccaatgatgaaggctcttctgagaacaaaatatggttatttttctgaatcttccctgaactaccaagttttagaattgtcttacaaaggtgatgaatttagcttaattatcatacttcctgcagaaggtatggatatagaagaagtggaaaaactaattactgctcaacaaatcctaaaatggctctctgagatgcaagaagaggaagtagaaataagcctccctagatttaaagtagaacaaaaagtagacttcaaagacgttttgtattctttgaacataaccgagatatttagtggtggctgcgacctttctggaataacagattcatctgaagtgtatgtttcccaagtgacgcaaaaagttttctttgagataaatgaagatggtagtgaagctgcaacatcaactggcatacacatccctgtgatcatgagtctggctcaaagccaatttatagcaaatcatccatttctgtttattatgaagcataatccaacagaatcaattctgtttatgggaagagtgacaaatcctgacacccaggagataaaaggaagagatttagattcactgtgaatgaaaagcacagcctcagaataaaagatgatttctcaaaaatagctgattggcaaaatatcgtcatcttgacaatatttgctctatatcttatgtcttttctgttttaaactgtgcctgtagtaatagatatctgtcttgatgaataagtaaaattaggtatgcatttgtttccattccttctgtatgttttagaaaatctatatgcatctaaaaccttgagcgtacgtaaaatattaccattcatatgttagaacaatcctgtctataatatcttaaataccaaattcttgtcttagatagcaaatttattattccct

SEQ ID NO: 180647 - DNA, 2103 bp, Homo sapiens
  Payload ID: 15575
  Gene Symbol: SERBP1
  Gene Name: SERPINE1 mRNA binding protein 1
  Uniprot ID: Q8NC51
  ENST ID: ENST00000361219
  CDS Start-End: 100-1281
tctcggcccggccatcttgtgggaagagctgaagcaggcgctcttggctcggcgcggcccgctgcaatccgtggaggaacgcgccgccgagccaccatcatgcctgggcacttacaggaaggcttcggctgcgtggtcaccaaccgattcgaccagttatttgacgacgaatcggaccccttcgaggtgctgaaggcagcagagaacaagaaaaaagaagccggcgggggcggcgttgggggccctggggccaagagcgcagctcaggccgcggcccagaccaactccaacgcggcaggcaaacagctgcgcaaggagtcccagaaagaccgcaagaacccgctgccccccagcgttggcgtggttgacaagaaagaggagacgcagccgcccgtggcgcttaagaaagaaggaataagacgagttggaagaagacctgatcaacaacttcagggtgaagggaaaataattgatagaagaccagaaaggcgaccacctcgtgaacgaagattcgaaaagccacttgaagaaaagggtgaaggaggcgaattttcagttgatagaccgattattgaccgacctattcgaggtcgtggtggtcttggaagaggtcgagggggccgtggacgtggaatgggccgaggagatggatttgattctcgtggcaaacgtgaatttgataggcatagtggaagtgatagatcttctttttcacattacagtggcctgaagcacgaggacaaacgtggaggtagcggatctcacaactggggaactgtcaaagacgaattaactgacttggatcaatcaaatgtgactgaggaaacacctgaaggtgaagaacatcatccagtggcagacactgaaaataaggagaatgaagttgaagaggtaaaagaggagggtccaaaagagatgactttggatgagtggaaggctattcaaaataaggaccgggcaaaagtagaatttaatatccgaaaaccaaatgaaggtgctgatgggcagtggaagaagggatttgttcttcataaatcaaagagtgaagaggctcatgctgaagattcggttatggaccatcatttccggaagccagcaaatgatataacgtctcagctggagatcaattttggagaccttggccgcccaggacgtggcggcaggggaggacgaggtggacgtgggcgtggtgggcgcccaaaccgtggcagcaggaccgacaagtcaagtgcttctgctcctgatgtggatgacccagaggcattcccagctctggcttaactggatgccataagacaaccctggttcctttgtgaacccttctgttcaaagcttttgcatgcttaaggattccaaacgactaagaaattaaaaaaaaaaagactgtcattcataccattcacacctaaagactgaattttatctgttttaaaaatgaacttctcccgctacacagaagtaacaaatatggtagtcagttttgtatttagaaatgtattggtagcagggatgttttcataattttcagagattatgcattcttcatgaatacttttgtattgctgcttgcaaatatgcatttccaaacttgaaatataggtgtgaacagtgtgtaccagtttaaagctttcacttcatttgtgttttttaattaaggatttagaagttcccccaattacaaactggttttaaatattggacatactggttttaatacctgctttgcatattcacacatggtcaactgggacatgttaaactttgatttgtcaaattttatgctgtgtggaatactaactatatgtattttaacttagttttaatattttcatttttggggaaaaatcttttttcacttctcatgatagctgttatatatatatgctaaatctttatatacagaaatatcagtacttgaacaaattcaaagcacatttggtttattaacccttgctccttgcatggctcattaggttcaaattataactgatttacattttcagctatatttactttttaaatgcttgagtttcccattttaaaatctaaactagacatcttaattggtgaaagttgtttaaactacttattgttggtaggcac

SEQ ID NO: 180648 - DNA, 1621 bp, Homo sapiens
  Payload ID: 15575
  Gene Symbol: SERBP1
  Gene Name: SERPINE1 mRNA binding protein 1
  Uniprot ID: Q8NC51
  ENST ID: ENST00000370990
  CDS Start-End: 73-1281
gctgaagcaggcgctcttggctcggcgcggcccgctgcaatccgtggaggaacgcgccgccgagccaccatcatgcctgggcacttacaggaaggcttcggctgcgtggtcaccaaccgattcgaccagttatttgacgacgaatcggaccccttcgaggtgctgaaggcagcagagaacaagaaaaaagaagccggcgggggcggcgttgggggccctggggccaagagcgcagctcaggccgcggcccagaccaactccaacgcggcaggcaaacagctgcgcaaggagtcccagaaagaccgcaagaacccgctgccccccagcgttggcgtggttgacaagaaagaggagacgcagccgcccgtggcgcttaagaaagaaggaataagacgagttggaagaagacctgatcaacaacttcagggtgaagggaaaataattgatagaagaccagaaaggcgaccacctcgtgaacgaagattcgaaaagccacttgaagaaaagggtgaaggaggcgaattttcagttgatagaccgattattgaccgacctattcgaggtcgtggtggtcttggaagaggtcgagggggccgtggacgtggaatgggccgaggagatggatttgattctcgtggcaaacgtgaatttgataggcatagtggaagtgatagatctggcctgaagcacgaggacaaacgtggaggtagcggatctcacaactggggaactgtcaaagacgaattaacagagtcccccaaatacattcagaaacaaatatcttataattacagtgacttggatcaatcaaatgtgactgaggaaacacctgaaggtgaagaacatcatccagtggcagacactgaaaataaggagaatgaagttgaagaggtaaaagaggagggtccaaaagagatgactttggatgagtggaaggctattcaaaataaggaccgggcaaaagtagaatttaatatccgaaaaccaaatgaaggtgctgatgggcagtggaagaagggatttgttcttcataaatcaaagagtgaagaggctcatgctgaagattcggttatggaccatcatttccggaagccagcaaatgatataacgtctcagctggagatcaattttggagaccttggccgcccaggacgtggcggcaggggaggacgaggtggacgtgggcgtggtgggcgcccaaaccgtggcagcaggaccgacaagtcaagtgcttctgctcctgatgtggatgacccagaggcattcccagctctggcttaactggatgccataagacaaccctggttcctttgtgaacccttctgttcaaagcttttgcatgcttaaggattccaaacgactaagaaattaaaaaaaaaaagactgtcattcataccattcacacctaaagactgaattttatctgttttaaaaatgaacttctcccgctacacagaagtaacaaatatggtagtcagttttgtatttagaaatgtattggtagcagggatgttttcataattttcagagattatgcattcttcatgaatacttttgtattgctgcttgcaaatatgcatttccaaacttgaaatataggtgtgaacagtgtgtaccagtt

SEQ ID NO: 180649 - DNA, 6676 bp, Homo sapiens
  Payload ID: 15575
  Gene Symbol: SERBP1
  Gene Name: SERPINE1 mRNA binding protein 1
  Uniprot ID: Q8NC51
  ENST ID: ENST00000370994
  CDS Start-End: 116-1279
gaagacggcccccctctctcggcccggccatcttgtgggaagagctgaagcaggcgctcttggctcggcgcggcccgctgcaatccgtggaggaacgcgccgccgagccaccatcatgcctgggcacttacaggaaggcttcggctgcgtggtcaccaaccgattcgaccagttatttgacgacgaatcggaccccttcgaggtgctgaaggcagcagagaacaagaaaaaagaagccggcgggggcggcgttgggggccctggggccaagagcgcagctcaggccgcggcccagaccaactccaacgcggcaggcaaacagctgcgcaaggagtcccagaaagaccgcaagaacccgctgccccccagcgttggcgtggttgacaagaaagaggagacgcagccgcccgtggcgcttaagaaagaaggaataagacgagttggaagaagacctgatcaacaacttcagggtgaagggaaaataattgatagaagaccagaaaggcgaccacctcgtgaacgaagattcgaaaagccacttgaagaaaagggtgaaggaggcgaattttcagttgatagaccgattattgaccgacctattcgaggtcgtggtggtcttggaagaggtcgagggggccgtggacgtggaatgggccgaggagatggatttgattctcgtggcaaacgtgaatttgataggcatagtggaagtgatagatctggcctgaagcacgaggacaaacgtggaggtagcggatctcacaactggggaactgtcaaagacgaattaactgacttggatcaatcaaatgtgactgaggaaacacctgaaggtgaagaacatcatccagtggcagacactgaaaataaggagaatgaagttgaagaggtaaaagaggagggtccaaaagagatgactttggatgagtggaaggctattcaaaataaggaccgggcaaaagtagaatttaatatccgaaaaccaaatgaaggtgctgatgggcagtggaagaagggatttgttcttcataaatcaaagagtgaagaggctcatgctgaagattcggttatggaccatcatttccggaagccagcaaatgatataacgtctcagctggagatcaattttggagaccttggccgcccaggacgtggcggcaggggaggacgaggtggacgtgggcgtggtgggcgcccaaaccgtggcagcaggaccgacaagtcaagtgcttctgctcctgatgtggatgacccagaggcattcccagctctggcttaactggatgccataagacaaccctggttcctttgtgaacccttctgttcaaagcttttgcatgcttaaggattccaaacgactaagaaattaaaaaaaaaaagactgtcattcataccattcacacctaaagactgaattttatctgttttaaaaatgaacttctcccgctacacagaagtaacaaatatggtagtcagttttgtatttagaaatgtattggtagcagggatgttttcataattttcagagattatgcattcttcatgaatacttttgtattgctgcttgcaaatatgcatttccaaacttgaaatataggtgtgaacagtgtgtaccagtttaaagctttcacttcatttgtgttttttaattaaggatttagaagttcccccaattacaaactggttttaaatattggacatactggttttaatacctgctttgcatattcacacatggtcaactgggacatgttaaactttgatttgtcaaattttatgctgtgtggaatactaactatatgtattttaacttagttttaatattttcatttttggggaaaaatcttttttcacttctcatgatagctgttatatatatatgctaaatctttatatacagaaatatcagtacttgaacaaattcaaagcacatttggtttattaacccttgctccttgcatggctcattaggttcaaattataactgatttacattttcagctatatttactttttaaatgcttgagtttcccattttaaaatctaaactagacatcttaattggtgaaagttgtttaaactacttattgttggtaggcacatcgtgtcaagtgaagtagttttataggtatgggttttttctcccccttcaccagggtgggtggaataagttgatttggccaatgtgtaatatttaaactgttctgtaaaataagtgtctggccatttggtatgatttctgtgtgtgaaaggtcccaaaatcaaaatggtacatccataatcagccaccatttaacccttccttgttctaaaacaaaaaccaaagggcgctggttggtagggtgaggtgggggagtattttaatttttggaatttgggaagcagacagctttactttgtaaggttggaacagcagcactatacatgaaatataaaccaaaaacctttactgtttctaaatttcctagattgctattatttggttgtaagttgagtattccacagaaagtggtaattatctcttctctcttcctccattagaaaattaggtaaataatggattcctataatgggagcatcaccacttattaaaacacacatagaatgatgaattaaaaaagttttctaggattgtcttttattctgccacatttattgataaacagtgaaggaatttttaaaaaatttttaagaattgtttgtcacgtcatttttagaaatgttctacctgtatatggtaatgtccagttttaaaaatattggacatcttcaatcttaaacatttctatttagctgattggttctcacatatacttctaaaagaaacttttatgttataagagttactttttggataagatttattaatctcagttacctactattctgacattttaggaaggaggtaattgtttttaatgatggataaacttgtgctggtgttttggatcttatgatgctgagcatgttctgcactggtgctaatgtctaatataattttatatttacacacatacgtgctacccagagattaatttagtccatatgaactattgacccattgttcattgagacagcaacatacgcactcctaaatcagtgtgtttagacttttcaagtatctaactcatttccaaacatgtaccatgttttataaacctcttgatttccagcaacatactatagaaaacacctgctactcaaaacacaacttctcagtgtcatccattgctgtcgtgagagacaacatagcaatatctggtatgttgcaagctttcaagatagcctgaacttaaaaagttggtgcattagttgtatctgatggatataaatttgcctcctagttcactttgtgtcaagagctaaaactgtgaacctaactttctcttattggtgggtaataactgaaaataaagatttattttcatgctcacttcttaaaagtcataaaaacaatcaaataggatcatgtttattgtcatgtgtttcctggtttctgacctgtgtgcacacccctgtgtgtttataatttttaaattgaattttatatggggtttttatttgctaaaaaccaggctgttgaatcacatttgggaagggtacttatcttaatgactaatgacttaattgggaaagttgaattcttgtaaaatacaaaatccaaggacttcttggatttaatctgattgtcacttcttagcagatcacttttttgataatgaaagttaagcatactgaatgctacttttgattgacaaactggctataatagtctaggggaaaaatccctaaacagataaagattcctaaagtaatggtggcagctgatgtttcagtgaacttttatcttgatgcgtttaaatggaagtaatgccagacctgagatttttaaggcatttttacagcttgtattgaaatgattggagacatggtttctttattagctattttgagacctgtggagttaagcaagacttttaaaaattggcaccatatacatctagttagttcctttactcttatttttttaaataaaagtagtacacatcatttccagggttgtaaatatatttggggcttgtttttggtatggatttaaaaggaggatattaagtattcattctaattttgttatttttctagttgccagagatggttgcactgaaatagaacagggagttgcatacaaagcctaaatgtgtattggatttcgaaaatactaggttggtgcaattggttttgtaccaacctaacatgtctttaggaaagtaccatcatgtggaaggaaacaacaggtgttaaaaggttcaaaggaatgagaaataggaagttactagaacctaactgatgttgaccttagaggtaagattattcaggtatattagtggacctccagtccaatggtatagcaaattccagggatctcaggtgcatgcaattttactttctaaagtaaacacttagaaaatagattataacccagacgttttggattatactgagacaaatatgtaaataagttttagcaagtctgaacatgtaccagcgagatcttcaggttaactaagaaaagcccagaaacttcattatttactgtgctttgtatggcataactggtaacaaggcagtaaaatgatacatatttgaactggaccatagtaattaaatgatttatcaatatcatttgcaagataattgtcaggttgagttaatagtaagtggcagcttcccagaaatttgggttatttggcctaagctgtgccctgggattacctcttcatcttccttgacttttaagttcaaatttggaggttatgtgaagtgattgaaataaatctttcaggctgaggaagtcggtaatttcaagaatatagtgaaaacaaggttgtaatctaaacatgagaagcttaagtttaggaaatggttagaatataaattgctaaagccatcatgattttggccacagatgaaaatatgaacactggaaatgagcgccatttaaatgagatgctgtatgtaagccaggggtcagcaaagttcagcctgtgacctggtgtgtgtgggggtgtgtgtgtgtgtgtgtgtgtgtgtgtgtgtgtccgtgtccctgagttaagaatggtttttaggcttgtataggattaaaaaaaaaaaaaacccacagaaaaatgtaggcagcccagcataagataccgcctttcacagaaatgtttgctgaccccggaactgtcactctcgggttacaagagtttgtttctttgaaacagtctggctctgtcacccaggctggagtgcagtggcatgatctcaggtcactgcagcctccacctcccgggttcaagcaattctgcctcagcctcctgagtagctgggattacaggtgtgcaccaccacagacagctaattttacaggtgtacaccaccacacccaagaatcacttgaacccgggaggtgggggttgcagtgagccaagatcatagcactgtactccagtctgggtgacacactgtctgaaaaataaaagtttagttctaggtacaaattaagtggtctacccaacaggaagctgtgaaattagaagtaattttaaagcatactttacacctctatataatcaaagtaagggcaagataaaacttgttagtaaaacatgttttattattttttagataggtagcctgcaacataaaatatattttgaaagctgttaaggggtgtataatctgttaaaaaataccatgattagtatttcacatttagtgactcagatccctttgtgtaagtcctttgcgttgtgcaaagaggtttttctatgagatgagaattatgaacacttcatataggtaaattccataggttgagctggggcagaaattaatggctcctggagattgcatctttttttttttttttttgagcttagaattcccatttggacagaatttagcttttgtgctgttgattacttctgtactaaactggtagccaattgttcacttctaaatggaagggaaaaagttacccacacaagttagaaaatgatttaccgaattatttttttgagttagtatgtatatactgttttaaatcagtaatgtttgttccttttgctgcccatttgggagtatgtggcaattcctagtgctcttgtatgacattactcttcttgagacttgtatatgcaagaaagtatatataaaagatgcctggtggtaactttgtatctgagttctgattcattatggacttttagaaatctatttagataattggttcatactaggtgctcaattactctgaccttgtgtggcttaatccttaaatagttgctttaggtgttactgggtggaagcatggaaagtgaagggctaatattaaggatttttatgtattactgagtagggaaagtgggaagtagcttatctttggacagttgtattactttgcactaatcaccttgtttgcagttgtagctgattcagttctagattttaggaccaaaaagatctctaatttaaagaaacagtttttatatacctagaatgaagattctgtttaaagcggttttggttaacttggttcttgacatttgcctaaaattttgttggattgggactaaaatgttctattagccaatgaataacgtccaagtaaatttttgttttattttgggaa

SEQ ID NO: 180650 - DNA, 3482 bp, Homo sapiens
  Payload ID: 15575
  Gene Symbol: SERBP1
  Gene Name: SERPINE1 mRNA binding protein 1
  Uniprot ID: Q8NC51
  ENST ID: ENST00000370995
  CDS Start-End: 87-1313
atcttgtgggaagagctgaagcaggcgctcttggctcggcgcggcccgctgcaatccgtggaggaacgcgccgccgagccaccatcatgcctgggcacttacaggaaggcttcggctgcgtggtcaccaaccgattcgaccagttatttgacgacgaatcggaccccttcgaggtgctgaaggcagcagagaacaagaaaaaagaagccggcgggggcggcgttgggggccctggggccaagagcgcagctcaggccgcggcccagaccaactccaacgcggcaggcaaacagctgcgcaaggagtcccagaaagaccgcaagaacccgctgccccccagcgttggcgtggttgacaagaaagaggagacgcagccgcccgtggcgcttaagaaagaaggaataagacgagttggaagaagacctgatcaacaacttcagggtgaagggaaaataattgatagaagaccagaaaggcgaccacctcgtgaacgaagattcgaaaagccacttgaagaaaagggtgaaggaggcgaattttcagttgatagaccgattattgaccgacctattcgaggtcgtggtggtcttggaagaggtcgagggggccgtggacgtggaatgggccgaggagatggatttgattctcgtggcaaacgtgaatttgataggcatagtggaagtgatagatcttctttttcacattacagtggcctgaagcacgaggacaaacgtggaggtagcggatctcacaactggggaactgtcaaagacgaattaacagagtcccccaaatacattcagaaacaaatatcttataattacagtgacttggatcaatcaaatgtgactgaggaaacacctgaaggtgaagaacatcatccagtggcagacactgaaaataaggagaatgaagttgaagaggtaaaagaggagggtccaaaagagatgactttggatgagtggaaggctattcaaaataaggaccgggcaaaagtagaatttaatatccgaaaaccaaatgaaggtgctgatgggcagtggaagaagggatttgttcttcataaatcaaagagtgaagaggctcatgctgaagattcggttatggaccatcatttccggaagccagcaaatgatataacgtctcagctggagatcaattttggagaccttggccgcccaggacgtggcggcaggggaggacgaggtggacgtgggcgtggtgggcgcccaaaccgtggcagcaggaccgacaagtcaagtgcttctgctcctgatgtggatgacccagaggcattcccagctctggcttaactggatgccataagacaaccctggttcctttgtgaacccttctgttcaaagcttttgcatgcttaaggattccaaacgactaagaaattaaaaaaaaaaagactgtcattcataccattcacacctaaagactgaattttatctgttttaaaaatgaacttctcccgctacacagaagtaacaaatatggtagtcagttttgtatttagaaatgtattggtagcagggatgttttcataattttcagagattatgcattcttcatgaatacttttgtattgctgcttgcaaatatgcatttccaaacttgaaatataggtgtgaacagtgtgtaccagtttaaagctttcacttcatttgtgttttttaattaaggatttagaagttcccccaattacaaactggttttaaatattggacatactggttttaatacctgctttgcatattcacacatggtcaactgggacatgttaaactttgatttgtcaaattttatgctgtgtggaatactaactatatgtattttaacttagttttaatattttcatttttggggaaaaatcttttttcacttctcatgatagctgttatatatatatgctaaatctttatatacagaaatatcagtacttgaacaaattcaaagcacatttggtttattaacccttgctccttgcatggctcattaggttcaaattataactgatttacattttcagctatatttactttttaaatgcttgagtttcccattttaaaatctaaactagacatcttaattggtgaaagttgtttaaactacttattgttggtaggcacatcgtgtcaagtgaagtagttttataggtatgggttttttctcccccttcaccagggtgggtggaataagttgatttggccaatgtgtaatatttaaactgttctgtaaaataagtgtctggccatttggtatgatttctgtgtgtgaaaggtcccaaaatcaaaatggtacatccataatcagccaccatttaacccttccttgttctaaaacaaaaaccaaagggcgctggttggtagggtgaggtgggggagtattttaatttttggaatttgggaagcagacagctttactttgtaaggttggaacagcagcactatacatgaaatataaaccaaaaacctttactgtttctaaatttcctagattgctattatttggttgtaagttgagtattccacagaaagtggtaattatctcttctctcttcctccattagaaaattaggtaaataatggattcctataatgggagcatcaccacttattaaaacacacatagaatgatgaattaaaaaagttttctaggattgtcttttattctgccacatttattgataaacagtgaaggaatttttaaaaaatttttaagaattgtttgtcacgtcatttttagaaatgttctacctgtatatggtaatgtccagttttaaaaatattggacatcttcaatcttaaacatttctatttagctgattggttctcacatatacttctaaaagaaacttttatgttataagagttactttttggataagatttattaatctcagttacctactattctgacattttaggaaggaggtaattgtttttaatgatggataaacttgtgctggtgttttggatcttatgatgctgagcatgttctgcactggtgctaatgtctaatataattttatatttacacacatacgtgctacccagagattaatttagtccatatgaactattgacccattgttcattgagacagcaacatacgcactcctaaatcagtgtgtttagacttttcaagtatctaactcatttccaaacatgtaccatgttttataaacctcttgatttccagcaacatactatagaaaacacctgctactcaaaacacaacttctcagtgtcatccattgctgtcgtgagagacaacatagcaatatctggtatgttgcaagctttcaagatagcctgaacttaaaaagttggtgcattagttgtatctgatggatataaatttgcctcctagttcactttgtgtcaagagctaaaactgtgaacctaactttctcttattggtgggtaataactgaaaataaagatttattttcatgctcacttcttaaaagtcat

SEQ ID NO: 180651 - DNA, 727 bp, Homo sapiens
  Payload ID: 15576
  Gene Symbol: SRRT
  Gene Name: serrate, RNA effector molecule
  ENST ID: ENST00000423692
  CDS Start-End: 1-232
cgtccacatcatgcagcaccatgtcctgcctatccaggccaggctgggcagcattgcagagattgacctgggtgtgccgccgcccgtgatgaagaccttcaaggagtttctcctctccctggatgactcggtggatgagacggaggccgtcaagcgctataatgactacaagctggatttccggaggcaacagatgcaggatttcttcctggcgcacaaagatgaggagtgagccagaactgggaactacacccgctcatcgacggagctcggagcaaacccacctccacccccaccatacccagcccatacatgagcccctgggctgagctgcgcggccccggccaggcagacaggccagggcactgctgtgcacaatgcagcggtttagctgaatgtgattgctcaggcagctagccagtcaggccccactgcggagtcccgcgtgggcatctcggccgggcgcccagccaggagccagccggtggcccaccagccagcatgggccctgggcgccgctagttaaatcttgagctctgtttgaccaagcggccaaggtttcggtctaagtaccacccagatgaggtggggaagcgtcggcaggaggcccggggggccctgcaaaaccgactgagggtcttcctgtccctcatggagactggctggtttgataaccttctcctggacatagacaaagctgatgccattgtcaagatgctggatgcag

SEQ ID NO: 180652 - DNA, 446 bp, Homo sapiens
  Payload ID: 15576
  Gene Symbol: SRRT
  Gene Name: serrate, RNA effector molecule
  ENST ID: ENST00000445337
  CDS Start-End: 1-446
ggtcctgagtttgtgcgcaaacatatcttcaacaagcatgcagagaaaattgaggaagtgaaaaaggaagtcgcgttttttaacaacttcctcactgatgctaagcgcccagctctgcctgagatcaagccagcccagccacctggccccgcccagatactccccccaggtttgaccccaggactcccctacccacaccagactccccagggcctgatgccctatggtcagccccggcccccgatcttgggctatggaggatggttcgtggagacccaagggccattgtggaatatcgggacctggatgccccagacgatgttgatttcttttgagccgtcccccgttcctcagtcctgtatcatccatacttgtactaccttgtcctatgaagctctgagaattttttgtacgatcagccttactgctaataaaagcacttccac

SEQ ID NO: 180653 - DNA, 448 bp, Homo sapiens
  Payload ID: 15576
  Gene Symbol: SRRT
  Gene Name: serrate, RNA effector molecule
  ENST ID: ENST00000449389
  CDS Start-End: 1-142
gcggccgctgcataagacctgctccctcttcatgcgcaacatcgcgcccaacatctcccgggccgagatcatctccctttgtaaaaggtacccaggctttatgcgggtggcgctctcagagccccagccagagaggaggtgagtaactcggtttttccgtcgtggctgggtgaccttcgaccgcagtgttaacattaaagagatctgttggaacctgcagaacatccgtctccgggagtgtgagctgagccctggtgtgaacagggacctgacccggcgcgttcgcaacatcaacggcatcacccagcacaagcagattgtgcgcaacgacatcaagctggcggccaagctgatccacacgctggatgacaggacacagctttgggcctcagaaccagggacgcctcccctgcccacgagcctgccctcgcaaaacccgatcttgaag

SEQ ID NO: 180654 - DNA, 397 bp, Homo sapiens
  Payload ID: 15576
  Gene Symbol: SRRT
  Gene Name: serrate, RNA effector molecule
  ENST ID: ENST00000431645
  CDS Start-End: 62-397
gggcgggcgcggagaaactcggggcgagtggaggtgttggagccgcgttctcaggcctaggatggccccctcagaccgtgccatgggtgacagtgatgacgagtacgatcgaaggcgcagggacaagttcagaagagagcgcagcgactacgaccgttcccgcgagagagatgaaagacgtcgaggggacgattggaatgacagagagtgggaccgtggccgtgagcgccgtagtcggggtgaatatcgggactatgaccggaatcggcgagagcgcttctcgccacctcgccacgaactcagcccgccacagaagcgcatgaggagagactgggatgagcacagctctgacccataccacagtggctatgagatgccctatgctggggggggtggg

SEQ ID NO: 180655 - DNA, 1607 bp, Homo sapiens
  Payload ID: 15576
  Gene Symbol: SRRT
  Gene Name: serrate, RNA effector molecule
  ENST ID: ENST00000448764
  CDS Start-End: 1-1500
gagtcggagtcagagagcggccaggctgaggaggagaaggaggaggccgaagaagcgctcaaggagaaggagaagcccaaggaagaagaatgggagaagcccaaggacgccgcggggctggagtgcaagccgcggccgctgcataagacctgctccctcttcatgcgcaacatcgcgcccaacatctcccgggccgagatcatctccctttgtaaaaggtacccaggctttatgcgggtggcgctctcagagccccagccagagaggaggtttttccgtcgtggctgggtgaccttcgaccgcagtgttaacattaaagagatctgttggaacctgcagaacatccgtctccgggagtgtgagctgagccctggtgtgaacagggacctgacccggcgcgttcgcaacatcaacggcatcacccagcacaagcagattgtgcgcaacgacatcaagctggcggccaagctgatccacacgctggatgacaggacacagctttgggcctcagaaccagggacgcctcccctgcccacgagcctgccctcgcaaaacccgatcttgaagaatatcaccgactacctgatcgaggaagtaagcgccgaggaggaggagctgctggggagcagcgggggcgctcctcctgaggagcctcctaaggaagggaacccggcagagatcaacgtggagcgggatgagaagttgattaaggtcttggacaagctcctcctttacctgcgcatcgtgcattccttggattattacaacacctgtgagtaccccaacgaggacgagatgcccaatcgctgtgggatcatccacgttcgggggcccatgccacccaaccgcatcagtcacggggaagtgctggagtggcagaagacttttgaggagaagctcacgccgttgctgagtgtgcgggagtcactctcagaggaagaggcccagaagatggggcgcaaagacccagagcaggaagtggagaagttcgtcacctccaacacgcaggaactgggcaaggataagtggctgtgtcctctcagtggcaagaaattcaagggtcctgagtttgtgcgcaaacatatcttcaacaagcatgcagagaaaattgaggaagtgaaaaaggaagtcgcgttttttaacaacttcctcactgatgctaagcgcccagctctgcctgagatcaagccagcccagccacctggccccgcccagatactccccccaggtttgaccccaggactcccctacccacaccagactccccagggcctgatgccctatggtcagccccggcccccgatcttgggctatggagtccccacaggaggccctccatacccccatgccccgtatggtgctggtcgagggaactatgatgccttccgaggccagggaggttatcctgggaaacctcgcaacaggatggttcgtggagacccaagggccattgtggaatatcgggacctggatgccccagacgatgttgatttcttttgagccgtcccccgttcctcagtcctgtatcatccatacttgtactaccttgtcctatgaagctctgagaattttttgtacgatcagccttactgctaataaaagcactt

SEQ ID NO: 180656 - DNA, 2955 bp, Homo sapiens
  Payload ID: 15576
  Gene Symbol: SRRT
  Gene Name: serrate, RNA effector molecule
  Uniprot ID: Q9BXP5
  ENST ID: ENST00000618262
  CDS Start-End: 222-2840
gggtgacgcaggcgcagcgcgggctgcgcgcgctactgcccatccccggttgtcccacttttgttcgcctctcttcggccctctactcaagagctccgtctccgtctcgccctcctcgaagtcctcgtcgcgcgcccgcgacccaggtcgccctgaaatctagcccgtccgagcgcgagtccaacggccgcggccgcaccaaggccccctcagaccgtgccatgggtgacagtgatgacgagtacgatcgaaggcgcagggacaagttcagaagagagcgcagcgactacgaccgttcccgcgagagagatgaaagacgtcgaggggacgattggaatgacagagagtgggaccgtggccgtgagcgccgtagtcggggtgaatatcgggactatgaccggaatcggcgagagcgcttctcgccacctcgccacgaactcagcccgccacagaagcgcatgaggagagactgggatgagcacagctctgacccataccacagtggctatgagatgccctatgctggggggggtgggggcccaacttatggcccccctcagccctggggccaccctgacgtccacatcatgcagcaccatgtcctgcctatccaggccaggctgggcagcattgcagagattgacctgggtgtgccgccgcccgtgatgaagaccttcaaggagtttctcctctccctggatgactcggtggatgagacggaggccgtcaagcgctataatgactacaagctggatttccggaggcaacagatgcaggatttcttcctggcgcacaaagatgaggagtggtttcggtctaagtaccacccagatgaggtggggaagcgtcggcaggaggcccggggggccctgcaaaaccgactgagggtcttcctgtccctcatggagactggctggtttgataaccttctcctggacatagacaaagctgatgccattgtcaagatgctggatgcagccgtgattaagatggaaggaggcacggagaatgatcttcgcatcctggagcaggaggaggaggaggagcaggcaggaaagcctggggagcccagcaagaaagaagaaggacgggctggagcaggcctaggggacggggagcgcaaaaccaacgacaaggatgagaagaaggaagacggcaagcaggctgagaatgacagttctaatgatgacaaaacaaagaagtcggagggtgatggggacaaggaagagaagaaagaagactccgagaaggaagccaaaaagagtagcaagaagcggaaccggaagcacagtggtgacgacagctttgacgagggcagcgtgtcagagtctgagtcggagtcagagagcggccaggctgaggaggagaaggaggaggccgaagaagcgctcaaggagaaggagaagcccaaggaagaagaatgggagaagcccaaggacgccgcggggctggagtgcaagccgcggccgctgcataagacctgctccctcttcatgcgcaacatcgcgcccaacatctcccgggccgagatcatctccctttgtaaaaggtacccaggctttatgcgggtggcgctctcagagccccagccagagaggaggtttttccgtcgtggctgggtgaccttcgaccgcagtgttaacattaaagagatctgttggaacctgcagaacatccgtctccgggagtgtgagctgagccctggtgtgaacagggacctgacccggcgcgttcgcaacatcaacggcatcacccagcacaagcagattgtgcgcaacgacatcaagctggcggccaagctgatccacacgctggatgacaggacacagctttgggcctcagaaccagggacgcctcccctgcccacgagcctgccctcgcaaaacccgatcttgaagaatatcaccgactacctgatcgaggaagtaagcgccgaggaggaggagctgctggggagcagcgggggcgctcctcctgaggagcctcctaaggaagggaacccggcagagatcaacgtggagcgggatgagaagttgattaaggtcttggacaagctcctcctttacctgcgcatcgtgcattccttggattattacaacacctgtgagtaccccaacgaggacgagatgcccaatcgctgtgggatcatccacgttcgggggcccatgccacccaaccgcatcagtcacggggaagtgctggagtggcagaagacttttgaggagaagctcacgccgttgctgagtgtgcgggagtcactctcagaggaagaggcccagaagatggggcgcaaagacccagagcaggaagtggagaagttcgtcacctccaacacgcaggaactgggcaaggataagtggctgtgtcctctcagtggcaagaaattcaagggtcctgagtttgtgcgcaaacatatcttcaacaagcatgcagagaaaattgaggaagtgaaaaaggaagtcgcgttttttaacaacttcctcactgatgctaagcgcccagctctgcctgagatcaagccagcccagccacctggccccgcccagagtttgaccccaggactcccctacccacaccagactccccagggcctgatgccctatggtcagccccggcccccgatcttgggctatggagctggtgctgtccgccctgcagtccccacaggaggccctccatacccccatgccccgtatggtgctggtcgagggaactatgatgccttccgaggccagggaggttatcctgggaaacctcgcaacaggatggttcgtggagacccaagggccattgtggaatatcgggacctggatgccccagacgatgttgatttcttttgagccgtcccccgttcctcagtcctgtatcatccatacttgtactaccttgtcctatgaagctctgagaattttttgtacgatcagccttactgctaataaaagcacttccacaggg

SEQ ID NO: 180657 - DNA, 2905 bp, Homo sapiens
  Payload ID: 15576
  Gene Symbol: SRRT
  Gene Name: serrate, RNA effector molecule
  Uniprot ID: Q9BXP5
  ENST ID: ENST00000611405
  CDS Start-End: 160-2790
gttcgcctctcttcggccctctactcaagagctccgtctccgtctcgccctcctcgaagtcctcgtcgcgcgcccgcgacccaggtcgccctgaaatctagcccgtccgagcgcgagtccaacggccgcggccgcaccaaggccccctcagaccgtgccatgggtgacagtgatgacgagtacgatcgaaggcgcagggacaagttcagaagagagcgcagcgactacgaccgttcccgcgagagagatgaaagacgtcgaggggacgattggaatgacagagagtgggaccgtggccgtgagcgccgtagtcggggtgaatatcgggactatgaccggaatcggcgagagcgcttctcgccacctcgccacgaactcagcccgccacagaagcgcatgaggagagactgggatgagcacagctctgacccataccacagtggctatgagatgccctatgctggggggggtgggggcccaacttatggcccccctcagccctggggccaccctgacgtccacatcatgcagcaccatgtcctgcctatccaggccaggctgggcagcattgcagagattgacctgggtgtgccgccgcccgtgatgaagaccttcaaggagtttctcctctccctggatgactcggtggatgagacggaggccgtcaagcgctataatgactacaagctggatttccggaggcaacagatgcaggatttcttcctggcgcacaaagatgaggagtggtttcggtctaagtaccacccagatgaggtggggaagcgtcggcaggaggcccggggggccctgcaaaaccgactgagggtcttcctgtccctcatggagactggctggtttgataaccttctcctggacatagacaaagctgatgccattgtcaagatgctggatgcagccgtgattaagatggaaggaggcacggagaatgatcttcgcatcctggagcaggaggaggaggaggagcaggcaggaaagcctggggagcccagcaagaaagaagaaggacgggctggagcaggcctaggggacggggagcgcaaaaccaacgacaaggatgagaagaaggaagacggcaagcaggctgagaatgacagttctaatgatgacaaaacaaagaagtcggagggtgatggggacaaggaagagaagaaagaagactccgagaaggaagccaaaaagagtagcaagaagcggaaccggaagcacagtggtgacgacagctttgacgagggcagcgtgtcagagtctgagtcggagtcagagagcggccaggctgaggaggagaaggaggaggccgaagaagcgctcaaggagaaggagaagcccaaggaagaagaatgggagaagcccaaggacgccgcggggctggagtgcaagccgcggccgctgcataagacctgctccctcttcatgcgcaacatcgcgcccaacatctcccgggccgagatcatctccctttgtaaaaggtacccaggctttatgcgggtggcgctctcagagccccagccagagaggaggtttttccgtcgtggctgggtgaccttcgaccgcagtgttaacattaaagagatctgttggaacctgcagaacatccgtctccgggagtgtgagctgagccctggtgtgaacagggacctgacccggcgcgttcgcaacatcaacggcatcacccagcacaagcagattgtgcgcaacgacatcaagctggcggccaagctgatccacacgctggatgacaggacacagctttgggcctcagaaccagggacgcctcccctgcccacgagcctgccctcgcaaaacccgatcttgaagaatatcaccgactacctgatcgaggaagtaagcgccgaggaggaggagctgctggggagcagcgggggcgctcctcctgaggagcctcctaaggaagggaacccggcagagatcaacgtggagcgggatgagaagttgattaaggtcttggacaagctcctcctttacctgcgcatcgtgcattccttggattattacaacacctgtgagtaccccaacgaggacgagatgcccaatcgctgtgggatcatccacgttcgggggcccatgccacccaaccgcatcagtcacggggaagtgctggagtggcagaagacttttgaggagaagctcacgccgttgctgagtgtgcgggagtcactctcagaggaagaggcccagaagatggggcgcaaagacccagagcaggaagtggagaagttcgtcacctccaacacgcaggaactgggcaaggataagtggctgtgtcctctcagtggcaagaaattcaagggtcctgagtttgtgcgcaaacatatcttcaacaagcatgcagagaaaattgaggaagtgaaaaaggaagtcgcgttttttaacaacttcctcactgatgctaagcgcccagctctgcctgagatcaagccagcccagccacctggccccgcccagatactccccccaggtttgaccccaggactcccctacccacaccagactccccagggcctgatgccctatggtcagccccggcccccgatcttgggctatggagctggtgctgtccgccctgcagtccccacaggaggccctccatacccccatgccccgtatggtgctggtcgagggaactatgatgccttccgaggccagggaggttatcctgggaaacctcgcaacaggatggttcgtggagacccaagggccattgtggaatatcgggacctggatgccccagacgatgttgatttcttttgagccgtcccccgttcctcagtcctgtatcatccatacttgtactaccttgtcctatgaagctctgagaattttttgtacgatcagccttactgctaataaaagcacttccacaggg

SEQ ID NO: 180658 - DNA, 2964 bp, Homo sapiens
  Payload ID: 15576
  Gene Symbol: SRRT
  Gene Name: serrate, RNA effector molecule
  Uniprot ID: Q9BXP5
  ENST ID: ENST00000614484
  CDS Start-End: 222-2849
gggtgacgcaggcgcagcgcgggctgcgcgcgctactgcccatccccggttgtcccacttttgttcgcctctcttcggccctctactcaagagctccgtctccgtctcgccctcctcgaagtcctcgtcgcgcgcccgcgacccaggtcgccctgaaatctagcccgtccgagcgcgagtccaacggccgcggccgcaccaaggccccctcagaccgtgccatgggtgacagtgatgacgagtacgatcgaaggcgcagggacaagttcagaagagagcgcagcgactacgaccgttcccgcgagagagatgaaagacgtcgaggggacgattggaatgacagagagtgggaccgtggccgtgagcgccgtagtcggggtgaatatcgggactatgaccggaatcggcgagagcgcttctcgccacctcgccacgaactcagcccgccacagaagcgcatgaggagagactgggatgagcacagctctgacccataccacagtggctatgagatgccctatgctggggggggtgggggcccaacttatggcccccctcagccctggggccaccctgacgtccacatcatgcagcaccatgtcctgcctatccaggccaggctgggcagcattgcagagattgacctgggtgtgccgccgcccgtgatgaagaccttcaaggagtttctcctctccctggatgactcggtggatgagacggaggccgtcaagcgctataatgactacaagctggatttccggaggcaacagatgcaggatttcttcctggcgcacaaagatgaggagtggtttcggtctaagtaccacccagatgaggtggggaagcgtcggcaggaggcccggggggccctgcaaaaccgactgagggtcttcctgtccctcatggagactggctggtttgataaccttctcctggacatagacaaagctgatgccattgtcaagatgctggatgcagccgtgattaagatggaaggaggcacggagaatgatcttcgcatcctggagcaggaggaggaggaggagcaggcaggaaagcctggggagcccagcaagaaagaagaaggacgggctggagcaggcctaggggacggggagcgcaaaaccaacgacaaggatgagaagaaggaagacggcaagcaggctgagaatgacagttctaatgatgacaaaacaaagaagtcggagggtgatggggacaaggaagagaagaaagaagactccgagaaggaagccaaaaagagtagcaagaagcggaaccggaagcacagtggtgacgacagctttgacgagggcagcgtgtcagagtctgagtcggagtcagagagcggccaggctgaggaggagaaggaggaggccgaagcgctcaaggagaaggagaagcccaaggaagaagaatgggagaagcccaaggacgccgcggggctggagtgcaagccgcggccgctgcataagacctgctccctcttcatgcgcaacatcgcgcccaacatctcccgggccgagatcatctccctttgtaaaaggtacccaggctttatgcgggtggcgctctcagagccccagccagagaggaggtttttccgtcgtggctgggtgaccttcgaccgcagtgttaacattaaagagatctgttggaacctgcagaacatccgtctccgggagtgtgagctgagccctggtgtgaacagggacctgacccggcgcgttcgcaacatcaacggcatcacccagcacaagcagattgtgcgcaacgacatcaagctggcggccaagctgatccacacgctggatgacaggacacagctttgggcctcagaaccagggacgcctcccctgcccacgagcctgccctcgcaaaacccgatcttgaagaatatcaccgactacctgatcgaggaagtaagcgccgaggaggaggagctgctggggagcagcgggggcgctcctcctgaggagcctcctaaggaagggaacccggcagagatcaacgtggagcgggatgagaagttgattaaggtcttggacaagctcctcctttacctgcgcatcgtgcattccttggattattacaacacctgtgagtaccccaacgaggacgagatgcccaatcgctgtgggatcatccacgttcgggggcccatgccacccaaccgcatcagtcacggggaagtgctggagtggcagaagacttttgaggagaagctcacgccgttgctgagtgtgcgggagtcactctcagaggaagaggcccagaagatggggcgcaaagacccagagcaggaagtggagaagttcgtcacctccaacacgcaggaactgggcaaggataagtggctgtgtcctctcagtggcaagaaattcaagggtcctgagtttgtgcgcaaacatatcttcaacaagcatgcagagaaaattgaggaagtgaaaaaggaagtcgcgttttttaacaacttcctcactgatgctaagcgcccagctctgcctgagatcaagccagcccagccacctggccccgcccagatactccccccaggtttgaccccaggactcccctacccacaccagactccccagggcctgatgccctatggtcagccccggcccccgatcttgggctatggagctggtgctgtccgccctgcagtccccacaggaggccctccatacccccatgccccgtatggtgctggtcgagggaactatgatgccttccgaggccagggaggttatcctgggaaacctcgcaacaggatggttcgtggagacccaagggccattgtggaatatcgggacctggatgccccagacgatgttgatttcttttgagccgtcccccgttcctcagtcctgtatcatccatacttgtactaccttgtcctatgaagctctgagaattttttgtacgatcagccttactgctaataaaagcacttccacaggg

SEQ ID NO: 180659 - DNA, 556 bp, Homo sapiens
  Payload ID: 15576
  Gene Symbol: SRRT
  Gene Name: serrate, RNA effector molecule
  ENST ID: ENST00000614370
  CDS Start-End: 185-337
gcccatccccggttgtcccacttttgttcgcctctcttcggccctctactcaagagctccgtctccgtctcgccctcctcgaagtcctcgtcgcgcgcccgcgacccaggtcgccctgaaatctagcccgtccgagcgcgagtccaacggccgcggccgcaccaaggccccctcagaccgtgccatgggtgacagtgatgacgagtacgatcgaaggcgcagggacaagttcagaagagagcgcagcgactacgaccgttcccgcgagagagatgaaagacgtcgaggggacgattggaatgacagagacagggtctccctctgtcacccgggctgagtgcactggtgcagtcgaagcttgctgcagccgcgacctgcccagagtgggaccgtggccgtgagcgccgtagtcggggtgaatatcgggactatgaccggaatcggcgagagcgcttctcgccacctcgccacgaactcagcccgccacagaagcgcatgaggagagactgggatgagcacagctctgacccataccacagtggctatgagatgccct

SEQ ID NO: 180660 - DNA, 2893 bp, Homo sapiens
  Payload ID: 15576
  Gene Symbol: SRRT
  Gene Name: serrate, RNA effector molecule
  Uniprot ID: Q9BXP5
  ENST ID: ENST00000618411
  CDS Start-End: 163-2778
tttgttcgcctctcttcggccctctactcaagagctccgtctccgtctcgccctcctcgaagtcctcgtcgcgcgcccgcgacccaggtcgccctgaaatctagcccgtccgagcgcgagtccaacggccgcggccgcaccaaggccccctcagaccgtgccatgggtgacagtgatgacgagtacgatcgaaggcgcagggacaagttcagaagagagcgcagcgactacgaccgttcccgcgagagagatgaaagacgtcgaggggacgattggaatgacagagagtgggaccgtggccgtgagcgccgtagtcggggtgaatatcgggactatgaccggaatcggcgagagcgcttctcgccacctcgccacgaactcagcccgccacagaagcgcatgaggagagactgggatgagcacagctctgacccataccacagtggctatgagatgccctatgctggggggggtgggggcccaacttatggcccccctcagccctggggccaccctgacgtccacatcatgcagcaccatgtcctgcctatccaggccaggctgggcagcattgcagagattgacctgggtgtgccgccgcccgtgatgaagaccttcaaggagtttctcctctccctggatgactcggtggatgagacggaggccgtcaagcgctataatgactacaagctggatttccggaggcaacagatgcaggatttcttcctggcgcacaaagatgaggagtggtttcggtctaagtaccacccagatgaggtggggaagcgtcggcaggaggcccggggggccctgcaaaaccgactgagggtcttcctgtccctcatggagactggctggtttgataaccttctcctggacatagacaaagctgatgccattgtcaagatgctggatgcagccgtgattaagatggaaggaggcacggagaatgatcttcgcatcctggagcaggaggaggaggaggagcaggcaggaaagcctggggagcccagcaagaaagaagaaggacgggctggagcaggcctaggggacggggagcgcaaaaccaacgacaaggatgagaagaaggaagacggcaagcaggctgagaatgacagttctaatgatgacaaaacaaagaagtcggagggtgatggggacaaggaagagaagaaagaagactccgagaaggaagccaaaaagagtagcaagaagcggaaccggaagcacagtggtgacgacagctttgacgagggcagcgtgtcagagtctgagtcggagtcagagagcggccaggctgaggaggagaaggaggaggccgaagcgctcaaggagaaggagaagcccaaggaagaagaatgggagaagcccaaggacgccgcggggctggagtgcaagccgcggccgctgcataagacctgctccctcttcatgcgcaacatcgcgcccaacatctcccgggccgagatcatctccctttgtaaaaggtacccaggctttatgcgggtggcgctctcagagccccagccagagaggaggtttttccgtcgtggctgggtgaccttcgaccgcagtgttaacattaaagagatctgttggaacctgcagaacatccgtctccgggagtgtgagctgagccctggtgtgaacagggacctgacccggcgcgttcgcaacatcaacggcatcacccagcacaagcagattgtgcgcaacgacatcaagctggcggccaagctgatccacacgctggatgacaggacacagctttgggcctcagaaccagggacgcctcccctgcccacgagcctgccctcgcaaaacccgatcttgaagaatatcaccgactacctgatcgaggaagtaagcgccgaggaggaggagctgctggggagcagcgggggcgctcctcctgaggagcctcctaaggaagggaacccggcagagatcaacgtggagcgggatgagaagttgattaaggtcttggacaagctcctcctttacctgcgcatcgtgcattccttggattattacaacacctgtgagtaccccaacgaggacgagatgcccaatcgctgtgggatcatccacgttcgggggcccatgccacccaaccgcatcagtcacggggaagtgctggagtggcagaagacttttgaggagaagctcacgccgttgctgagtgtgcgggagtcactctcagaggaagaggcccagaagatggggcgcaaagacccagagcaggaagtggagaagttcgtcacctccaacacgcaggaactgggcaaggataagtggctgtgtcctctcagtggcaagaaattcaagggtcctgagtttgtgcgcaaacatatcttcaacaagcatgcagagaaaattgaggaagtgaaaaaggaagtcgcgttttttaacaacttcctcactgatgctaagcgcccagctctgcctgagatcaagccagcccagccacctggccccgcccagagtttgaccccaggactcccctacccacaccagactccccagggcctgatgccctatggtcagccccggcccccgatcttgggctatggagctggtgctgtccgccctgcagtccccacaggaggccctccatacccccatgccccgtatggtgctggtcgagggaactatgatgccttccgaggccagggaggttatcctgggaaacctcgcaacaggatggttcgtggagacccaagggccattgtggaatatcgggacctggatgccccagacgatgttgatttcttttgagccgtcccccgttcctcagtcctgtatcatccatacttgtactaccttgtcctatgaagctctgagaattttttgtacgatcagccttactgctaataaaagcacttccacaggg

SEQ ID NO: 180661 - DNA, 2114 bp, Homo sapiens
  Payload ID: 15577
  Gene Symbol: SERTAD1
  Gene Name: SERTA domain containing 1
  Uniprot ID: Q9UHV2
  ENST ID: ENST00000357949
  CDS Start-End: 160-870
gtagttaggagtctggagtcgtgagccggagtcagaactgcgtctcgcgacccaggcgcgggtttccggaggacagccaacaagcgatgctgccgccgccgtttcctgattggttgtgggtggctacctcttcgttctgattggccgctagtgagcaagatgctgagcaagggtctgaagcggaaacgggaggaggaggaggagaaggaacctctggcagtcgactcctggtggctagatcctggccacacagcggtggcacaggcacccccggccgtggcctctagctccctctttgacctctcagtgctcaagctccaccacagcctgcagcagagtgagccggacctgcggcacctggtgctggtcgtgaacactctgcggcgcatccaggcgtccatggcacccgcggctgccctgccacctgtgcctagcccacctgcagcccccagtgtggctgacaacttactggcaagctcggacgctgccctttcagcctccatggccagcctcctggaggacctcagccacattgagggcctgagtcaggctccccaacccttggcagacgaggggccaccaggccgtagcatcgggggagcagcgcccagcctgggtgccttggacctgctgggcccagccactggctgtctactggacgatgggcttgagggcctgtttgaggatattgacacctctatgtatgacaatgaactttgggcaccagcctctgagggcctcaaaccaggccctgaggatgggccgggcaaggaggaagctccggagctggacgaggccgaattggactacctcatggatgtgctggtgggcacacaggcactggagcgaccgccggggccagggcgctgagccctcgtgctggaatggttgtctggtatctgaactgagcctgctggctggaccaactgtcctcgaaaagacacagctggcttccctagtacagagaacagggcttgggccactttggagagacagaatctagtcctgggcaacttcacatccgtcctcctgtctcagggctggcagggggagcctggaattaccccctagtgatggaatgacagggtctggtggggactgaattccctggccctggggtcatagcttgggctgttccttctctgatacgggaagagaccccaatcagatttttcaaattaaagccagtcctgggaaatctcaaatccgtgtgctgctttgtctctgggcaaatgtgaaggcgagataaaaacatcaaacattttattgggcgtaggctgtgtacgaggcacagtttctaagcacgtcactgtgttaactcatttaatcctataacagccctacaagatcggtagtattatcatccctattttacaggtgagaaaaccaaggttccaagattatcacttgaggtgggttttaaattatgaacttttttttttttttttttgagatagggtctcgctctgtcacccaggttgaagtacagtggtctgatcatggctcactacagcctcaaactcctgggctcaagcgatcctcctaccaggccactttttttttttctttcttttttttttaagacagattcttactctgtcgcccaggctggagtgcagtggcgtgacttcggctcactgcaacctccacctcccaggttcaaacgattctcctgcctcggcctcccaattagctgggaccgactaattttttatattttttgtagagacagggtttcaccgtgttagccaggatggtcttcatcttctgacctcgtgatctgcctgcctcagcctcccaaagtgctgggattacaggcgtgagccactgtgcctggcctttttttttttttcttaaattttatttcttttctttgctagcaggaagtcaaggcaactttttaaaaatgaaagcaagtcctcgcctggagtctacctgtatttattgaggagcgaaggggagattgctttcagaatggtcccgaaataaaaacacaaaacctggaccctggacagatcctctccaaggagccctgagagtcggctctccaggaaaatgggggaggaaagggggacaacagcccatttttaaaaataaaattcactcctggtctt

SEQ ID NO: 180662 - DNA, 5549 bp, Homo sapiens
  Payload ID: 15578
  Gene Symbol: SERTAD2
  Gene Name: SERTA domain containing 2
  Uniprot ID: Q14140
  ENST ID: ENST00000313349
  CDS Start-End: 299-1243
actcctgcacggcgagtgctggagcacgacgtaccgctcgctcggtcagggcgccccctccgcccgcctcctgcttcctcctccgctgcctgccgccgccgcctccaccattgtataatgctcggggcgcgcaggcagagaacggcggagtcttagcttcagcctcgcctgctgcccgctccccggcgccaccctcgggcccctggagcggggcactccgcatggagcgggagtagctgaggagtgggcggaaacccctcctgatgcgttagttcccaggtggagctgcatgtgatatatgttgggtaaaggaggaaaacggaagtttgatgagcatgaagatgggctggaaggcaaaatcgtgtctccctgtgacggtccatccaaggtgtcttacaccttacagcgccagactatcttcaacatttcccttatgaaactctataaccacaggcccctgacagagcccagcttgcaaaagaccgttttaattaacaacatgttgaggcggatccaggaggaactcaaacaggaaggcagcctgaggcccatgttcaccccctcctcccagcccaccaccgagcccagcgacagctaccgagaggccccgccggccttcagccacctggcgtccccgtcctcccacccctgcgacctcggaagcactacgcccctggaggcctgcctcaccccggcctcactgctcgaggacgacgatgacacgttttgcacctcccaggccatgcagcccacggctcccaccaaactgtcacctccagccctcttgccagaaaaggacagtttctcctctgccttggacgagatcgaggagctctgtcccacatctacctccacagaggcggccacggctgcgactgacagtgtgaaagggacctccagcgaggctggcacccagaaactcgacggtcctcaagagagccgcgcagatgactcaaaactgatggactctctgcctgggaattttgaaataacgacgtccacgggtttcctgacagacttgaccctggatgacatcctgtttgctgacattgatacgtccatgtatgattttgacccctgcacttcctcatcagggacagcctcaaaaatggcccctgtgtctgccgacgacctcctcaaaactctggctccttacagcagtcagcctgtcaccccaagtcagcctttcaaaatggacctcacagagctggaccacatcatggaggtgcttgttgggtcctaagacccagggacccagcgactatgcccacccagaccccagagcgttcccataaccctgacagttctccacactgtgcatgcacccttgcttgcctttttcagagaaaaagaaaattttacaacaggatcacactagtttttgctttgagcagagttggagtgccttcatccaagtatgaccacttttaatacacttttttgagtggttcctcagagacctactaccctggtataggaaagaatccatttgaagacaatgttgcaatgttgaatgacaaaaataaacagttcaagtgaagcacaaggattaagttggaaaagctgtaaattgcatgtgcatatttgtctattttttctataagttttattgcaagaggtaaagaagaaaactatatatatatatcttatttagataatctcagtaccttttctggcatttttgccctgtataggttgacttggcaattcggcctttttagaggcattaactactcctcgtaagtgttgcatttacatggctgtttagaaaactgctgcccaaatttattttatatttttgtacagattctgcagtttatgatattgtttttctaaaaacaaatgctgtttatacatatgagatagctattttgataggatttgctcacatagttcctgcaaacttcagatgtacaagttgcacttgtacttttatagagttgtaatgttttatatgtgtatggtgcaagagaaaattggatcaaatcaatctgcagttgatgtccccaaatgcaaacacaggcacacacatgcacacacccataaacacacacacagtgctttaagaaagggccaggtgatatcacacccaaatttcacaagcactgaccccctggcaccaacacccgccagtactgtgacttccaaagccagagccacatgtgctcatcaaacttgcattaagcagttggcgggagatggctgtggagctgggggtttaagtgatggttctcttttgctccctcttttgagggtaaagctactgtctttcttaagagtgtatttatgccaagtttgcgcttttaattgtttttattttgttttttaatgaaaacccagatctttcctttttggcataatttttatgatgacctgaaattttacatccgaacaaaattttacatccgaaaagcaaccaacttcttcatggaactcagccctgttgcaatgcttagggcccttaaagaagaaaatctccccagaaggcatccatcatgttgcttaattgtcttctgcagcttcctttccctagagctttccctgtgttgctaagagctgaaaatggcatcttcgtgatcaccacagtgagcttggctcgcctcggccggcccgggatgcactcttacaacatgtgtgactcttgaacctggagttcatcacattacgtcacagcttcccatctggttgctttcctgagtcagctacttcacacttgtcaaggctgttttaccccaaaactcagacaggactttctatgcatgttttccctcctccccccaattcccccccccatcaccttatctcccaggacacacttgagaagtagctttttattcctagtggtgtacatttaattttaaaaaggttgcaatgtatcatgcttgttgccgaaactgtttatggccttcttgtttcagttttttcttttcttccaatggtactttagctgttgagtgcaggttacaacctatattgttatgcagatggcttctttaggaataacttttatatttatttaaaaatttttaaattatgggatgttttgttgttgttgttgtctttgttgttggtcatttgtcaatattcagtcaccaattctgctcacttcttgccatggataaaattgggtctttctggctaattaaaaaagacaactttataaaatggcactttaagcaagccatagttagttttatttttgtaatgcacatggcaaagcaaagacgtttgtgatgaaggaactgctcatctaagcaaaagatttgagtatgatatgataaaggctttctacattctaatttactttttccccccacttgaatgtgttttaaaggctaattatcagctcagtagagcagtgagaaactgatcaaattgcacttgttctcctacaagcaacctccacgcagacacctcgtactgctacaggtgtgtcatttcctttaataggaccagggaccatgtaactgaggtgagggttgtagtagatgcttccagtgtcagtatgcctgttaattttaagagcttccctttcttgcagagaacaagtctgcccagattccatgctttctataactggaggacctggcaaacctgccgcatgctgcacacatctacctacgtacacatatacaatagtattgatgattctgaacaataacagggtaaaacagttggtttgccattgttaaaaactgatttacagtaacttacaacaactgtacttttgttggattagcaaatcatgtgtttaaacaaatcccatatgttgggcaacagttcaaataagcacggagaagtgttgcccaaacttggttctctgactcttatgtatttgtaaggctgggcttcaaaatcaaaacaaaaaccccaaaaacagcaggcaaatgctttttaactctgacaccgttgccataaatccctgatactcaaagtctaacaagaaagacatggaaaattagcagcccattttcagaaagatcaaaatgatctagggttctaattgcttttgcatcctattcttacaaagtgatgtcccaacagggaacagtaggagctggagtgggatctccaagtcccagtttgagtgtgggatgtgcttccagcagtgccttccctttatgaaagacatcacatggcatccagggccaggcaggcagcttgaggtgcctttacgagaaaaccgagctggggctgggagaggacagttattgacactgatgtgcaatgaagtgacaagatgagagcagaatcgtaagagctttgaatttgaagtgagtttttttccccccataagttatttattccttttttctgtgtaaatatatttattttactgtggagcgctaacatctggatcgtaacatgtgcagaatgtatggtaggaatgtattctcttgtaggaatgtaaatctgtattaaaagggggtccaagccaggcccccaggtcttctcattgtatgcacagtccgcattcatttttactcttctctaatatgggtctatttgaaatatgcaaaaggtatgaggaatgttttaatacctccaaatttttaagaaaagcatcaaagggttgatattttttaaagtttttttagtagcactttctctggatgacagaaggagcaaccacatgggcacccttgttcataccaaagggtgagcagtggccagagcctcctctgcacctctcgagtgtctttaccaattgagctttttatcgccatagccccttggagtgccccagctgccctgaggtcaatcaaggaaaatttcttaatgaaataagctccaaagagccaaagtatcaacttacagatcgtttttaaagcttaaatttatgaaccacctttgtggtaaacaatgaattatgaataccgcagggcagccttcttaaatgacaaatgtaaaaaaaaaaaaaaaaaagactctacttcgtgcagcaattgctactctatacgaattgtcttaatttgaaaaccttgctgttacaaattggacctttatacattttctgaaaacaatgaaaagagtatatttaaccttttctggctgtaaatggttaccttcctgtaactgccccgcacctggaggcatggagttgtgtgcatcctgcttatgtacaattgttttcagtgtttctaagaatgagtctgaatggttcttgaaaattagccaggatcaaatgctattgcagacaaagccaataaaaagttggacttcttttggggataacaagttttggaagagaaatgcaggccatatgtgcgcatgaccgagattttgaaaaaagatgtacatagtgacatgtttggtgcatggtttttgaggagggcttttgtcaaaaaggaggtataacctttcccccacagacctgagagctgtgccttttctatgcaatattacagacgttacatcggaacccagatggctgtattcacatgtaggtttgggctgtaatctaaacaattggacagattaaatgtacatggaaatgagcagtcttacttttgtagttttatattatacaataaacagttaaaagatga

SEQ ID NO: 180663 - DNA, 1734 bp, Homo sapiens
  Payload ID: 15579
  Gene Symbol: SERTAD3
  Gene Name: SERTA domain containing 3
  Uniprot ID: Q9UJW9
  ENST ID: ENST00000322354
  CDS Start-End: 498-1088
cggccccgcccgcctgcacagcgacttggggaggggcatgccagcccctctggctccacggtggagtccaggcctaccataaaggaaccgcagggagcaatggtgacgatcttggagcgaggactgtagctgagtggaaggaagcggttctgttggaccggccgccctccaccccggagtcgctgccccgccccctgccagttgcacttctttaaatggcccggggcgctagggaggggtgggcggatccggcgtctcggggcacgggcggatggctccgcccagccaatcgacgccccgcggcgggcgggactccagccaatcgcggctcgcggctcggctccggggcggggctggtgggccagaggccagacggagaggccccgccgaggtgagcgaggctccaaccggtcactggtgggtcctggcactggcgggtcgcaacgctgtgggcgttccaggaggtggtcgtggcgaacctggcagctgcgggcatcatggtgggaggcttgaagaggaaacactctgatttggaagaggaggaggagaggtgggagtggagtccagcaggccttcagagctaccagcaagccctgctccgcatctccctagacaaagtccagcgcagcctgggcccccgagcacccagcctccgcaggcatgtcctcatccataacaccctccaacagctgcaggctgcacttcgcctggctcccgcccctgccctgccccccgagcccctcttcctgggcgaggaggatttctccctgtcagccaccattggctctatcctcagggagctggacacctccatggatgggactgagccccctcagaatccagtgactccccttggcctccagaatgaagtgccaccccagcctgatccagtcttcttagaagctctgagctcccggtacttgggggactctggcctggatgacttctttctggacattgacacatctgcggtagaaaaggagcctgcacgggccccaccagagcctcctcacaacctcttctgtgccccaggttcttgggagtggaatgaactggatcacatcatggaaatcattctggggtcctaaaactgtgatagaggggatcgatccttcctcatgtcatcttcggtggcctggatccctgaatgcaactctgggtgtgtgtttttgtgggggctcgaagcagtgactatggcctcctttgttcccatttcagggttccacaaactgtcttgcatgtgtgtgtgtgtctggttaccccgaccttctgtgaaggtgggtcttcctgaattaatttatctattccaaatgccttaacgagactctgtttctgggagtctgattttccacttacacatttcttccacctttcctgctagttcccactcccctgtgaccactggggcctcagggaagataaagaaagctgggcctgtcgaaggatgacagggatgtgctgccaggttgctatagaaacccaggctctgcctcttgcaccttgagggggtgggaggggctggtgtcctccctccaggctgaaccccacttcctcggcaggaccccagtctcagcagcctcctgatttcataaccaggccggaccacgtgcaatagggtggaaaccaaactgctccatgccgggttatttaaaagaaaggcagagtttgtggtggcttttttttttttttttggattgtttgtaatttttttaaataaaagtattttggaaggag

SEQ ID NO: 180664 - DNA, 1515 bp, Homo sapiens
  Payload ID: 15579
  Gene Symbol: SERTAD3
  Gene Name: SERTA domain containing 3
  Uniprot ID: Q9UJW9
  ENST ID: ENST00000392028
  CDS Start-End: 279-869
aggaaactgaggccctgagaattgactcattcagatcacttcccatgatcacgcagctgagcagtttccaatacagaattcagatttggggttccctacttccaatccaggtctctgtgctccacacttgtctttcgtgctccatgtttgaagaaattaatattgtggaagaacagttttaaggcttagaggaacttgagttaggatccgtacttggcagatgaggaaattgattctcatggatgtaaattcactgtttgaggccacaacagggcatcatggtgggaggcttgaagaggaaacactctgatttggaagaggaggaggagaggtgggagtggagtccagcaggccttcagagctaccagcaagccctgctccgcatctccctagacaaagtccagcgcagcctgggcccccgagcacccagcctccgcaggcatgtcctcatccataacaccctccaacagctgcaggctgcacttcgcctggctcccgcccctgccctgccccccgagcccctcttcctgggcgaggaggatttctccctgtcagccaccattggctctatcctcagggagctggacacctccatggatgggactgagccccctcagaatccagtgactccccttggcctccagaatgaagtgccaccccagcctgatccagtcttcttagaagctctgagctcccggtacttgggggactctggcctggatgacttctttctggacattgacacatctgcggtagaaaaggagcctgcacgggccccaccagagcctcctcacaacctcttctgtgccccaggttcttgggagtggaatgaactggatcacatcatggaaatcattctggggtcctaaaactgtgatagaggggatcgatccttcctcatgtcatcttcggtggcctggatccctgaatgcaactctgggtgtgtgtttttgtgggggctcgaagcagtgactatggcctcctttgttcccatttcagggttccacaaactgtcttgcatgtgtgtgtgtgtctggttaccccgaccttctgtgaaggtgggtcttcctgaattaatttatctattccaaatgccttaacgagactctgtttctgggagtctgattttccacttacacatttcttccacctttcctgctagttcccactcccctgtgaccactggggcctcagggaagataaagaaagctgggcctgtcgaaggatgacagggatgtgctgccaggttgctatagaaacccaggctctgcctcttgcaccttgagggggtgggaggggctggtgtcctccctccaggctgaaccccacttcctcggcaggaccccagtctcagcagcctcctgatttcataaccaggccggaccacgtgcaatagggtggaaaccaaactgctccatgccgggttatttaaaagaaaggcagagtttgtggtggcttttttttttttttttggattgtttgtaatttttttaaataaaagtattttggaaggag

SEQ ID NO: 180665 - DNA, 747 bp, Homo sapiens
  Payload ID: 15579
  Gene Symbol: SERTAD3
  Gene Name: SERTA domain containing 3
  ENST ID: ENST00000599706
  CDS Start-End: 215-747
gagttcaagacccaggaggggaggcgaggttgttggggcagtattttcaagtggagggagtttgaagctgggacgttgggcttttggagaagcgagagaacagaggggaggaacttttgagacagggaacctggagattcgattccacttgggtcttccggacgggttgaattcggggctttatcgtgttctggaaaaggtgtgagagggcatcatggtgggaggcttgaagaggaaacactctgatttggaagaggaggaggagaggtgggagtggagtccagcaggccttcagagctaccagcaagccctgctccgcatctccctagacaaagtccagcgcagcctgggcccccgagcacccagcctccgcaggcatgtcctcatccataacaccctccaacagctgcaggctgcacttcgcctggctcccgcccctgccctgccccccgagcccctcttcctgggcgaggaggatttctccctgtcagccaccattggctctatcctcagggagctggacacctccatggatgggactgagccccctcagaatccagtgactccccttggcctccagaatgaagtgccaccccagcctgatccagtcttcttagaagctctgagctcccggtacttgggggactctggcctggatgacttctttctggacattgacacatctgcggtagaaaaggagcctgcacgggccccaccagagcctcctcacaacctcttctgtgcccc

SEQ ID NO: 180666 - DNA, 535 bp, Homo sapiens
  Payload ID: 15579
  Gene Symbol: SERTAD3
  Gene Name: SERTA domain containing 3
  ENST ID: ENST00000596456
  CDS Start-End: 261-535
ctggcgggtcgcaacgctgtgggcgttccaggaggtggtcgtggcgaacctggcagctgcgatttggggttccctacttccaatccaggtctctgtgctccacacttgtctttcgtgctccatgtttgaagaaattaatattgtggaagaacagttttaaggcttagaggaacttgagttaggatccgtacttggcagatgaggaaattgattctcatggatgtaaattcactgtttgaggccacaacaggcaaggcatcatggtgggaggcttgaagaggaaacactctgatttggaagaggaggaggagaggtgggagtggagtccagcaggccttcagagctaccagcaagccctgctccgcatctccctagacaaagtccagcgcagcctgggcccccgagcacccagcctccgcaggcatgtcctcatccataacaccctccaacagctgcaggctgcacttcgcctggctcccgcccctgccctgccccccgagcccctcttcctgggcgaggaggatttctccctgtc

SEQ ID NO: 180667 - DNA, 5219 bp, Homo sapiens
  Payload ID: 15580
  Gene Symbol: SERTAD4
  Gene Name: SERTA domain containing 4
  Uniprot ID: Q9NUC0
  ENST ID: ENST00000367012
  CDS Start-End: 231-1301
accataaccgtctgcagcgacggcggcgcagcgccccagtcgcggcggcgggacctgccgggacccttgcccgccgcgcacccgcagtcaccgccgagcgggcggccgggccgggacccgcgagtgtgcaccggcggccgggctggcgccgagcccagagcggaccagcagcagctcaagcgctgcggccgccgcctccccgctgaccccgcgatctgaggctgtcagagatgactctggttctgtccatgaatagattctgcgagcccattgtctcggaaggagctgctgaaattgctgggtaccaaacactatgggaggctgacagctacggaggcccaagccccccagggccagcacaagctcctttgcagggagaccggggagctggtcccccactggcaggatcacattacaggggaatttcaaatcctataacaacatccaagatcacatactttaagaggaagtatgtggaagaagaggattttcacccaccactcagcagctgtagccataaaaccatctcaatttttgaggaacgagcccacatcctttatatgtccttagaaaagctaaagtttatcgatgatcctgaagtgtacctccgaagatctgtccttataaacaatttgatgaaaaggatccatggagaaattatcatgcagaataactggtgcttccctgcctgctctttcaatggcacctctgcccaagagtggtttatggctcaagactgcccttaccgaaaacgaccacggatggccaaagaggaatgtgaaaagtttcatgcctgctgcttttaccaagaatgtggtggccactacctaaatttacccctttctgtcaatgctaatgttggaagtgcctccactgctgcctcctctccctccgcctcttcttcctcctcatcttcctcttcctctccccctttgcctttaccgagttgttcccgccaggtggattttgatgtaggtagtgcatctatttacaagagtgatggccagatacctgccaatgaaatctttgtcactaatgtcagatcacttggtgttcaggaaaaggccaaattaaatgatgagaaagcaaatgatgacaccaacagagatggtggccccctcagccacgaacctgtgggaaatgaccttgcttttgagtgcaaaggccaattttatgattattttgagaccggatataatgaaagaaacaatgtaaatgaatcttggaaaaagtccttacggaaaaaggaggcttcaccaccaagtaacaaactgtgctgcagcaaaggaagtaaaatatgagccatcttctcaccgaactttgaagcatgcacagcatgatcagttagctctcgtaaattttattttgaatggattttgtagttttgtacaacagataaaattatgccatgaacatgccatgtcgttttaatgcctggagagcagattgcgtaaaacatctgtatagcaggcatcagcgagcttcttataaatgtggtgatttttaccaaggaaacgattgacttaatgcttaaaagtatatcatagttttcttacggaaaagatcagtagatgagattgggggacaatgtgcccttgcaatatttccattgccccccaaggagcctgtcactagctaagaaatttctacatgtttgccagttaattagggagttatttggtaagcaaatcaatataaccagcaaagatacctgcttcttctatatgatacaatattttttttaaataaaagactaaagacagggagctagatgaaatggcttaatggtgctgttaagtatttgtacctaacagtcttgtgtgacagatgaaaataggatgtaacataatgaaacacacctgtctaggggcggcaatcaacagtcttacacagagagggtattccctgcaagtttctggcttgcctgtgatgggtgatgaggcttttagagaggtgttatacagggcgatttttggtgccttacttttatcttaatttttgccaatgtgaaaattaaggataaatcagagttacagcagggatttaacaaacaggacaaaaaaaaaaaaaaaaaaaaaaccacagggtggatcaatatggtttggaaactgttaactttgaactattgtgttcagcttttgattcgacatctctattctttatttttgatgcccaattgcttttggattcgccgttttttcaatagggatggaggaaatgagagagagagctgttagaaagcagcacgggctgctcgagcttttctatggcaactgtgtgttgctggggttggggttttctgggttttgggttgttttgttttgttttcttgtccaatgaagttcacgaaccagtggcatgcattatacttttctctgttttgcatcatttcacttgtttagattataaaagcatgtgggtttttatatatgaactttgctgttgattaagaagcacaatgttaataaatgatgtggtgatcaataaggtttatcttaaagaatgtaaagactttaggtttttgaaagttattttggagaaatgggacttaatctataatagttactatgtatttggtctacattttccaaataatatctttaacttgtacatttgaaaagtgttcagagtggccctcctaccatccttccttccactccagccaactcttcctgctaaactgtattccagtttccaagtttactaattgacttgggcctgttcaaataatacttcacagaaaccaaatgccaaacggaggaaataagtaagccctcccagtttctccaagataaagctttttttattattgctattaatattaaatataggtctcattcatacagtgtatgagtaggatcatttggacaattgtccacaaagaccaatttttaaaacattttcttgtgttatagttaaatagtctagtaatgttttgtcctttattttcaatatttgataaacatttgatgttcaaaacttagctaatagatgcttgtatatgaatgtgttgtaataaagtgaggttttcttgatatatatttattaagatgataaaaattcattaagttttttaaattttaatggctattggctatgtttctcttttccattattctctctcctttaaaaaactcaaaacatctagaaactgtagtggatagtggccacacaggagttttctaaattaaagagtattttaaaatgccaatctgacaggtgtttcagaatgatcctagttcgtaagtttaagtttctattgattaagaagcacaatgttaatagatgatgtggtgatcaataaggttatgtctgaaagaatgtaaagattttcctttctggagtgtctctgaaaaaaattgtataacacgaagccataaatactgaatcttagctgattgcattatgaactgtcaaactgtgaagatgacccatatgtaaacagttataacagctacagattattgctagtagcattccatacaattccatattaatgttcttaggagctaatatttgataaaggggaaagctagttaaaaactaattaatttgtcaaatgtagcattcttattatgagtgtaatatctcatggagatttaaatatgaacgaaaggacttatccttctgctttttaaaagccccagcattactagatagtgtttttcttgaaggccaaagctgtaaaatgacaaagttggtgattttcagcagcactcacctgagctgtgagcgcctgcacctgttcggtagaacccactagaatcacttctctgtaggataagtgatgcctttgaatccagcagcataaaaatctgttctttttagtcatcaagtttttgtttccaggatatttctagcattgcaaaaaaaaatttcttcaccaaacactaattcctaaacacccatccaaaccacaaaaattctcttgttagtaggcgagagtgctaggacttcctgtgttcacctcccatgcacccagcattgtcttttatgcatgagatattccattagattttcctagagtggccaggacacccttcatagtaagttatatctcttaactggattctatagttttatctcgagcaacttggaaaagctaagacatcctccacccacactggtatctacgcgcctggaagctgcaccttctctcattgctgtgctctgctttaaggaaaacctgatatgacagaatcaagactattaaaagataaatgaggggaaatcttcatttaagaaagttgccttgctccccaagagtgcctttaattgctattcccctaggcatctgggtgcatatcattaatgaaatcattaacctttgtctctggtccttcctttctaaaaacagcagattatagaaggtggtctggcaaagggattttcaaagggcaaaagtctcatcatcatctttccactcaaaatcctattattctacatttcactttgcaggggtcctagggacaggattgcagggacaggggacatgggaggaagacagaaaaattcaaaaccagcagatgccactacctggcaatgaattgaaaattaggggaaagcatctttggcgtgaccttttattaagacaacagaaatttagaacattttacatgcttctttgttaaatggtgaagcaagggaatgaaagtatttatttttagagctcatagttaactccatcaagacatggctacccacccctccagttatgaacttgtattacagctccacttggtgacttcctttctgtgtatcaggagcagagcagaggacaacttgtagaagacatgaccattaagagacatcaacttcgcaacaaatataagacaaggatacaaggattcctatgtgatgcagctaggtttttatatccttctaacaaatggtgagcaggagacttttttggaaataattagttgtgaaattccatttttctgacagccccttaaatttgaagttatttcatttgtagttaaggttatcacatccctgccaattttactagattttttcagagacaagcattcagcatggcattagtaatgatggtttaaactaggtgcagaactgtcccatgaagagaagaatgatatcagtatttaaataataaaagaagagacaatgtatggtttatagtgattcattttaagattgctgtattttgattttgtggtttaaaataaatgcattaaggatcttttaagttactacaa

SEQ ID NO: 180668 - DNA, 5219 bp, Homo sapiens; identical to SEQ ID NO: 180667
  Payload ID: 15580
  Gene Symbol: SERTAD4
  Gene Name: SERTA domain containing 4
  Uniprot ID: Q9NUC0
  ENST ID: ENST00000630425
  CDS Start-End: 231-1301

SEQ ID NO: 180669 - DNA, 615 bp, Homo sapiens
  Payload ID: 15581
  Gene Symbol: SAA1
  Gene Name: serum amyloid A1
  Uniprot ID: P0DJI8
  ENST ID: ENST00000356524
  CDS Start-End: 128-496
tccccagggaccacatccagcttttcttcgctcccaagaaaccagcagggaaggctcagtataaatagcagccaccgctccctggcaggcagggacccgcagctcagctacagcacagatcagcaccatgaagcttctcacgggcctggttttctgctccttggtcctgggtgtcagcagccgaagcttcttttcgttccttggcgaggcttttgatggggctcgggacatgtggagagcctactctgacatgagagaagccaattacatcggctcagacaaatacttccatgctcgggggaactatgatgctgccaaaaggggacctgggggtgcctgggctgcagaagtgatcaccgatgccagagagaatatccagagattctttggccatggtgcggaggactcgctggctgatcaggctgccaatgaatggggcaggagtggcaaagaccccaatcacttccgacctgctggcctgcctgagaaatactgagcttcctcttcactctgctctcaggagatctggctgtgaggccctcagggcagggatacaaagcggggagagggtacacaatgggtatctaataaatacttaagaggtggaatttgtgg

SEQ ID NO: 180670 - DNA, 675 bp, Homo sapiens
  Payload ID: 15581
  Gene Symbol: SAA1
  Gene Name: serum amyloid A1
  Uniprot ID: P0DJI8
  ENST ID: ENST00000405158
  CDS Start-End: 185-553
agggacccgcagctcagctacagcacagatcaggtgaggagcacaccaaggagtgatttttaaaacttactctgttttctctttcccaacaagattatcatttcctttaaaaaaaatagttatcctggggcatacagccataccattctgaaggtgtcttatctcctctgatctagagagcaccatgaagcttctcacgggcctggttttctgctccttggtcctgggtgtcagcagccgaagcttcttttcgttccttggcgaggcttttgatggggctcgggacatgtggagagcctactctgacatgagagaagccaattacatcggctcagacaaatacttccatgctcgggggaactatgatgctgccaaaaggggacctgggggtgcctgggctgcagaagtgatcaccgatgccagagagaatatccagagattctttggccatggtgcggaggactcgctggctgatcaggctgccaatgaatggggcaggagtggcaaagaccccaatcacttccgacctgctggcctgcctgagaaatactgagcttcctcttcactctgctctcaggagatctggctgtgaggccctcagggcagggatacaaagcggggagagggtacacaatgggtatctaataaatacttaagaggtggaatttgtggaaa

SEQ ID NO: 180671 - DNA, 583 bp, Homo sapiens
  Payload ID: 15581
  Gene Symbol: SAA1
  Gene Name: serum amyloid A1
  ENST ID: ENST00000532858
  CDS Start-End: 103-471
aggcagggacccgcagctcagctacagcacagatcagttatcctggggcatacagccataccattctgaaggtgtcttatctcctctgatctagagagcaccatgaagcttctcacgggcctggttttctgctccttggtcctgggtgtcagcagccgaagcttcttttcgttccttggcgaggcttttgatggggctcgggacatgtggagagcctactctgacatgagagaagccaattacatcggctcagacaaatacttccatgctcgggggaactatgatgctgccaaaaggggacctgggggtgcctgggctgcagaagtgatcaccgatgccagagagaatatccagagattctttggccatggtgcggaggactcgctggctgatcaggctgccaatgaatggggcaggagtggcaaagaccccaatcacttccgacctgctggcctgcctgagaaatactgagcttcctcttcactctgctctcaggagatctggctgtgaggccctcagggcagggatacaaagcggggagagggtacacaatgggtatctaataaatacttaagaggtggaa

SEQ ID NO: 180672 - DNA, 563 bp, Homo sapiens
  Payload ID: 15582
  Gene Symbol: SAA2
  Gene Name: serum amyloid A2
  Uniprot ID: P0DJI9
  ENST ID: ENST00000256733
  CDS Start-End: 46-414
tggcagacagggacccgcagctcagctacagcacagatcagcaccatgaagcttctcacgggcctggttttctgctccttggtcctgagtgtcagcagccgaagcttcttttcgttccttggcgaggcttttgatggggctcgggacatgtggagagcctactctgacatgagagaagccaattacatcggctcagacaaatacttccatgctcgggggaactatgatgctgccaaaaggggacctgggggtgcctgggctgcagaagtgatcagcaatgccagagagaatatccagagactcacaggccgtggtgcggaggactcgctggccgatcaggctgccaataaatggggcaggagtggcagagaccccaatcacttccgacctgctggcctgcctgagaaatactgagcttcctcttcactctgctctcaggagacctggctatgaggccctcggggcagggatacaaagttagtgaggtctatgtccagagaagctgagatatggcatataataggcatctaataaatgcttaagaggtggaatttgttgaaaca

SEQ ID NO: 180673 - DNA, 1022 bp, Homo sapiens
  Payload ID: 15582
  Gene Symbol: SAA2
  Gene Name: serum amyloid A2
  Uniprot ID: P0DJI9
  ENST ID: ENST00000414546
  CDS Start-End: 46-297
tggcagacagggacccgcagctcagctacagcacagatcagcaccatgaagcttctcacgggcctggttttctgctccttggtcctgagtgtcagcagccgaagcttcttttcgttccttggcgaggcttttgatggggctcgggacatgtggagagcctactctgacatgagagaagccaattacatcggctcagacaaatacttccatgctcgggggaactatgatgctgccaaaaggggacctgggggtgcctgggctgcagaagtgatcagtttattttcagctgaactgtagagagtgaaggaagaagccttttttcttcactcctacatgacccaggcattgatccaggcaatgaagattcagtgtaaataaccaccactaacaagaccatggcctttggaacctgtgctaagaggcatggatgagctccctcagcatgtggatggagactgaagagaggtctgaaggctcagtgtggtgtctccattctctaagaagtttggaggagaagctggatacagcaaaacagactgagaaggagcagctgttgggaaaggaggaaaactaggaaagcatggtgttccagaatccctgatggagatattgattagtagtatcagattctgcttagcagttgaggagttcacctttggcttaagcaacatggagtcattgactatctcgtgaaggtggttgcaggagaaggtctggagaactaaatggagcagtgataagagagaatgggagatggtatgataggactcctggacaccccagacatcaatcaaaacaccacagacaagaaggtgtggatacaaaaactagcagttagaagaaataatagaaaatgaactccaactacttctgaaaaaaaagtaatgagggcaattaatacattgaagaaagcctcaataagtacaacagtgtagtactgacttatatatagaaaaaacctgatcagtggaaccaaatcctcagaattagacataagtgcatatgagaattttgtatgtgat

SEQ ID NO: 180674 - DNA, 323 bp, Homo sapiens
  Payload ID: 15582
  Gene Symbol: SAA2
  Gene Name: serum amyloid A2
  ENST ID: ENST00000530400
  CDS Start-End: 9-251
tcagcaccatgaagcttctcacgggcctggttttctgctccttggtcctgagtgtcagcagccgaagcttcttttcgttccttggcgaggcttttgatggggctcgggacatgtggagagcctactctgacatgagagaagccaattacatcggctcagacaaatacttccatgctcgggggaactatgatgctgccaaaaggggacctgggggtgcctgggctgcagaagtgatcagagaagatgactgaggaatacaaccacaactggatggactttttcaaaagatgacacctgcttatttgcctcattcaaatttcaag

SEQ ID NO: 180675 - DNA, 948 bp, Homo sapiens
  Payload ID: 15582
  Gene Symbol: SAA2
  Gene Name: serum amyloid A2
  ENST ID: ENST00000528349
  CDS Start-End: 38-379
agggacccgcagctcagctacagcacagatcagcaccatgaagcttctcacgggcctggttttctgctccttggtcctgagtgtcagcagccgaagcttcttttcgttccttggcgaggcttttgatggggctcgggacatgtggagagcctactctgacatgagagaagccaattacatcggctcagacaaatacttccatgctcgggggaactatgatgctgccaaaaggggacctgggggtgcctgggctgcagaagtgatcaggctgaagtgccatggcatgatcatggctcactgcaacctcgacctcccggggctcaagagatcctcccacttcagcctcttgaataactgggactgcagatgtgcgccatgacacttgcctaatttttatattttttgtagagatggggtttcgccgtgtcacccaggctggtcttgaactcctgggctcaagtgatctgcctgcctcagcctcccaaagtgctgggattacaggcatgagtcactgagcccagcctactgttatatttatttttgtgtcggtttgaggctgcccagattcacattgtttctggggtcgtctgtgagggtgtttccagaggagattaacatttgaattggacttaataaagtagattgctattctcaatgcaactgggcatcacccaatctgttgaaggcttgaatagaacaaaaatagaggaaggacagatttgcctcccttttcccctgcctcactgcttgagttggacatctcctctcatcttctcttgccctcaaattggatttacgtgatcagttgctctggttctcaggcctttgaactcagactgaattacactttcctgagtttctagcttgcagagggcagatcgtgggacttctcagccccaattatcttgtgagccaattccttacaataaataaatacatacatacata

SEQ ID NO: 180676 - DNA, 687 bp, Homo sapiens
  Payload ID: 15582
  Gene Symbol: SAA2
  Gene Name: serum amyloid A2
  Uniprot ID: P0DJI9
  ENST ID: ENST00000526900
  CDS Start-End: 185-553
agggacccgcagctcagctacagcacagatcaggtgaggagcacaccaaggagtgatttttaaaacttactctgttttctctttcccaacaagattatcatttcctttaaaaaaaatagttatcctggggcatacagccataccattctgaaggtgtcttatctcctctgatctagagagcaccatgaagcttctcacgggcctggttttctgctccttggtcctgagtgtcagcagccgaagcttcttttcgttccttggcgaggcttttgatggggctcgggacatgtggagagcctactctgacatgagagaagccaattacatcggctcagacaaatacttccatgctcgggggaactatgatgctgccaaaaggggacctgggggtgcctgggctgcagaagtgatcagcaatgccagagagaatatccagagactcacaggccgtggtgcggaggactcgctggccgatcaggctgccaataaatggggcaggagtggcagagaccccaatcacttccgacctgctggcctgcctgagaaatactgagcttcctcttcactctgctctcaggagacctggctatgaggccctcggggcagggatacaaagttagtgaggtctatgtccagagaagctgagatatggcatataataggcatctaataaatgcttaagaggtg

SEQ ID NO: 180677 - DNA, 610 bp, Homo sapiens
  Payload ID: 15582
  Gene Symbol: SAA2
  Gene Name: serum amyloid A2
  Uniprot ID: P0DJI9
  ENST ID: ENST00000529528
  CDS Start-End: 103-471
agacagggacccgcagctcagctacagcacagatcagttatcctggggcatacagccataccattctgaaggtgtcttatctcctctgatctagagagcaccatgaagcttctcacgggcctggttttctgctccttggtcctgagtgtcagcagccgaagcttcttttcgttccttggcgaggcttttgatggggctcgggacatgtggagagcctactctgacatgagagaagccaattacatcggctcagacaaatacttccatgctcgggggaactatgatgctgccaaaaggggacctgggggtgcctgggctgcagaagtgatcagcaatgccagagagaatatccagagactcacaggccgtggtgcggaggactcgctggccgatcaggctgccaataaatggggcaggagtggcagagaccccaatcacttccgacctgctggcctgcctgagaaatactgagcttcctcttcactctgctctcaggagacctggctatgaggccctcggggcagggatacaaagttagtgaggtctatgtccagagaagctgagatatggcatataataggcatctaataaatgcttaagaggtggaatt

SEQ ID NO: 180678 - DNA, 727 bp, Homo sapiens
  Payload ID: 15583
  Gene Symbol: SAA4
  Gene Name: serum amyloid A4, constitutive
  Uniprot ID: P35542
  ENST ID: ENST00000278222
  CDS Start-End: 182-574
aatttttaaaatacccaaagaattgagcaaaaaggactttggcaaggcaggttgttggatttaaaaccgttctcccattaatgccaaagccagcagaggtaccaactatagctccacggccagaagataccagcagctctgcctttactgaaatttcatctggagaaaggtccacagcacaatgaggcttttcacaggcattgttttctgctccttggtcatgggagtcaccagtgaaagctggcgttcgtttttcaaggaggctctccaaggggttggggacatgggcagagcctattgggacataatgatatccaatcaccaaaattcaaacagatatctctatgctcggggaaactatgatgctgcccaaagaggacctgggggtgtctgggctgctaaactcatcagccgttccagggtctatcttcagggattaatagactgctatttatttggaaacagcagcactgtattggaggactcgaagtccaacgagaaagctgaggaatggggccggagtggcaaagaccccgaccgcttcagacctgacggcctgcctaagaaatactgagcttcctgctcctctgctctcagggaaactgggctgtgagccacacacttctccccccagacagggacacagggtcactgagctttgtgtccccaggaactggtatagggcacctagaggtgttcaataaatgtttgtcaaattgaatttgtt

SEQ ID NO: 180679 - DNA, 1518 bp, Homo sapiens
  Payload ID: 15584
  Gene Symbol: SAAL1
  Gene Name: serum amyloid A-like 1
  ENST ID: ENST00000300013
  CDS Start-End: 42-1463
agcttccggcacggccttcaagcgcgggacgcgacaaagtcatggaccgcaacccctcgccgccgccgccgggtcgcgacaaggaggaggaggaggaggtggccggtggagactgcatagggagcacggtctacagcaaacactggctcttcggcgtcctcagcggactcatccagattgttagccctgaaaacaccaaatctagctcagatgatgaggagcagctgacggagcttgatgaagaaatggagaatgaaatttgcagagtatgggatatgtcaatggatgaggacgtggctttatttctccaagaatttaatgctcctgatatattcatgggagtactggccaagtccaagtgtcctcgattaagagaaatctgtgtgggaattttaggtaatatggcctgtttccaggagatatgtgtgtccatcagcagtgataaaaatcttgggcaggtgttattgcactgtttgtatgattcagacccacctactctgctggaaacaagcaggttgttgcttacttgcctttcccaggcagaagtggccagtgtttgggttgaaaggatccaggaacatccagctatttatgatagcatttgcttcattatgtcaagttcaacaaatgttgacttgctggtgaaggtgggggaggttgtggacaagctctttgatttggatgagaaactaatgttagaatgggtcagaaatggggctgctcagcctctggaccaaccccaggaagagtctgaagagcagccagtgtttcggcttgtgccctgtatacttgaagctgccaaacaagtacgttctgaaaatccagaatggcttgatgtttacatgcacattttacaactgcttactacagtggatgatggaattcaagcaattgtacattgtcctgacactggaaaagacatttggaatttactttttgacctggtctgccatgaattctgccagtctgatgatccacccatcattcttcaagaacagaaaacagtgctagcctctgttttttcagtgttgtctgccatctatgcctcacagactgagcaagagtatctaaagatagaaaaagatcttcctctaattgacagcctcattcgggtcttacaaaatatggaacagtgtcagaaaaaaccagagaactcggcagagtctaacacagaggaaactaaaaggactgatttaacccaagatgatttccacttgaaaatcttaaaggatattttatgtgaatttctttctaatatttttcaggcattaacaaaggagacggtggctcagggagtaaaggaaggccagttgagcaaacagaagtgttcctctgcatttcaaaaccttcttcctttctatagccctgtggtggaagattttattaaaatcctacgtgaagttgataaggcgcttgctgatgacttggaaaaaaacttcccaagtttgaaggttcagacttaaaacctgaattggaattacttctgtacaagaaataaactttatttttctcactgac

SEQ ID NO: 180680 - DNA, 1526 bp, Homo sapiens
  Payload ID: 15584
  Gene Symbol: SAAL1
  Gene Name: serum amyloid A-like 1
  ENST ID: ENST00000531581
  CDS Start-End: 47-1108
tccgcagcttccggcacggccttcaagcgcgggacgcgacaaagtcatggaccgcaacccctcgccgccgccgccgggtcgcgacaaggaggaggaggaggaggtggccggtggagactgcatagggagcacggtctacagcaaacactggctcttcggcgtcctcagcggactcatccagattgttagccctgaaaacaccaaatctagctcagatgatgaggagcagctgacggagcttgatgaagaaatggagaatgaaatttgcagagtatgggatatgtcaatggatgaggacgtggctttatttctccaagaatttaatgctcctgatatattcatgggagtactggccaagtccaagtgtcctcgattaagagaaatctgtgtgggaattttaggtaatatggcctgtttccaggagatatgtgtgtccatcagcagtgataaaaatcttgggcaggtgttattgcactgtttgtatgattcagacccacctactctgctggaaacaagcaggttgttgcttacttgcctttcccaggcagaagtggccagtgtttgggttgaaaggatccaggaacatccagctatttatgatagcatttgcttcattatgtcaagttcaacaaatgttgacttgctggtgaaggtgggggaggttgtggacaagctctttgatttggatgagaaactaatgttagaatgggtcagaaatggggctgctcagcctctggaccaaccccaggaagagtctgaagagcagccagtgtttcggcttgtgccctgtatacttgaagctgccaaacaagtacgttctgaaaatccagaatggcttgatgtttacatgcacattttacaactgcttactacagtggatgatggaattcaagcaattgtacattgtcctgacactggaaaagacatttggaatttactttttgacctggtctgccatgaattctgccagtctgatgatccacccatcattcttcaagaacagaaaacagtgctagcctctgttttttcagtgttgtctgccatctatgcctcacagactgagcaagagtatctaaagatagaaaaaggcaaatcttcctctaattgacagcctcattcgggtcttacaaaatatggaacagtgtcagaaaaaaccagagaactcggcagagtctaacacagaggaaactaaaaggactgatttaacccaagatgatttccacttgaaaatcttaaaggatattttatgtgaatttctttctaatatttttcaggcattaacaaaggagacggtggctcagggagtaaaggaaggccagttgagcaaacagaagtgttcctctgcatttcaaaaccttcttcctttctatagccctgtggtggaagattttattaaaatcctacgtgaagttgataaggcgcttgctgatgacttggaaaaaaacttcccaagtttgaaggttcagacttaaaacctgaattggaattacttctgtacaagaaataaactttatttttctcactga

SEQ ID NO: 180681 - DNA, 657 bp, Homo sapiens
  Payload ID: 15584
  Gene Symbol: SAAL1
  Gene Name: serum amyloid A-like 1
  ENST ID: ENST00000530180
  CDS Start-End: 29-657
gccttcaagcgcgggacgcgacaaagtcatggaccgcaacccctcgccgccgccgccgggtcgcgacaaggaggaggaggaggaggtggccggtggagactgcatagggagcacggtctacagcaaacactggctcttcggcgtcctcagcggactcatccagattgttagccctgaaaacaccaaatctagctcagatgatgaggagcagctgacggagcttgatgaagaaatggagaatgaaatttgcagagtatgggatatgtcaatggatgaggacgtggctttatttctccaagaatttaatgctcctgatatattcatgggagtactggccaagtccaagtgtcctcgattaagagaaatctgtgtgggaattttaggtaatatggcctgtttccaggagatatgtgtgtccatcagcagtgataaaaatcttgggtgttattgcactgtttgtatgattcagacccacctactctgctggaaacaagcagaagtggccagtgtttgggttgaaaggatccaggaacatccagctatttatgatagcatttgcttcattatgtcaagttcaacaaatgttgacttgctggtgaaggtgggggaggttgtggacaagctctttgatttggatgagaaactaatgttagaatg

SEQ ID NO: 180682 - DNA, 604 bp, Homo sapiens
  Payload ID: 15584
  Gene Symbol: SAAL1
  Gene Name: serum amyloid A-like 1
  ENST ID: ENST00000530436
  CDS Start-End: 1-450
ctttcccaggcagaagtggccagtgtttgggttgaaaggatccaggaacatccagctatttatgatagcatttgcttcattatgtcaagttcaacaaatgttgacttgctggtgaaggtgggggaggttgtggacaagctctttgatttggatgagaaactaatgttagaatgggtcagaaatggggctgctcagcctctggaccaaccccaggaagagtctgaagagcagccagtgtttcggcttgtgccctgtatacttgaagctgccaaacaagtacgttctgaaaatccagaatggcttgatgtttacatgcacattttacaactgcttactacagtggatgatggaattcaagcaattggagacggtggctcagggagtaaaggaaggccagttgagcaaacagaagtgttcctctgcatttcaaaaccttcttcctttctatagccctgtggtggaagattttattaaaatcctacgtgaagttgataaggcgcttgctgatgacttggaaaaaaacttcccaagtttgaaggttcagacttaaaacctgaattggaattacttctgtacaagaaataaactttatttttctcactga

SEQ ID NO: 180683 - DNA, 1503 bp, Homo sapiens
  Payload ID: 15584
  Gene Symbol: SAAL1
  Gene Name: serum amyloid A-like 1
  ENST ID: ENST00000529318
  CDS Start-End: 47-1477
tccgcagcttccggcacggccttcaagcgcgggacgcgacaaagtcatggaccgcaacccctcgccgccgccgccgggtcgcgacaaggaggaggaggaggaggtggccggtggagactgcatagggagcacggtctacagcaaacactggctcttcggcgtcctcagcggactcatccagattgttagccctgaaaacaccaaatctagctcagatgatgaggagcagctgacggagcttgatgaagaaatggagaatgaaatttgcagagtatgggatatgtcaatggatgaggacgtggctttatttctccaagaatttaatgctcctgatatattcatgggagtactggccaagtccaagtgtcctcgattaagagaaatctgtgtgggaattttaggtaatatggcctgtttccaggagatatgtgtgtccatcagcagtgataaaaatcttgggcaggtgttattgcactgtttgtatgattcagacccacctactctgctggaaacaagcaggttgttgcttacttgcctttcccaggcagaagtggccagtgtttgggttgaaaggatccaggaacatccagctatttatgatagcatttgcttcattatgtcaagttcaacaaatgttgacttgctggtgaaggtgggggaggttgtggacaagctctttgatttggatgagaaactaatgttagaatgggtcagaaatggggctgctcagcctctggaccaaccccaggaagagtctgaagagcagccagtgtttcggcttgtgccctgtatacttgaagctgccaaacaagtacgttctgaaaatccagaatggcttgatgtttacatgcacattttacaactgcttactacagtggatgatggaattcaagcaattgtacattgtcctgacactggaaaagacatttggaatttactttttgacctggtctgccatgaattctgccagtctgatgatccacccatcattcttcaagaacagaaaacagtgctagcctctgttttttcagtgttgtctgccatctatgcctcacagactgagcaagagtatctaaagatagaaaaaggcaagtacaatcttcctctaattgacagcctcattcgggtcttacaaaatatggaacagtgtcagaaaaaaccagagaactcggcagagtctaacacagaggaaactaaaaggactgatttaacccaagatgatttccacttgaaaatcttaaaggatattttatgtgaatttctttctaatatttttcaggcattaacaaaggagacggtggctcagggagtaaaggaaggccagttgagcaaacagaagtgttcctctgcatttcaaaaccttcttcctttctatagccctgtggtggaagattttattaaaatcctacgtgaagttgataaggcgcttgctgatgacttggaaaaaaacttcccaagtttgaaggttcagacttaaaacctgaattggaattacttctgtac

SEQ ID NO: 180684 - DNA, 1582 bp, Homo sapiens
  Payload ID: 15584
  Gene Symbol: SAAL1
  Gene Name: serum amyloid A-like 1
  Uniprot ID: Q96ER3
  ENST ID: ENST00000524803
  CDS Start-End: 51-1475
ctcctccgcagcttccggcacggccttcaagcgcgggacgcgacaaagtcatggaccgcaacccctcgccgccgccgccgggtcgcgacaaggaggaggaggaggaggtggccggtggagactgcatagggagcacggtctacagcaaacactggctcttcggcgtcctcagcggactcatccagattgttagccctgaaaacaccaaatctagctcagatgatgaggagcagctgacggagcttgatgaagaaatggagaatgaaatttgcagagtatgggatatgtcaatggatgaggacgtggctttatttctccaagaatttaatgctcctgatatattcatgggagtactggccaagtccaagtgtcctcgattaagagaaatctgtgtgggaattttaggtaatatggcctgtttccaggagatatgtgtgtccatcagcagtgataaaaatcttgggcaggtgttattgcactgtttgtatgattcagacccacctactctgctggaaacaagcaggttgttgcttacttgcctttcccaggcagaagtggccagtgtttgggttgaaaggatccaggaacatccagctatttatgatagcatttgcttcattatgtcaagttcaacaaatgttgacttgctggtgaaggtgggggaggttgtggacaagctctttgatttggatgagaaactaatgttagaatgggtcagaaatggggctgctcagcctctggaccaaccccaggaagagtctgaagagcagccagtgtttcggcttgtgccctgtatacttgaagctgccaaacaagtacgttctgaaaatccagaatggcttgatgtttacatgcacattttacaactgcttactacagtggatgatggaattcaagcaattgtacattgtcctgacactggaaaagacatttggaatttactttttgacctggtctgccatgaattctgccagtctgatgatccacccatcattcttcaagaacagaaaacagtgctagcctctgttttttcagtgttgtctgccatctatgcctcacagactgagcaagagtatctaaagatagaaaaagtagatcttcctctaattgacagcctcattcgggtcttacaaaatatggaacagtgtcagaaaaaaccagagaactcggcagagtctaacacagaggaaactaaaaggactgatttaacccaagatgatttccacttgaaaatcttaaaggatattttatgtgaatttctttctaatatttttcaggcattaacaaaggagacggtggctcagggagtaaaggaaggccagttgagcaaacagaagtgttcctctgcatttcaaaaccttcttcctttctatagccctgtggtggaagattttattaaaatcctacgtgaagttgataaggcgcttgctgatgacttggaaaaaaacttcccaagtttgaaggttcagacttaaaacctgaattggaattacttctgtacaagaaataaactttatttttctcactgacagttgaaattgacttattggaaatattaactaaagcccatattagaccataa

SEQ ID NO: 180685 - DNA, 451 bp, Homo sapiens
  Payload ID: 15584
  Gene Symbol: SAAL1
  Gene Name: serum amyloid A-like 1
  ENST ID: ENST00000532452
  CDS Start-End: 1-401
cgccgccgggtcgcgacaaggaggaggaggaggaggtggccggtggagactgcatagggagcacggtctacagcaaacactggctcttcggcgtcctcagcggactcatccagattgttagccctgaaaacaccaaatctagctcagatgatgaggagcagctgacggagcttgatgaagaaatggagaatgaaatttgcagagcattaacaaaggagacggtggctcagggagtaaaggaaggccagttgagcaaacagaagtgttcctctgcatttcaaaaccttcttcctttctatagccctgtggtggaagattttattaaaatcctacgtgaagttgataaggcgcttgctgatgacttggaaaaaaacttcccaagtttgaaggttcagacttaaaacctgaattggaattacttctgtacaagaaataaactttatttttctca

SEQ ID NO: 180686 - DNA, 949 bp, Homo sapiens
  Payload ID: 15584
  Gene Symbol: SAAL1
  Gene Name: serum amyloid A-like 1
  ENST ID: ENST00000531751
  CDS Start-End: 1-795
gaaatctgtgtgggaattttaggtaatatggcctgtttccaggagatatgtgtgtccatcagcagtgataaaaatcttgggcaggtgttattgcactgtttgtatgattcagacccacctactctgctggaaacaagcaggttgttgcttacttgcctttcccaggcagaagtggccagtgtttgggttgaaaggatccaggaacatccagctatttatgatagcatttgcttcattatgtcaagttcaacaaatgttgacttgctggtgaaggtgggggaggttgtggacaagctctttgatttggatgagaaactaatgttagaatgggtcagaaatggggctgctcagcctctggaccaaccccaggaagagtctgaagagcagccagtgtttcggcttgtgccctgtatacttgaagctgccaaacaagtacgttctgaaaatccagaatggcttgatgtttacatgcacattttacaactgcttactacagtggatgatggaattcaagcaattgtacattgtcctgacactggaaaagacatttggaatttactttttgacctggtctgccatgaattctgccagtctgatgatccacccatcattcttcaagaacagaaaacagtgctagcctctgttttttcagtgttgtctgccatctatgcctcacagactgagcaagagtatctaaagatagaaaaaggagacggtggctcagggagtaaaggaaggccagttgagcaaacagaagtgttcctctgcatttcaaaaccttcttcctttctatagccctgtggtggaagattttattaaaatcctacgtgaagttgataaggcgcttgctgatgacttggaaaaaaacttcccaagtttgaaggttcagacttaaaacctgaattggaattacttctgtacaagaaataaactttatttttctcactga

SEQ ID NO: 180687 - DNA, 3229 bp, Homo sapiens
  Payload ID: 15585
  Gene Symbol: SDPR
  Gene Name: serum deprivation response
  Uniprot ID: O95810
  ENST ID: ENST00000304141
  CDS Start-End: 331-1608
ggggaacaggaaagaaaagctaaacctgcaacaaagtgtcctgtgcccagaacgcggttaggaagtgtgtgcatacgtctgaaccctaaatggttctcagttctgtaaacttctcctcccactgggtggagtagggcctttaagagcagctggaatgcagttcccctgatcagcgtagccagttgttgcctgtctgaacctctgccagtcctggagactggtgccctgagctccaaccagcgggcctcatcctacaccctcaccaccgcaacttctcacccgagcaagaagcagctcccagagagaaagaacgttcccacctgcctagccatgggagaggacgctgcacaggccgaaaagttccagcaccctgggtctgacatgcggcaggaaaagccctcgagccccagcccgatgccttcctccacaccaagccccagcctgaacctagggaacacagaggaggccatccgggacaactcacaggtgaacgcagtcacggtgctcacgctcctggacaagctggtgaacatgctagacgctgtgcaggagaaccagcacaagatggagcagcgacagatcagtttggagggctccgtgaagggcatccagaatgacctcaccaagctctccaagtaccaggcctccaccagcaacacggtgagcaagctgctggagaagtcccgcaaggtcagcgcccacacgcgcgcggtcaaagagcgcatggataggcagtgcgcacaggtgaagcggctggagaacaaccacgcccagctcctccgacgcaaccatttcaaagtgctcatcttccaggaggaaaatgagatccctgccagcgtgtttgtgaaacagcccgtttccggtgccgtggaagggaaggaggagcttccggatgaaaacaaatccctggaggaaaccctgcacaccgtggacctctcctcagatgatgatttgccccacgatgaggaggccctggaagacagtgccgaggaaaaggtggaagaaagtagggcagagaaaataaaaagatccagcctgaagaaagtggatagcctcaagaaagcattttctcgccagaacatcgagaaaaagatgaacaagctggggacaaagatcgtatctgtagagaggagagagaagattaagaaatctctcacgtcaaatcaccagaaaatatcctcaggaaaaagctcccccttcaaggtttctcccctcactttcgggcggaagaaagtccgagagggagaaagccatgcagaaaatgagaccaagtcagaagacctgcctagcagtgagcagatgccaaatgaccaggaagaggagtcctttgcagagggtcattccgaagcgtccctcgccagcgctctggtggaaggggaaattgcagaggaggctgctgagaaggcgacctccagggggagtaactcggggatggacagcaacatcgacttgactattgtggaagatgaagaggaggagtcagtggccctggaacaggcacagaaggtacgctatgagggtagctacgcgctaacatccgaggaggcggagcgctccgatggggaccccgtgcagcccgccgtgctccaggtgcaccagacctcctgagcttagagccaccgtgccatcctgtgctgtgctcaagcgggcagccagggctgaagaacaaactcttgcacatctccagcacgactcacccactcctgcgttcctgtccaggcagtaatcattgaccatatagtcatagtaagacacacgagaccaggctttaccatgaaagcgacctgtcacggactccacttttaatttgctcttaggttctatctctgtagaatgtctccaagattgaagaagaaactgagcagttgaaaaatgctaatctctttgacttagtcagaaaaaaacagaggataattaagatactagtcatgaaaagtgattcattcttttttgtcattccataagcttgctgaatagtgtaccggtaatatattgtatttccaccgtactctgtgaatctaattattattctttaagtgttgatatataatatacataaatatgtaagctaaacatataactatatgttttaagaagaaaacatctacgaaaggtaaaaagagatgatcagttggttgtttacttgctagaaaccattgttttattgcaaacgaaggaaaaatgaagagattataaaagtcagctaatgaagtaagatacgtagtaaagtcaggactattcaaaaagtaagaaagaaaatttggaaaatgagagaaacaggaaacaaagaatgccgaaaagaatgaaaacagagaaaaaatgtatgtgcttgaaagtaaaatacttacaatagtagcttaactatttcactctttaaataaaaatactaaagaagttcgtatatcctggaataacatgtcatcttcaaaatatttttattttctaatatttttaataataaacattttatagtgttaaagctgtatttttcttaataaataaaggacattacaaatatttctttaaggaagttcaaaaggatgttgtcttgttaacactggaacgaatataaatcttcaaaatacaattaatatatactgttttgtggaaacttagctcatactattctttaatgctcttcaaatttaaactaacccttacattccatgtgatgtgatgtaggcttataagatgctaaaatctataggttttggaagtgaaagattctattttttctttttttgtacataatgggaatttcattccagattatattttatttacatattaatttcacagaatattaatatttcttaacttcttaaagcatgctagcgttttatgtatatgtacacatatattcagacagggtaattttatctgctgcctaacattgtactaaaatattgctttatctgtttttaattacaaaatgctaatgatttcttaaattatagtttaaagacaattggcccaggaagcaaatcccctgcctttagtatgaaccactataagtaaccttacaaatagagttaatccaagacaatattaacaaactgtgctttgtctttaataaaagggataggattaacaaacatattgatggcataacctattcagctatgtccttatttttgcaataatgtaacctcaaatattggattgttgaaccaacaatggctgtgttaaagaagattaaataaaccgaaaaataaaaagcatgaaacaa

SEQ ID NO: 180688 - DNA, 4202 bp, Homo sapiens
  Payload ID: 15586
  Gene Symbol: SRF
  Gene Name: serum response factor
  Uniprot ID: P11831
  ENST ID: ENST00000265354
  CDS Start-End: 359-1885
ggtcgggggatccctccgccgccagcgcgtggtcccggccccctccacccgccgtctcggccgcggccagcagcccctgccccccgggggacgctgacggccgcccggcgcgccgccctagcagacggacagggggcgctgcgcgcggcctggggcaacccgggccacaggggcaggaaagtgagggcccaggtcggcccgggcgtgcaggggccccgggttcgcagcggcggccgcggcagcgatagcggcactagcagcagcgggagtgccgggttgagccgggaagccgatggcggcggctgcggcggctccgattcctcgctgactgcccgtccgccctcctgcatcgagcgccatgttaccgacccaagctggggccgcggcggctctgggccggggctcggccctggggggcagcctgaaccggaccccgacggggcggccgggcggcggcggcgggacacgcggggctaacgggggccgggtccccgggaatggcgcggggctcgggcccggccgcctggagcgggaggctgcggcagcggcggcaaccaccccggcgcccaccgcgggggccctctacagcggcagcgagggcgactcggagtcgggcgaggaggaggagctgggcgccgagcggcgcggcctgaagcggagcctgagcgagatggagatcggtatggtggtcggtgggcccgaggcgtcggcagcggccaccgggggctacgggccggtgagcggcgcggtgagcggggccaagccgggtaagaagacccggggccgcgtgaagatcaagatggagttcatcgacaacaagctgcggcgctacacgaccttcagcaagaggaagacgggcatcatgaagaaggcctatgagctgtccacgctgacagggacacaggtgctgttgctggtggccagtgagacaggccatgtgtatacctttgccacccgaaaactgcagcccatgatcaccagtgagaccggcaaggcactgattcagacctgcctcaactcgccagactctccaccccgttcagaccccacaacagaccagagaatgagtgccactggctttgaagagacagatctcacctaccaggtgtcggagtctgacagcagtggggagaccaaggacacactgaagccggcgttcacagtcaccaacctgccgggtacaacctccaccatccaaacagcacctagcacctctaccaccatgcaagtcagcagcggcccctcctttcccatcaccaactacctggcaccagtgtctgctagtgtcagccccagtgctgtcagcagtgccaatgggactgtgctgaagagtacaggcagcggccctgtctcctctgggggccttatgcagctgcctaccagcttcaccctcatgcctggtggggcagtggcccagcaggtcccagtgcaggccattcaagtgcaccaggccccacagcaagcgtctccctcccgtgacagcagcacagacctcacgcagacctcctccagcgggacagtgacgctgcccgccaccatcatgacgtcatccgtgcccacaactgtgggtggccacatgatgtaccctagcccgcatgcggtgatgtatgcccccacctcgggcctgggtgatggcagcctcaccgtgctgaatgccttctcccaggcaccatccaccatgcaggtgtcacacagccaggtccaggagccaggtggcgtcccccaggtgttcctgacagcatcatctgggacagtgcagatccctgtttcagcagttcagctccaccagatggctgtgatagggcagcaggccgggagcagcagcaacctcaccgagctacaggtggtgaacctggacaccgcccacagcaccaagagtgaatgatccgcccgccgccctggacagatggcccaagggatggcaccacttatttattgttgccttttcacgttttctttacacacacgttgacgggccgcaggagggaggcggggaggaggaacgggcagccacaggactgagccctctcactccagccaaagaaatgggcctgcctgcctccacccgtcctccctcagcctccccttcttcccgccccacctcccatttctgttgctggaggggctgtcctccttcctgggaccccctcgccagcttggctcgatgtttgccatgagtattagcttacccaatgggaccgtgccccacctccccacacacaggccttctgtggggctgggcaccgtgtcctcctctgaggaagcagttggggccctcttgccagcctccttgctgaccccaggtcagccctgtgtctgtcacaggctgggtcaaaagagccctggctctgcccctcagggggccagctggggagatgggggcttcttcctcacactgctgtcctctcccccttcagctcctgagtagctgggcctgtgcactgggcaggttcctggggccgcctgccctgccttgccgctccccttggacctccaggggctcctgggttggagggaaccaccagcgttcccttctcccccttgtcttcccccctctcctcccagctgctttacttaaagttgattttgaactttttatttgaggagacgaagtgaaaacaaatctataaatatatatttttaaaatatttaacttttttttatggcgtttttctcgtccccctccctgcccaaactccccttccctggggagccctcaggctccccagaactggctgggcccctggggacagagccaccccatgagctcggggtccaccagtgtgtgggggagattctgggtttgcccagtcctgggttgtttccaggagaaagccgggggaggggccctcaggccattccccaacggggtggggagggtgacccacagctctgggcctctttttgccctttagggctgttgctagggagagggaagagggagaccaaatgtcggggttggggtgggagggcgtcaggcagaggcaactgacttcatttgtgccacacgcatgggcattgcagccttgcgctgtcccaggcatgcagctgcctggggcccaagttgcagtgagcagggtggggtctgggagggggtgagaggcaggaatgggggtcagaagaagtgggagcagcttcttgggctgagtgcagccaaaggggagccagaaatgggcagttctcccagggagtgagcagctactgtaacttttttaaattaagacaaaaagccttgaagaaaatgactttatttttctaagtgtaacctcagtatttatgtaatttgtacaggggccatgccccacccccctcctccccctttggggtagaccttgagggtgggccagcataggggggagggtcttttaccctgtgtcagagcctaccttcaccacctatatccagaaggggagctttttcagaaacagggcagcagtggggtgaaattttcttaacccctaagactgccttcagtaggaacaagctggcttctgtgattaggtgaagggatgggggaagattttatgcacagcctagttatcaaggggatgatttgccgacatgtttgagaaccccctaacctctaaccctcattgctgtcttgccccagtttggggtgccaagatggaagtcacctttctgggctttctcctggagatagctggggcttatgggtggctttcaaggctggggcatggcaaatcaggggccagagagcaggggagcttgggactcaggtctgtaactgcccagccccttttctctgctcttgtttcactccaccatcactcactcactccccactcccccacccatggggaggagacctttgatgaattcttcctctccttcccacaaaagacagacccagtgagtgaatcaggcaaagtgcttataatgtgtgttgtgtgagcgtggccttgggaggacatgcgtgtgtcagggatgagttgaggtgatatttttatgtgcagcgacccttggtgtttcccttcctcggtggctctggggtatgtgtgtgtgggtgtgtgcgcctgagtgagtgtgtgtgcttgaatgtgagtgtgtatgtcagtggtttctacttcccctgggatgctgacccaggaatagtggacatggtcacagtcctatgtacagagctttcttttgtattaaaaaaaaatactctttcaataaatgtatcatttttgtgcacagac

SEQ ID NO: 180689 - DNA, 2855 bp, Homo sapiens
  Payload ID: 15587
  Gene Symbol: SRFBP1
  Gene Name: serum response factor binding protein 1
  Uniprot ID: Q8NEF9
  ENST ID: ENST00000339397
  CDS Start-End: 73-1362
gtggcgacgcagccgcggtctgagagaccggttcacgtgcaggcagcggcggatcatattccttcatctaccatggctcagccgggaactctgaacctcaataacgaggttgtgaagatgagaaaagaagtgaagagaattcgagttttagttatccgaaaacttgtcaggagtgttggccgactgaagtcaaaaaagggtactgaagatgcactgttaaaaaaccaaagacgggcgcaaagattgcttgaagaaatccatgccatgaaggaattgaaacctgacatagtaactaaatctgctcttggtgatgatatcaactttgaaaaaatcttcaaaaagccagattctactgcaactgaaagagcaattgccagactagcagtacatcctcttctgaagaaaaagatagatgtgctaaaagctgctgtacaagcctttaaagaagcaagacaaaatgttgctgaagttgagtcatcaaagaatgcttcagaggacaatcattctgagaatactttgtattcaaatgataatggaagtaatttacagcgtgaagcaactgtcatcagtgagcaaaaagtcaaagaaaccaaaatattggcgaagaaaccaatacataattcaaaggaaaaaatagcaaagatggaacatggacctaaagcagtgactattgcaaattctccatcaaagccttcagaaaaggattctgtagtttcccttgagtcccagaagacacctgctgacccaaaactgaaaactctaagtcaaaccaaaaaaaacaaaggatctgatagctcactctctggtaacagtgatggcggagaagaattttgtgaagaggagaaggaatattttgatgatagcacagaagaaaggttttacaagcagtcttccatgtctgaagatagtgatagcggtgacgacttcttcattgggaaagtcagacggacacgaaagaaggaaagtagttgtcattcttcagttaaggaacaaaaaccactagaaaaagtgtttcttaaagaagatacaggtgaaactcatggggatacaagaaatgacaaaatcaagccaagtacagaaaccagaaagttagaatcagtgtttttccactctttatctggatctaaaagctctagaagaaatttcaaagaacaggctccaaaaacaagatccctagattttccacagaatgagcctcagatcaagaatcagtttaataagaagctatcaggaagacttgaaaatacaaaacagcaattgcagctgcctcttcatccttcatgggaagcaagcagaaggcgaaaagaacagcaatctaatattgctgtgtttcaggggaaaaaaattacgtttgatgattgattagtgcctctttctgcaaacttttccatctaaaaaaaaaaatgttttttttaagacaggatctcattctgttgcccagactagagtacaatattgcaatcacagctcactgcagcctcaaactcctgggctcaagtgatcctcccacctctgcctcccaaagggctgggactgcaggtgcatgcactaccatgcccagctttctcaccccaggctctgcagctattacttaaactcgtatttgaataagtctcttggggagaattatagaatgtttgtttttgtatttttttttaaagtaaattcaacttacgcttatataagcctttcacaaatccaatatgtacttaaattgatttttaataatatccctcagactgtttcccttatgaagtaatttggggattttagtgatctcatattttctctttagtgcttatcatgaaatgtgcttcactggttcagctctgttgtttccttaaacataaatgtcaatatatatttaaaataataatggaaacataggaaatcagctatttaaaccagatcacccttgttaaaaatcattcttgttagcaaactaaaatagtaacttttattatggatgtacagataaatattaattttattatagttttaagtacttgtgatcatgtactttttgattctaaaatagttgtctaggacaattttgggattcttaattatattttagttaagaaaattgtttaaatatagcaatacaaccaataatttgttttatgtttcactgcatataaatatttccattaaatcaagaatgtatattatctagtttttactatacttattttaaaatttttgaggaatcatagattctaatttttaagaacaaattctgaaggtggtaggattaaaagaatatttccactgatggctaagcaaagaagttgtaagatgactcactgaggaagggactgctttatacatcacagtactgctatttaaaaggaaaacagaaatttttaaatcccttcaaatgtttcacttttgctatgctgggaaaaattttgaagttcttggtaaactgaataatgctaatccatgtttcctgcacattagttcctttaatggcagggaaggccatctggttaacctgtattcacaaactctcaagagtttctacttatttcaggagcttaagaatttagataactcagccgggcgtggtgactcatgcctataatcccagcactttgggaggctgaggcgggtagatcgctagaggcaaggagttcaaaaccagcctgggcaacatggtgaaaccctgtctctactaaaaatacagaaaattatccaggcgtggtggccggcatctgtaattccagctactcagaaggctgaggcataagaattgcttgaacctgggaggtggaggttgcagtgagccaagattgcaccactgcactccagcctgggtgacagagtatgactgtctcaaaaaaaaaaaaaaa

SEQ ID NO: 180690 - DNA, 2401 bp, Homo sapiens
  Payload ID: 15588
  Gene Symbol: SGK1
  Gene Name: serum/glucocorticoid regulated kinase 1
  Uniprot ID: O00141
  ENST ID: ENST00000237305
  CDS Start-End: 90-1385
ttttttataaggccgagcgcgcggcctggcgcagcatacgccgagccggtctttgagcgctaacgtctttctgtctccccgcggtggtgatgacggtgaaaactgaggctgctaagggcaccctcacttactccaggatgaggggcatggtggcaattctcatcgctttcatgaagcagaggaggatgggtctgaacgactttattcagaagattgccaataactcctatgcatgcaaacaccctgaagttcagtccatcttgaagatctcccaacctcaggagcctgagcttatgaatgccaacccttctcctccaccaagtccttctcagcaaatcaaccttggcccgtcgtccaatcctcatgctaaaccatctgactttcacttcttgaaagtgatcggaaagggcagttttggaaaggttcttctagcaagacacaaggcagaagaagtgttctatgcagtcaaagttttacagaagaaagcaatcctgaaaaagaaagaggagaagcatattatgtcggagcggaatgttctgttgaagaatgtgaagcaccctttcctggtgggccttcacttctctttccagactgctgacaaattgtactttgtcctagactacattaatggtggagagttgttctaccatctccagagggaacgctgcttcctggaaccacgggctcgtttctatgctgctgaaatagccagtgccttgggctacctgcattcactgaacatcgtttatagagacttaaaaccagagaatattttgctagattcacagggacacattgtccttactgacttcggactctgcaaggagaacattgaacacaacagcacaacatccaccttctgtggcacgccggagtatctcgcacctgaggtgcttcataagcagccttatgacaggactgtggactggtggtgcctgggagctgtcttgtatgagatgctgtatggcctgccgcctttttatagccgaaacacagctgaaatgtacgacaacattctgaacaagcctctccagctgaaaccaaatattacaaattccgcaagacacctcctggagggcctcctgcagaaggacaggacaaagcggctcggggccaaggatgacttcatggagattaagagtcatgtcttcttctccttaattaactgggatgatctcattaataagaagattactcccccttttaacccaaatgtgagtgggcccaacgacctacggcactttgaccccgagtttaccgaagagcctgtccccaactccattggcaagtcccctgacagcgtcctcgtcacagccagcgtcaaggaagctgccgaggctttcctaggcttttcctatgcgcctcccacggactctttcctctgaaccctgttagggcttggttttaaaggattttatgtgtgtttccgaatgttttagttagccttttggtggagccgccagctgacaggacatcttacaagagaatttgcacatctctggaagcttagcaatcttattgcacactgttcgctggaagctttttgaagagcacattctcctcagtgagctcatgaggttttcatttttattcttccttccaacgtggtgctatctctgaaacgagcgttagagtgccgccttagacggaggcaggagtttcgttagaaagcggacgctgttctaaaaaaggtctcctgcagatctgtctgggctgtgatgacgaatattatgaaatgtgccttttctgaagagattgtgttagctccaaagcttttcctatcgcagtgtttcagttctttattttcccttgtggatatgctgtgtgaaccgtcgtgtgagtgtggtatgcctgatcacagatggattttgttataagcatcaatgtgacacttgcaggacactacaacgtgggacattgtttgtttcttccatatttggaagataaatttatgtgtagacttttttgtaagatacggttaataactaaaatttattgaaatggtcttgcaatgactcgtattcagatgcttaaagaaagcattgctgctacaaatatttctatttttagaaagggtttttatggaccaatgccccagttgtcagtcagagccgttggtgtttttcattgtttaaaatgtcacctgtaaaatgggcattatttatgtttttttttttgcattcctgataattgtatgtattgtataaagaacgtctgtacattgggttataacactagtatatttaaacttacaggcttatttgtaatgtaaaccaccattttaatgtactgtaattaacatggttataatacgtacaatccttccctcatcccatcacacaactttttttgtgtgtgataaactgattttggtttgcaataaaaccttgaaaaatattta

SEQ ID NO: 180691 - DNA, 2414 bp, Homo sapiens
  Payload ID: 15588
  Gene Symbol: SGK1
  Gene Name: serum/glucocorticoid regulated kinase 1
  Uniprot ID: O00141
  ENST ID: ENST00000367857
  CDS Start-End: 234-1499
cagcatacgccgagccggtctttgagcgctaacgtctttctgtctccccgcggtggtgatgacggtgaaaactgaggctgctaagggcaccctcacttactccaggatgaggggcatggtggcaattctcatcggtgagtgcaggaatcttgcgggacttctgctccaggagacgcaaagtggaaattttttgaaagtcccggatcagattagtgtgtgtggcgccggacgttatgaagccgtctaaacgtttctttatttctcctccttcatccacagctttcatgaagcagaggaggatgggtctgaacgactttattcagaagattgccaataactcctatgcatgcaaacaccctgaagttcagtccatcttgaagatctcccaacctcaggagcctgagcttatgaatgccaacccttctcctccaccaagtccttctcagcaaatcaaccttggcccgtcgtccaatcctcatgctaaaccatctgactttcacttcttgaaagtgatcggaaagggcagttttggaaaggttcttctagcaagacacaaggcagaagaagtgttctatgcagtcaaagttttacagaagaaagcaatcctgaaaaagaaagaggagaagcatattatgtcggagcggaatgttctgttgaagaatgtgaagcaccctttcctggtgggccttcacttctctttccagactgctgacaaattgtactttgtcctagactacattaatggtggagagttgttctaccatctccagagggaacgctgcttcctggaaccacgggctcgtttctatgctgctgaaatagccagtgccttgggctacctgcattcactgaacatcgtttatagagacttaaaaccagagaatattttgctagattcacagggacacattgtccttactgacttcggactctgcaaggagaacattgaacacaacagcacaacatccaccttctgtggcacgccggagtatctcgcacctgaggtgcttcataagcagccttatgacaggactgtggactggtggtgcctgggagctgtcttgtatgagatgctgtatggcctgccgcctttttatagccgaaacacagctgaaatgtacgacaacattctgaacaagcctctccagctgaaaccaaatattacaaattccgcaagacacctcctggagggcctcctgcagaaggacaggacaaagcggctcggggccaaggatgacttcatggagattaagagtcatgtcttcttctccttaattaactgggatgatctcattaataagaagattactcccccttttaacccaaatgtgagtgggcccaacgacctacggcactttgaccccgagtttaccgaagagcctgtccccaactccattggcaagtcccctgacagcgtcctcgtcacagccagcgtcaaggaagctgccgaggctttcctaggcttttcctatgcgcctcccacggactctttcctctgaaccctgttagggcttggttttaaaggattttatgtgtgtttccgaatgttttagttagccttttggtggagccgccagctgacaggacatcttacaagagaatttgcacatctctggaagcttagcaatcttattgcacactgttcgctggaagctttttgaagagcacattctcctcagtgagctcatgaggttttcatttttattcttccttccaacgtggtgctatctctgaaacgagcgttagagtgccgccttagacggaggcaggagtttcgttagaaagcggacgctgttctaaaaaaggtctcctgcagatctgtctgggctgtgatgacgaatattatgaaatgtgccttttctgaagagattgtgttagctccaaagcttttcctatcgcagtgtttcagttctttattttcccttgtggatatgctgtgtgaaccgtcgtgtgagtgtggtatgcctgatcacagatggattttgttataagcatcaatgtgacacttgcaggacactacaacgtgggacattgtttgtttcttccatatttggaagataaatttatgtgtagacttttttgtaagatacggttaataactaaaatttattgaaatggtcttgcaatgactcgtattcagatgcttaaagaaagcattgctgctacaaatatttctatttttagaaagggtttttatggaccaatgccccagttgtcagtcagagccgttggtgtttttcattgtttaaaatgtcacctgtaaaatgggcattatttatgtttttttttttgcattcctgataattgtatgtattgtataaagaacgtctgtacattgggttataacactagtatatttaaacttacaggcttatttgtaatgtaaaccaccattttaatgtactgtaattaac

SEQ ID NO: 180692 - DNA, 3201 bp, Homo sapiens
  Payload ID: 15588
  Gene Symbol: SGK1
  Gene Name: serum/glucocorticoid regulated kinase 1
  Uniprot ID: O00141
  ENST ID: ENST00000367858
  CDS Start-End: 599-2179
agatattcatgaaccgttgcttcttccagcctcgccttctcgctccctctgcctttctggcgctgttctccctccctccctctggcttctgctctttcttactccttctctcagctgcttaactacagctcccactggaacttgcacaatcaaaaacaactctcctctctcaagccgcctccaggagcgcatcacctggagaagagcgactcgctccccgcgccggccgcggaagagcagccaggtagctgggggcggggaggcgtacccttctcccgctcggtaagagccacagcatctccccggagattggccgtatcccaccgtccggcccccagggtcctgcagcggtgatgcatatgtttcggagcaatgatggaaggagaaaagccgctgtcggtggcaactgaaagtggggagaggttgctgcagtagctggtgctgcagaatgcgcgagtgaagaactgagccccgctagattctccatcccgctcagtcttcattaactgtctgcaggaggtaaaccggggaaacagatatgcactaaccaggcgggtgccaacctggatctataactgtgaattccccacggtggaaaatggtaaacaaagacatgaatggattcccagtcaagaaatgctcagccttccaattttttaagaagcgggtacgaaggtggatcaagagcccaatggtcagtgtggacaagcatcagagtcccagcctgaagtacaccggctcctccatggtgcacatccctccaggggagccagacttcgagtcttccttgtgtcaaacatgcctgggtgaacatgctttccaaagaggggttctccctcaggagaacgagtcatgttcatgggaaactcaatctgggtgtgaagtgagagagccatgtaatcatgccaacatcctgaccaagcccgatccaagaaccttctggactaatgatgatccagctttcatgaagcagaggaggatgggtctgaacgactttattcagaagattgccaataactcctatgcatgcaaacaccctgaagttcagtccatcttgaagatctcccaacctcaggagcctgagcttatgaatgccaacccttctcctccaccaagtccttctcagcaaatcaaccttggcccgtcgtccaatcctcatgctaaaccatctgactttcacttcttgaaagtgatcggaaagggcagttttggaaaggttcttctagcaagacacaaggcagaagaagtgttctatgcagtcaaagttttacagaagaaagcaatcctgaaaaagaaagaggagaagcatattatgtcggagcggaatgttctgttgaagaatgtgaagcaccctttcctggtgggccttcacttctctttccagactgctgacaaattgtactttgtcctagactacattaatggtggagagttgttctaccatctccagagggaacgctgcttcctggaaccacgggctcgtttctatgctgctgaaatagccagtgccttgggctacctgcattcactgaacatcgtttatagagacttaaaaccagagaatattttgctagattcacagggacacattgtccttactgacttcggactctgcaaggagaacattgaacacaacagcacaacatccaccttctgtggcacgccggagtatctcgcacctgaggtgcttcataagcagccttatgacaggactgtggactggtggtgcctgggagctgtcttgtatgagatgctgtatggcctgccgcctttttatagccgaaacacagctgaaatgtacgacaacattctgaacaagcctctccagctgaaaccaaatattacaaattccgcaagacacctcctggagggcctcctgcagaaggacaggacaaagcggctcggggccaaggatgacttcatggagattaagagtcatgtcttcttctccttaattaactgggatgatctcattaataagaagattactcccccttttaacccaaatgtgagtgggcccaacgacctacggcactttgaccccgagtttaccgaagagcctgtccccaactccattggcaagtcccctgacagcgtcctcgtcacagccagcgtcaaggaagctgccgaggctttcctaggcttttcctatgcgcctcccacggactctttcctctgaaccctgttagggcttggttttaaaggattttatgtgtgtttccgaatgttttagttagccttttggtggagccgccagctgacaggacatcttacaagagaatttgcacatctctggaagcttagcaatcttattgcacactgttcgctggaagctttttgaagagcacattctcctcagtgagctcatgaggttttcatttttattcttccttccaacgtggtgctatctctgaaacgagcgttagagtgccgccttagacggaggcaggagtttcgttagaaagcggacgctgttctaaaaaaggtctcctgcagatctgtctgggctgtgatgacgaatattatgaaatgtgccttttctgaagagattgtgttagctccaaagcttttcctatcgcagtgtttcagttctttattttcccttgtggatatgctgtgtgaaccgtcgtgtgagtgtggtatgcctgatcacagatggattttgttataagcatcaatgtgacacttgcaggacactacaacgtgggacattgtttgtttcttccatatttggaagataaatttatgtgtagacttttttgtaagatacggttaataactaaaatttattgaaatggtcttgcaatgactcgtattcagatgcttaaagaaagcattgctgctacaaatatttctatttttagaaagggtttttatggaccaatgccccagttgtcagtcagagccgttggtgtttttcattgtttaaaatgtcacctgtaaaatgggcattatttatgtttttttttttgcattcctgataattgtatgtattgtataaagaacgtctgtacattgggttataacactagtatatttaaacttacaggcttatttgtaatgtaaaccaccattttaatgtactgtaattaacatggttataatacgtacaatccttccctcatcccatcacacaactttttttgtgtgtgataaactgattttggtttgcaataaaaccttgaaaaatatttacatata

SEQ ID NO: 180693 - DNA, 2686 bp, Homo sapiens
  Payload ID: 15588
  Gene Symbol: SGK1
  Gene Name: serum/glucocorticoid regulated kinase 1
  Uniprot ID: O00141
  ENST ID: ENST00000413996
  CDS Start-End: 331-1668
gcagattgtacttcttcctttagtgcagagacgacttttatttccgccccctcccctccacattcctgacctctccctcccccttttccctctttctttccttccttcctcctcttccaagttctgggatttttcagccttgcttggttttggccaaaagcacaaaaaaggcgttttcggaagcgacccgaccgtgcacaagggccatttgtttgttttgggactcggggcaggaaatcttgcccggcctgagtcacggcggctccttcaaggaaacgtcagtgctcgccggtcgctctcgtctgccgcgcgccccgccgcccgctgcccatgggggagatgcagggcgcgctggccagagcccggctcgagtccctgctgcggccccgccacaaaaagagggccgaggcgcagaaaaggagcgagtccttcctgctgagcggactggctttcatgaagcagaggaggatgggtctgaacgactttattcagaagattgccaataactcctatgcatgcaaacaccctgaagttcagtccatcttgaagatctcccaacctcaggagcctgagcttatgaatgccaacccttctcctccaccaagtccttctcagcaaatcaaccttggcccgtcgtccaatcctcatgctaaaccatctgactttcacttcttgaaagtgatcggaaagggcagttttggaaaggttcttctagcaagacacaaggcagaagaagtgttctatgcagtcaaagttttacagaagaaagcaatcctgaaaaagaaagaggagaagcatattatgtcggagcggaatgttctgttgaagaatgtgaagcaccctttcctggtgggccttcacttctctttccagactgctgacaaattgtactttgtcctagactacattaatggtggagagttgttctaccatctccagagggaacgctgcttcctggaaccacgggctcgtttctatgctgctgaaatagccagtgccttgggctacctgcattcactgaacatcgtttatagagacttaaaaccagagaatattttgctagattcacagggacacattgtccttactgacttcggactctgcaaggagaacattgaacacaacagcacaacatccaccttctgtggcacgccggagtatctcgcacctgaggtgcttcataagcagccttatgacaggactgtggactggtggtgcctgggagctgtcttgtatgagatgctgtatggcctgccgcctttttatagccgaaacacagctgaaatgtacgacaacattctgaacaagcctctccagctgaaaccaaatattacaaattccgcaagacacctcctggagggcctcctgcagaaggacaggacaaagcggctcggggccaaggatgacttcatggagattaagagtcatgtcttcttctccttaattaactgggatgatctcattaataagaagattactcccccttttaacccaaatgtgagtgggcccaacgacctacggcactttgaccccgagtttaccgaagagcctgtccccaactccattggcaagtcccctgacagcgtcctcgtcacagccagcgtcaaggaagctgccgaggctttcctaggcttttcctatgcgcctcccacggactctttcctctgaaccctgttagggcttggttttaaaggattttatgtgtgtttccgaatgttttagttagccttttggtggagccgccagctgacaggacatcttacaagagaatttgcacatctctggaagcttagcaatcttattgcacactgttcgctggaagctttttgaagagcacattctcctcagtgagctcatgaggttttcatttttattcttccttccaacgtggtgctatctctgaaacgagcgttagagtgccgccttagacggaggcaggagtttcgttagaaagcggacgctgttctaaaaaaggtctcctgcagatctgtctgggctgtgatgacgaatattatgaaatgtgccttttctgaagagattgtgttagctccaaagcttttcctatcgcagtgtttcagttctttattttcccttgtggatatgctgtgtgaaccgtcgtgtgagtgtggtatgcctgatcacagatggattttgttataagcatcaatgtgacacttgcaggacactacaacgtgggacattgtttgtttcttccatatttggaagataaatttatgtgtagacttttttgtaagatacggttaataactaaaatttattgaaatggtcttgcaatgactcgtattcagatgcttaaagaaagcattgctgctacaaatatttctatttttagaaagggtttttatggaccaatgccccagttgtcagtcagagccgttggtgtttttcattgtttaaaatgtcacctgtaaaatgggcattatttatgtttttttttttgcattcctgataattgtatgtattgtataaagaacgtctgtacattgggttataacactagtatatttaaacttacaggcttatttgtaatgtaaaccaccattttaatgtactgtaattaacatggttataatacgtacaatccttccctcatcccatcacacaactttttttgtgtgtgataaactgattttggtttgcaataaaaccttgaaaaatatttaca

SEQ ID NO: 180694 - DNA, 267 bp, Homo sapiens
  Payload ID: 15588
  Gene Symbol: SGK1
  Gene Name: serum/glucocorticoid regulated kinase 1
  ENST ID: ENST00000460769
  CDS Start-End: 1-166
ccctccaggggagccagacttcgagtcttccttgtgtcaaacatgcctgggtgaacatgctttccaaagaggggttctccctcaggagaacgagtcatgttcatgggaaactcaatctgggtgtgaaattctctgcaaaacttctggacaactgacatctccctaaatgtgatattctcatacacccccatcttctgatgtttaaattgtaacctatgacaatacttctagatgtcaaaacaatagtgattaaacattcaacggtta

SEQ ID NO: 180695 - DNA, 1383 bp, Homo sapiens
  Payload ID: 15588
  Gene Symbol: SGK1
  Gene Name: serum/glucocorticoid regulated kinase 1
  ENST ID: ENST00000475719
  CDS Start-End: 58-1221
agcatacgccgagccggtctttgagcgctaacgtctttctgtctccccgcggtggtgatgacggtgaaaactgaggctgctaagggcaccctcacttactccaggatgaggggcatggtggcaattctcatcgctttcatgaagcagaggaggatgggtctgaacgactttattcagaagattgccaataactcctatgcatgcaaacaccctgaagttcagtccatcttgaagatctcccaacctcaggagcctgagcttatgaatgccaacccttctcctccaccaagtccttctcagcaaatcaaccttggcccgtcgtccaatcctcatgctaaaccatctgactttcacttcttgaaagtgatcggaaagggcagttttggaaaggttcttctagcaagacacaaggcagaagaagtgttctatgcagtcaaagttttacagaagaaagcaatcctgaaaaagaaagagttgttctaccatctccagagggaacgctgcttcctggaaccacgggctcgtttctatgctgctgaaatagccagtgccttgggctacctgcattcactgaacatcgtttatagagacttaaaaccagagaatattttgctagattcacagggacacattgtccttactgacttcggactctgcaaggagaacattgaacacaacagcacaacatccaccttctgtggcacgccggagtatctcgcacctgaggtgcttcataagcagccttatgacaggactgtggactggtggtgcctgggagctgtcttgtatgagatgctgtatggcctgccgcctttttatagccgaaacacagctgaaatgtacgacaacattctgaacaagcctctccagctgaaaccaaatattacaaattccgcaagacacctcctggagggcctcctgcagaaggacaggacaaagcggctcggggccaaggatgacttcatggagattaagagtcatgtcttcttctccttaattaactgggatgatctcattaataagaagattactcccccttttaacccaaatgtgagtgggcccaacgacctacggcactttgaccccgagtttaccgaagagcctgtccccaactccattggcaagtcccctgacagcgtcctcgtcacagccagcgtcaaggaagctgccgaggctttcctaggcttttcctatgcgcctcccacggactctttcctctgaaccctgttagggcttggttttaaaggattttatgtgtgtttccgaatgttttagttagccttttggtggagccgccagctgacaggacatcttacaagagaatttgcacatctctggaagcttagcaatcttattgcacactgttcgctggaagctttttga

SEQ ID NO: 180696 - DNA, 1850 bp, Homo sapiens
  Payload ID: 15588
  Gene Symbol: SGK1
  Gene Name: serum/glucocorticoid regulated kinase 1
  Uniprot ID: O00141
  ENST ID: ENST00000528577
  CDS Start-End: 84-1463
gctcccttcctgtacttaaattgccttgatataaagtggggttcataacagaacagggatagccgtctctggctcgtgctctcatgtcatctcagagttccagcttatcagaggcatgtagcagggaggcttattccagccataactgggctctacctccagcctccagaagtaatccccaacctgcatatccttgggcaacccgaagaatgaaagaagaagctataaaaccccctttgaaagctttcatgaagcagaggaggatgggtctgaacgactttattcagaagattgccaataactcctatgcatgcaaacaccctgaagttcagtccatcttgaagatctcccaacctcaggagcctgagcttatgaatgccaacccttctcctccaccaagtccttctcagcaaatcaaccttggcccgtcgtccaatcctcatgctaaaccatctgactttcacttcttgaaagtgatcggaaagggcagttttggaaaggttcttctagcaagacacaaggcagaagaagtgttctatgcagtcaaagttttacagaagaaagcaatcctgaaaaagaaagaggagaagcatattatgtcggagcggaatgttctgttgaagaatgtgaagcaccctttcctggtgggccttcacttctctttccagactgctgacaaattgtactttgtcctagactacattaatggtggagagttgttctaccatctccagagggaacgctgcttcctggaaccacgggctcgtttctatgctgctgaaatagccagtgccttgggctacctgcattcactgaacatcgtttatagagacttaaaaccagagaatattttgctagattcacagggacacattgtccttactgacttcggactctgcaaggagaacattgaacacaacagcacaacatccaccttctgtggcacgccggagtatctcgcacctgaggtgcttcataagcagccttatgacaggactgtggactggtggtgcctgggagctgtcttgtatgagatgctgtatggcctgccgcctttttatagccgaaacacagctgaaatgtacgacaacattctgaacaagcctctccagctgaaaccaaatattacaaattccgcaagacacctcctggagggcctcctgcagaaggacaggacaaagcggctcggggccaaggatgacttcatggagattaagagtcatgtcttcttctccttaattaactgggatgatctcattaataagaagattactcccccttttaacccaaatgtgagtgggcccaacgacctacggcactttgaccccgagtttaccgaagagcctgtccccaactccattggcaagtcccctgacagcgtcctcgtcacagccagcgtcaaggaagctgccgaggctttcctaggcttttcctatgcgcctcccacggactctttcctctgaaccctgttagggcttggttttaaaggattttatgtgtgtttccgaatgttttagttagccttttggtggagccgccagctgacaggacatcttacaagagaatttgcacatctctggaagcttagcaatcttattgcacactgttcgctggaagctttttgaagagcacattctcctcagtgagctcatgaggttttcatttttattcttccttccaacgtggtgctatctctgaaacgagcgttagagtgccgccttagacggaggcaggagtttcgttagaaagcggacgctgttctaaaaaaggtctcctgcagatctgtctgggctgtgatgacgaatattatgaaatgtgccttttctgaagagattgtgttagctccaaag

SEQ ID NO: 180697 - DNA, 553 bp, Homo sapiens
  Payload ID: 15588
  Gene Symbol: SGK1
  Gene Name: serum/glucocorticoid regulated kinase 1
  ENST ID: ENST00000461976
  CDS Start-End: 122-553
aatcaaaaacaactctcctctctcaagccgcctccaggagcgcatcacctggagaagagcgactcgctccccgcgccggccgcggaagagcagccaggtacgaaggtggatcaagagcccaatggtcagtgtggacaagcatcagagtcccagcctgaagtacaccggctcctccatggtgcacatccctccaggggagccagacttcgagtcttccttgtgtcaaacatgcctgggtgaacatgctttccaaagaggggttctccctcaggagaacgagtcatgttcatgggaaactcaatctgggtgtgaagtgagagagccatgtaatcatgccaacatcctgaccaagcccgatccaagaaccttctggactaatgatgatccagctttcatgaagcagaggaggatgggtctgaacgactttattcagaagattgccaataactcctatgcatgcaaacaccctgaagttcagtccatcttgaagatctcccaacctcaggagcctgagcttatgaatgccaacccttctcctccaccaagtccttct

SEQ ID NO: 180698 - DNA, 2594 bp, Homo sapiens
  Payload ID: 15588
  Gene Symbol: SGK1
  Gene Name: serum/glucocorticoid regulated kinase 1
  ENST ID: ENST00000524929
  CDS Start-End: 170-631
cagtagctggtgctgcagaatgcgcgagtgaagaactgagccccgctagattctccatcccgctcagtcttcattaactgtctgcaggaggtaaaccggggaaacagatatgcactaaccaggcgggtgccaacctggatctataactgtgaattccccacggtggaaaatggtaaacaaagacatgaatggattcccagtcaagaaatgctcagccttccaattttttaagaagcgggtacgaaggtggatcaagagcccaatggtcagtgtggacaagcatcagagtcccagcctgaagtacaccggctcctccatggtgcacatccctccaggggagccagacttcgagtcttccttgtgtcaaacatgcctgggtgaacatgctttccaaagaggggttctccctcaggagaacgagtcatgttcatgggaaactcaatctgggtgtgaagtaagttcatgttcgctctggatctattctcctggaaaaattctgggcctttgtttttcttgtatttctgccagagtatacccaaaaaataattttttaatgcatatttataaagcttctgaggaagacctagaattgtggtctttgttagctcattatgttatttttttaaagtaggctttatattttagagcagctttaagttcacagcaacattgagcagaaggtacagagattacccatatacgcttgtccccatgcacgtataacctactttgccatcaacattccctagcagagttttatgttagagttcactcttggtgttatacattctatgggtttggactaatgtataataacatgcatccaccattacagtatcatacagttaagtttcactgccctaaaaatcctctgccctccactattcatcccctccttaccctgacccctagcaaccactgatctttttactgtctccatagatttgccttttccagaatgtcatctagctgaatcatgcagtatgttgtattaatgttttacgtgggtccaagactgatacagcaatgtgttggtaaactggcaattcctcagaagtggtttgatcacacaggagatcaagtcttagatgatacaacgattgtaatagtcatctacatgttcgtagcttccattgaaatatttagttcaacacgatttgatccatttacagagcactatgtatacttttcattatttttctcaagctcatatatactcacatttttactaagacttattttccctgctactccaagagttgttttttaaaaattttgttaatccaagaaaaccagataactgattcatcttgcagtttctaagatttcaaaaatttaagattatatttttaacttataacttaattaggcccatatttattttgatttttaaaaccattatataaaatgcttatattatttttaccatcatactgacataaaaatacaatatttagaagacagaacatgttattacaaagtacagttaattgtaagtgatcttccaagtcagtgcatcatagaatgataaacgttaataaccgctcaccttttttatttttagcaaggtaaccattttccagagataaaataatcatttagctgctaaaagactgaagacattaaatctgagttccttttcactctgagttatcacgcaatgtcgctgaatctgtttcataatttgtctactttctttctttcttttttttttttttttgagtttcactcttgttgcccagactggagtgcaatggcacgatctcggctcactgcaacctccgcttcctgagttcaagtaattcttctgcctcagtctcccgagtagctgggattacaggcacccaacaccacgcctggctaatttttgtatttttaatagaaacagggtttctctatgttggtcaggctggtgtcaaactcccaacctcaggtaatccacctgcgtcggctttccaaattgctgggattacaggcatgagccactacgccggccctttttttggggggggtgggggtcggggacagggagacagggggacagagtcttgctctgtaaccctgacttgagtgcagtagtgcaatcataactcactgttacctcaaactcctaggttcaagtgatcctcccacctcaaccctcccaagtaaataagaccacaggcatacgccaacaaacctggctaattaaaaaaaaaaaattttttttgtagaaacagggtgttgtcatactgaccaggctggtcttgaactcctggcttcaagtgatcctcccaaaatgctgggattataggtatgaggcacaatgcccagcctacttgtctactttctacggttattggaaaaatcaaatgagattgatatgaaatgtttcataatctatagaatgccatgcaaatataaatcattattgctcatgtttgctgatttacatattagctaagcctgtgactctgtaacactatattagacttccataactgggttagcactttgctgatccatgaacatttgtcatggtgcatttgctttttagccagatgttggttcaactctaggtttgtcatgaaaaacaataaagacgctaaatgcaa

SEQ ID NO: 180699 - DNA, 560 bp, Homo sapiens
  Payload ID: 15588
  Gene Symbol: SGK1
  Gene Name: serum/glucocorticoid regulated kinase 1
  ENST ID: ENST00000533224
  CDS Start-End: 381-560
aactgctcttcagtgtgccctgagccggctgtgccttctctccatccgctgctcagatattcatgaaccgttgcttcttccagcctcgccttctcgctccctctgcctttctggcgctgttctccctccctccctctggcttctgctctttcttactccttctctcagctgcttaactacagctcccactggaacttgcacaatcaaaaacaactctcctctctcaagccgcctccaggagcgcatcacctggagaagagcgactcgctccccgcgccggccgcggaagagcagccaggaggtaaaccggggaaacagatatgcactaaccaggcgggtgccaacctggatctataactgtgaattccccacggtggaaaatggtaaacaaagacatgaatggattcccagtcaagaaatgctcagccttccaattttttaagaagcgggtacgaaggtggatcaagagcccaatggtcagtgtggacaagcatcagagtcccagcctgaagtacaccggctcctccatggtgcacatccctccaggggagccagacttc

SEQ ID NO: 180700 - DNA, 2498 bp, Homo sapiens
  Payload ID: 15589
  Gene Symbol: SGK2
  Gene Name: serum/glucocorticoid regulated kinase 2
  Uniprot ID: Q9HBY8
  ENST ID: ENST00000341458
  CDS Start-End: 554-1837
agggtggaagcaaggaagacactattcctggccacatagatcagctggtcacaccttctgttgtttggccccgaatagatattggccagtcttgggtctctctgtggccccagcccaaggcttccagggcagctgcctttcctgaggcattgggcagaattccttgtggcaaggagatcgtagcacagagcccagctgggactgcgcacagtaattcagggttgccattgttcctctatgggagtccggagagcccagcctgtgcttcacaaggctatgtggccctaggaaggtccttttttaggccacaggccttccatctgtgaaatgggggatgggttcagactttatgccctgaaaagatccttccagccctggccatcttggacttctggagctaccctggctcacaggggtcttgttgccctgggtgtccccagttcttgaaaagaatcagcctgggaggggccacaccctgaccatccccctttatcccttctgagatgtttgttaggaagtctgggtccaggggatatcatttcttgttccatccatgcaggggttgcttacctcgggtaggaaaccctcaggcggtggcaggtgcacaggtaggggaggatggagagggcagtggtgcctgaagccctggatgggcggagctgaccccccaacaccaactctctcatgcctgctcctccctgtccccccagagctgcctgatcattgctacagaatgaactctagcccagctgggaccccaagtccacagccctccagggccaatgggaacatcaacctggggccttcagccaacccaaatgcccagcccacggacttcgacttcctcaaagtcatcggcaaagggaactacgggaaggtcctactggccaagcgcaagtctgatggggcgttctatgcagtgaaggtactacagaaaaagtccatcttaaagaagaaagagcagagccacatcatggcagagcgcagtgtgcttctgaagaacgtgcggcaccccttcctcgtgggcctgcgctactccttccagacacctgagaagctctacttcgtgctcgactatgtcaacgggggagagctcttcttccacctgcagcgggagcgccggttcctggagccccgggccaggttctacgctgctgaggtggccagcgccattggctacctgcactccctcaacatcatttacagggatctgaaaccagagaacattctcttggactgccagggacacgtggtgctgacggattttggcctctgcaaggaaggtgtagagcctgaagacaccacatccacattctgtggtacccctgagtacttggcacctgaagtgcttcggaaagagccttatgatcgagcagtggactggtggtgcttgggggcagtcctctacgagatgctccatggcctgccgcccttctacagccaagatgtatcccagatgtatgagaacattctgcaccagccgctacagatccccggaggccggacagtggccgcctgtgacctcctgcaaagccttctccacaaggaccagaggcagcggctgggctccaaagcagactttcttgagattaagaaccatgtattcttcagccccataaactgggatgacctgtaccacaagaggctaactccacccttcaacccaaatgtgacaggacctgctgacttgaagcattttgacccagagttcacccaggaagctgtgtccaagtccattggctgtacccctgacactgtggccagcagctctggggcctcaagtgcattcctgggattttcttatgcgccagaggatgatgacatcttggattgctagaagagaaggacctgtgaaactactgaggccagctggtattagtaaggaattaccttcagctgctaggaagagcgactcaaactaacaatggcttcaacgagaagcaggtttattttttccagcacataaaagaaaaataatgtttcggagtccaggactggcaggacaggtcatcagatactcagaggctgtatctctgccctgccaaccttgacaaatggcttccaatgttaggtttgctacaagatggttactggagctctagctgcctattttgtgtttagggaagggaaaatggaggaaaggggagaagagcaaagggcgcttttaaagagctttcccaaaagctccacccaatgacttctgcttccatctcactaaccacccacccctacctggaatggaggctgggagatgtggcttatttgctgggtacgtgactatccctaataacaaaggggttctgacactaagacattaggggagaatgttgggtaggcagccagcactcttttaccagagggcctcctggtgtttggattttgatctcaatgtgtaaaatgacagagatgtaacaagctcatagggtatcaatatctcttattgttctatgttgatgatatttgtctttgttgtgggtaatactggacatttgttattg

SEQ ID NO: 180701 - DNA, 1736 bp, Homo sapiens
  Payload ID: 15589
  Gene Symbol: SGK2
  Gene Name: serum/glucocorticoid regulated kinase 2
  ENST ID: ENST00000373077
  CDS Start-End: 157-1233
attcctgactgggaaggttgcttgacaagtcaggattgtgcctccagtcagaaggaccatgaagagagagaagagggcagagccgtgcatggggctgctccccaggacctgagcaggaacctggagttttcagagctgcctgatcattgctacagaatgaactctagcccagctgggaccccaagtccacagccctccagggccaatgggaacatcaacctggggccttcagccaacccaaatgcccagcccacggacttcgacttcctcaaagtcatcggcaaagggaactacgggaaggtcctactggccaagcgcaagtctgatggggcgttctatgcagtgaaggtactacagaaaaagtccatcttaaagaagaaagagcagagccacatcatggcagagcgcagtgtgcttctgaagaacgtgcggcaccccttcctcgtgggcctgcgctactccttccagacacctgagaagctctacttcgtgctcgactatgtcaacgggggagagctcttcttccacctgcagcgggagcgccggttcctggagccccgggccaggttctacgctgctgaggtggccagcgccattggctacctgcactccctcaacatcatttacagggatctgaaaccagagaacattctcttggactgccagggacacgtggtgctgacggattttggcctctgcaaggaaggtgtagagcctgaagacaccacatccacattctgtggtacccctgagtacttggcacctgaagtgcttcggaaagagccttatgatcgagcagtggactggtggtgcttgggggcagtcctctacgagatgctccatggcctgccgcccttctacagccaagatgtatcccagatgtatgagaacattctgcaccagccgctacagatccccggaggccggacagtggccgcctgtgacctcctgcaaagccttctccacaaggaccagaggcagcggctgggctccaaagcagactttcttgagattaagaaccatgtattcttcagccccataaactgggatgacctgtaccacaagaggctaactccacccttcaacccaaatgtggatacactcgggccaggcaccagaaaagcttcttttcgttgggattttaaaaagacagtgaagataatgtcgaacttataccctggagagagaaccatacatggaatactaggcagagatgaatggactttagaatgagacactccggagctggattcctggttttgtcacctaccatttgtgaggtcttcaacaggacctgctgacttgaagcattttgacccagagttcacccaggaagctgtgtccaagtccattggctgtacccctgacactgtggccagcagctctggggcctcaagtgcattcctgggattttcttatgcgccagaggatgatgacatcttggattgctagaagagaaggacctgtgaaactactgaggccagctggtattagtaaggaattaccttcagctgctaggaagagcgactcaaactaacaatggcttcaacgagaagcaggtttattttttccagcacataaaagaaaaataatgtttcggagtccaggactggcaggacaggtcatcagatactcagaggctgtatctctgccctgccaaccttgacaaatggcttccaatgttaggtttgctacaagatggttactggagctctagctgcctattttgtgtttag

SEQ ID NO: 180702 - DNA, 1906 bp, Homo sapiens
  Payload ID: 15589
  Gene Symbol: SGK2
  Gene Name: serum/glucocorticoid regulated kinase 2
  Uniprot ID: Q9HBY8
  ENST ID: ENST00000373092
  CDS Start-End: 142-1245
ggttgcttgacaagtcaggattgtgcctccagtcagaaggaccatgaagagagagaagagggcagagccgtgcatggggctgctccccaggacctgagcaggaacctggagttttcagagctgcctgatcattgctacagaatgaactctagcccagctgggaccccaagtccacagccctccagggccaatgggaacatcaacctggggccttcagccaacccaaatgcccagcccacggacttcgacttcctcaaagtcatcggcaaagggaactacgggaaggtcctactggccaagcgcaagtctgatggggcgttctatgcagtgaaggtactacagaaaaagtccatcttaaagaagaaagagcagagccacatcatggcagagcgcagtgtgcttctgaagaacgtgcggcaccccttcctcgtgggcctgcgctactccttccagacacctgagaagctctacttcgtgctcgactatgtcaacgggggagagctcttcttccacctgcagcgggagcgccggttcctggagccccgggccaggttctacgctgctgaggtggccagcgccattggctacctgcactccctcaacatcatttacagggatctgaaaccagagaacattctcttggactgccagggacacgtggtgctgacggattttggcctctgcaaggaaggtgtagagcctgaagacaccacatccacattctgtggtacccctgagtacttggcacctgaagtgcttcggaaagagccttatgatcgagcagtggactggtggtgcttgggggcagtcctctacgagatgctccatggcctgccgcccttctacagccaagatgtatcccagatgtatgagaacattctgcaccagccgctacagatccccggaggccggacagtggccgcctgtgacctcctgcaaagccttctccacaaggaccagaggcagcggctgggctccaaagcagactttcttgagattaagaaccatgtattcttcagccccataaactgggatgacctgtaccacaagaggctaactccacccttcaacccaaatgtgacaggacctgctgacttgaagcattttgacccagagttcacccaggaagctgtgtccaagtccattggctgtacccctgacactgtggccagcagctctggggcctcaagtgcattcctgggattttcttatgcgccagaggatgatgacatcttggattgctagaagagaaggacctgtgaaactactgaggccagctggtattagtaaggaattaccttcagctgctaggaagagcgactcaaactaacaatggcttcaacgagaagcaggtttattttttccagcacataaaagaaaaataatgtttcggagtccaggactggcaggacaggtcatcagatactcagaggctgtatctctgccctgccaaccttgacaaatggcttccaatgttaggtttgctacaagatggttactggagctctagctgcctattttgtgtttagggaagggaaaatggaggaaaggggagaagagcaaagggcgcttttaaagagctttcccaaaagctccacccaatgacttctgcttccatctcactaaccacccacccctacctggaatggaggctgggagatgtggcttatttgctgggtacgtgactatccctaataacaaaggggttctgacactaagacattaggggagaatgttgggtaggcagccagcactcttttaccagagggcctcctggtgtttggattttgatctcaatgtgtaaaatgacagagatgtaacaagctcatagggtatcaatatctcttattgttctatgttgatgatatttgtctttgttgtgggtaatactggacatttgttattg

SEQ ID NO: 180703 - DNA, 2225 bp, Homo sapiens
  Payload ID: 15589
  Gene Symbol: SGK2
  Gene Name: serum/glucocorticoid regulated kinase 2
  Uniprot ID: Q9HBY8
  ENST ID: ENST00000373100
  CDS Start-End: 461-1564
agggctgggaggttgaacttgagccggtttgggagccaggagcgagtgggtgacaggtcattcctgactgggaaggttgcttgacaagtcaggattgtgcctccagtcagaaggaccatgaagagagagaagagggcagagccgtgcatggggctgctccccaggacctgagcaggaacctggagttttcagggtgagatggtgttccccagggaacagaagtctccagtcccatcttaagctctgccggatcccgcgtgacatcagctagccccctcgcggctgccgggagctgtgagctctgtgctggggccaggccggcaccaggcacagacacttaggcccttgttgggagaacagagagaggctctcttgtccactgcctgtcttcggttccaactgctggttctcctagaggcctctcctcagactcgcagagctgcctgatcattgctacagaatgaactctagcccagctgggaccccaagtccacagccctccagggccaatgggaacatcaacctggggccttcagccaacccaaatgcccagcccacggacttcgacttcctcaaagtcatcggcaaagggaactacgggaaggtcctactggccaagcgcaagtctgatggggcgttctatgcagtgaaggtactacagaaaaagtccatcttaaagaagaaagagcagagccacatcatggcagagcgcagtgtgcttctgaagaacgtgcggcaccccttcctcgtgggcctgcgctactccttccagacacctgagaagctctacttcgtgctcgactatgtcaacgggggagagctcttcttccacctgcagcgggagcgccggttcctggagccccgggccaggttctacgctgctgaggtggccagcgccattggctacctgcactccctcaacatcatttacagggatctgaaaccagagaacattctcttggactgccagggacacgtggtgctgacggattttggcctctgcaaggaaggtgtagagcctgaagacaccacatccacattctgtggtacccctgagtacttggcacctgaagtgcttcggaaagagccttatgatcgagcagtggactggtggtgcttgggggcagtcctctacgagatgctccatggcctgccgcccttctacagccaagatgtatcccagatgtatgagaacattctgcaccagccgctacagatccccggaggccggacagtggccgcctgtgacctcctgcaaagccttctccacaaggaccagaggcagcggctgggctccaaagcagactttcttgagattaagaaccatgtattcttcagccccataaactgggatgacctgtaccacaagaggctaactccacccttcaacccaaatgtgacaggacctgctgacttgaagcattttgacccagagttcacccaggaagctgtgtccaagtccattggctgtacccctgacactgtggccagcagctctggggcctcaagtgcattcctgggattttcttatgcgccagaggatgatgacatcttggattgctagaagagaaggacctgtgaaactactgaggccagctggtattagtaaggaattaccttcagctgctaggaagagcgactcaaactaacaatggcttcaacgagaagcaggtttattttttccagcacataaaagaaaaataatgtttcggagtccaggactggcaggacaggtcatcagatactcagaggctgtatctctgccctgccaaccttgacaaatggcttccaatgttaggtttgctacaagatggttactggagctctagctgcctattttgtgtttagggaagggaaaatggaggaaaggggagaagagcaaagggcgcttttaaagagctttcccaaaagctccacccaatgacttctgcttccatctcactaaccacccacccctacctggaatggaggctgggagatgtggcttatttgctgggtacgtgactatccctaataacaaaggggttctgacactaagacattaggggagaatgttgggtaggcagccagcactcttttaccagagggcctcctggtgtttggattttgatctcaatgtgtaaaatgacagagatgtaacaagctcatagggtatcaatatctcttattgttctatgttgatgatatttgtctttgttgtgggtaatactggacatttgttattg

SEQ ID NO: 180704 - DNA, 1915 bp, Homo sapiens
  Payload ID: 15589
  Gene Symbol: SGK2
  Gene Name: serum/glucocorticoid regulated kinase 2
  Uniprot ID: Q9HBY8
  ENST ID: ENST00000423407
  CDS Start-End: 196-1299
agctagccccctcgcggctgccgggagctgtgagctctgtgctggggccaggccggcaccaggcacagacacttaggcccttgttgggagaacagagagaggctctcttgtccactgcctgtcttcggttccaactgctggttctcctagaggcctctcctcagactcgcagagctgcctgatcattgctacagaatgaactctagcccagctgggaccccaagtccacagccctccagggccaatgggaacatcaacctggggccttcagccaacccaaatgcccagcccacggacttcgacttcctcaaagtcatcggcaaagggaactacgggaaggtcctactggccaagcgcaagtctgatggggcgttctatgcagtgaaggtactacagaaaaagtccatcttaaagaagaaagagcagagccacatcatggcagagcgcagtgtgcttctgaagaacgtgcggcaccccttcctcgtgggcctgcgctactccttccagacacctgagaagctctacttcgtgctcgactatgtcaacgggggagagctcttcttccacctgcagcgggagcgccggttcctggagccccgggccaggttctacgctgctgaggtggccagcgccattggctacctgcactccctcaacatcatttacagggatctgaaaccagagaacattctcttggactgccagggacacgtggtgctgacggattttggcctctgcaaggaaggtgtagagcctgaagacaccacatccacattctgtggtacccctgagtacttggcacctgaagtgcttcggaaagagccttatgatcgagcagtggactggtggtgcttgggggcagtcctctacgagatgctccatggcctgccgcccttctacagccaagatgtatcccagatgtatgagaacattctgcaccagccgctacagatccccggaggccggacagtggccgcctgtgacctcctgcaaagccttctccacaaggaccagaggcagcggctgggctccaaagcagactttcttgagattaagaaccatgtattcttcagccccataaactgggatgacctgtaccacaagaggctaactccacccttcaacccaaatgtgacaggacctgctgacttgaagcattttgacccagagttcacccaggaagctgtgtccaagtccattggctgtacccctgacactgtggccagcagctctggggcctcaagtgcattcctgggattttcttatgcgccagaggatgatgacatcttggattgctagaagagaaggacctgtgaaactactgaggccagctggtattagtaaggaattaccttcagctgctaggaagagcgactcaaactaacaatggcttcaacgagaagcaggtttattttttccagcacataaaagaaaaataatgtttcggagtccaggactggcaggacaggtcatcagatactcagaggctgtatctctgccctgccaaccttgacaaatggcttccaatgttaggtttgctacaagatggttactggagctctagctgcctattttgtgtttagggaagggaaaatggaggaaaggggagaagagcaaagggcgcttttaaagagctttcccaaaagctccacccaatgacttctgcttccatctcactaaccacccacccctacctggaatggaggctgggagatgtggcttatttgctgggtacgtgactatccctaataacaaaggggttctgacactaagacattaggggagaatgttgggtaggcagccagcactcttttaccagagggcctcctggtgtttggattttgatctcaatgtgtaaaatgacagagatgtaacaagctcatagggtatcaatatctcttattgttctatgttg

SEQ ID NO: 180705 - DNA, 676 bp, Homo sapiens
  Payload ID: 15589
  Gene Symbol: SGK2
  Gene Name: serum/glucocorticoid regulated kinase 2
  ENST ID: ENST00000412111
  CDS Start-End: 83-676
actgcctgtcttcggttccaactgctggttctcctagaggcctctcctcagactcgcagagctgcctgatcattgctacagaatgaactctagcccagctgggaccccaagtccacagccctccagggccaatgggaacatcaacctggggccttcagccaacccaaatgcccagcccacggacttcgacttcctcaaagtcatcggcaaagggaactacgggaaggtcctactggccaagcgcaagtctgatggggcgttctatgcagtgaaggtactacagaaaaagtccatcttaaagaagaaagagagccacatcatggcagagcgcagtgtgcttctgaagaacgtgcggcaccccttcctcgtgggcctgcgctactccttccagacacctgagaagctctacttcgtgctcgactatgtcaacgggggagagctcttcttccacctgcagcgggagcgccggttcctggagccccgggccaggttctacgctgctgaggtggccagcgccattggctacctgcactccctcaacatcatttacagggatctgaaaccagagaacattctcttggactgccagggacacgtggtgctgacggattttggcctctgcaaggaaggtgtagagcctgaagacaccacatccacattctgtggtacccctgag

SEQ ID NO: 180706 - DNA, 1182 bp, Homo sapiens
  Payload ID: 15589
  Gene Symbol: SGK2
  Gene Name: serum/glucocorticoid regulated kinase 2
  Uniprot ID: Q9HBY8
  ENST ID: ENST00000426287
  CDS Start-End: 1-1182
atgcaggggttgcttacctcgggtaggaaaccctcaggcggtggcaggtgcacagagctgcctgatcattgctacagaatgaactctagcccagctgggaccccaagtccacagccctccagggccaatgggaacatcaacctggggccttcagccaacccaaatgcccagcccacggacttcgacttcctcaaagtcatcggcaaagggaactacgggaaggtcctactggccaagcgcaagtctgatggggcgttctatgcagtgaaggtactacagaaaaagtccatcttaaagaagaaagagcagagccacatcatggcagagcgcagtgtgcttctgaagaacgtgcggcaccccttcctcgtgggcctgcgctactccttccagacacctgagaagctctacttcgtgctcgactatgtcaacgggggagagctcttcttccacctgcagcgggagcgccggttcctggagccccgggccaggttctacgctgctgaggtggccagcgccattggctacctgcactccctcaacatcatttacagggatctgaaaccagagaacattctcttggactgccagggacacgtggtgctgacggattttggcctctgcaaggaaggtgtagagcctgaagacaccacatccacattctgtggtacccctgagtacttggcacctgaagtgcttcggaaagagccttatgatcgagcagtggactggtggtgcttgggggcagtcctctacgagatgctccatggcctgccgcccttctacagccaagatgtatcccagatgtatgagaacattctgcaccagccgctacagatccccggaggccggacagtggccgcctgtgacctcctgcaaagccttctccacaaggaccagaggcagcggctgggctccaaagcagactttcttgagattaagaaccatgtattcttcagccccataaactgggatgacctgtaccacaagaggctaactccacccttcaacccaaatgtgacaggacctgctgacttgaagcattttgacccagagttcacccaggaagctgtgtccaagtccattggctgtacccctgacactgtggccagcagctctggggcctcaagtgcattcctgggattttcttatgcgccagaggatgatgacatcttggattgctag

SEQ ID NO: 180707 - DNA, 2395 bp, Homo sapiens
  Payload ID: 15589
  Gene Symbol: SGK2
  Gene Name: serum/glucocorticoid regulated kinase 2
  ENST ID: ENST00000496343
  CDS Start-End: 142-999
ggttgcttgacaagtcaggattgtgcctccagtcagaaggaccatgaagagagagaagagggcagagccgtgcatggggctgctccccaggacctgagcaggaacctggagttttcagagctgcctgatcattgctacagaatgaactctagcccagctgggaccccaagtccacagccctccagggccaatgggaacatcaacctggggccttcagccaacccaaatgcccagcccacggacttcgacttcctcaaagtcatcggcaaagggaactacgggaaggtcctactggccaagcgcaagtctgatggggcgttctatgcagtgaaggtactacagaaaaagtccatcttaaagaagaaagagcagagccacatcatggcagagcgcagtgtgcttctgaagaacgtgcggcaccccttcctcgtgggcctgcgctactccttccagacacctgagaagctctacttcgtgctcgactatgtcaacgggggagagctcttcttccacctgcagcgggagcgccggttcctggagccccgggccaggttctacgctgctgaggtggccagcgccattggctacctgcactccctcaacatcatttacagggatctgaaaccagagaacattctcttggactgccagggacacgtggtgctgacggattttggcctctgcaaggaaggtgtagagcctgaagacaccacatccacattctgtggtacccctgagtacttggcacctgaagtgcttcggaaagagccttatgatcgagcagtggactggtggtgcttgggggcagtcctctacgagatgctccatggcctgccgcccttctacagccaagatgtatcccagatgtatgagaacattctgcaccagccgctacagatccccggaggccggacagtggccgcctgtgacctcctgcaaagccttctccacaaggaccagaggcagcggctgggctccaaagcagactttgtagcttgagattaagaaccatgtattcttcagccccataaactgggatgacctgtaccacaagaggctaactccacccttcaacccaaatgtgacaggacctgctgacttgaagcattttgacccagagttcacccaggaagctgtgtccaagtccattggctgtacccctgacactgtggccagcagctctggggcctcaagtgcattcctgggattttcttatgcgccagaggatgatgacatcttggattgctagaagagaaggacctgtgaaactactgaggccagctggtattagtaaggaattaccttcagctgctaggaagagcgactcaaactaacaatggcttcaacgagaagcaggtttattttttccagcacataaaagaaaaataatgtttcggagtccaggactggcaggacaggtcatcagatactcagaggctgtatctctgccctgccaaccttgacaaatggcttccaatgttaggtttgctacaagatggttactggagctctagctgcctattttgtgtttagggaagggaaaatggaggaaaggggagaagagcaaagggcgcttttaaagagctttcccaaaagctccacccaatgacttctgcttccatctcactaaccacccacccctacctggaatggaggctgggagatgtggcttatttgctgggtacgtgactatccctaataacaaaggggttctgacactaagacattaggggagaatgttgggtaggcagccagcactcttttaccagagggcctcctggtgtttggattttgatctcaataataaataaataaatacgaaaagtggtttgtttttttacaaatgtgtggttcatactcctgggtggccttattagcttttttggttgggagacaagggaaggaactttcttggatcagtgtgtgctggtgattttattgccttttcctcttaattcaatcccactctttcccttcctcaagtcttgttcacccagcctcctgccccaggaatcacggggaagaagtctgggagaccacagaaaaaacaccaatgacactgagctattagagatcaaaactgggtcaggaagagttcatgttaagctttcacatgtgctaagaacgctgaaagatacacactgatttccatcttaatagtgccagataattgacaaatttgggacaagatgagggagaggtcaaaatccccctaacttcccaaagcaaaaaaacaggagtataatgatcagaaacgtaatagtagtgtcagaagcacacaatcagctgtggacggtgaaacatataatggttctatctgttctgagattgtaaaagcacaattattttcatcaggataaaaaataaaaatgaaaaactatgctgttgaatggaa

SEQ ID NO: 180708 - DNA, 554 bp, Homo sapiens
  Payload ID: 15589
  Gene Symbol: SGK2
  Gene Name: serum/glucocorticoid regulated kinase 2
  ENST ID: ENST00000617268
  CDS Start-End: 525-554
acatatgctgatgtaaatgtacaaatgtggtcacactgacacatacatgcaatcatctacgcagactcatagaaaccgacacaaatacctgaaatacacagccacagacagacacacacggaagcactctatgcacaaaacactcacacagtacacaccatgctgcacataccctgacccaaacagtctaacaagccctgagggtctccagggctgccctggggctattgcccacccctcccaccgtccccgctagggtgagatggtgttccccagggaacagaagtctccagtcccatcttaagctctgccggatcccgcgtgacatcagctagccccctcgcggctgccgggagctgtgagctctgtgctggggccaggccggcaccaggcacagacacttaggcccttgttgggagaacagagagaggctctcttgtccactgcctgtcttcggttccaactgctggttctcctagaggcctctcctcagactcgcagagctgcctgatcattgctacagaatgaactctagcccagctgggaccccaagt

SEQ ID NO: 180709 - DNA, 4055 bp, Homo sapiens
  Payload ID: 15590
  Gene Symbol: SGK3
  Gene Name: serum/glucocorticoid regulated kinase family, member 3
  Uniprot ID: Q96BR1
  ENST ID: ENST00000345714
  CDS Start-End: 124-1614
aggttgcatgatggaatttgaacattacttcaagaggttttgtattttggattagttaattgggtttgtcctctgctgactgtttcttcggatgcattttttggtgtgctcttgagggattaaatgcaaagagatcacaccatggactacaaggaaagctgcccaagtgtaagcattcccagctccgatgaacacagagagaaaaagaagaggtttactgtttataaagttctggtttcagtgggaagaagtgaatggtttgtcttcaggagatatgcagagtttgataaactttataacactttaaaaaaacagtttcctgctatggccctgaagattcctgccaagagaatatttggtgataattttgatccagattttattaaacaaagacgagcaggactaaacgaattcattcagaacctagttaggtatccagaactttataaccatccagatgtcagagcattccttcaaatggacagtccaaaacaccagtcagatccatctgaagatgaggatgaaagaagttctcagaagctacactctacctcacagaacatcaacctgggaccgtctggaaatcctcatgccaaaccaactgactttgatttcttaaaagttattggaaaaggcagctttggcaaggttcttcttgcaaaacggaaactggatggaaaattttatgctgtcaaagtgttacagaaaaaaatagttctcaacagaaaagagcaaaaacatattatggctgaacgtaatgtgctcttgaaaaatgtgaaacatccgtttttggttggattgcattattccttccaaacaactgaaaagctttattttgttctggattttgttaatggaggggagctttttttccacttacaaagagaacggtcctttcctgagcacagagctaggttttacgctgctgaaattgctagtgcattgggttacttacattccatcaaaatagtatacagagacttgaaaccagaaaatattcttttggattcagtaggacatgttgtcttaacagattttgggctttgtaaagaaggaattgctatttctgacaccactaccacattttgtgggacaccagagtatcttgcacctgaagtaattagaaaacagccctatgacaatactgtagattggtggtgccttggggctgttctgtatgaaatgctgtatggattgcctcctttttattgccgagatgttgctgaaatgtatgacaatatccttcacaaacccctaagtttgaggccaggagtgagtcttacagcctggtccattctggaagaactcctagaaaaagacaggcaaaatcgacttggtgccaaggaagactttcttgaaattcagaatcatcctttttttgaatcactcagctgggctgaccttgtacaaaagaagattccaccaccatttaatcctaatgtggctggaccagatgatatcagaaactttgacacagcatttacagaagaaacagttccatattctgtgtgtgtatcttctgactattctatagtgaatgccagtgtattggaggcagatgatgcattcgttggtttctcttatgcacctccttcagaagacttatttttgtgagcagtttgccattcagaaaccattgagcaaaataagtctatagatgggactgaaacttctatttgtgtgaatatattcaaatatgtataactagtgcctcatttttatatgtaatgatgaaaactatgaaaaaatgtattttcttctatgtgcaagaaaaatagggcatttcaaagagctgttttgattaaaatttatattcttgtttaataagcttatttttaaacaatttaaaagctattattcttagcattaacctatttttaaagaaaccttttttgctattgactgttttttccctctaagtttacactaacatctacccaagatagactgttttttaacagtcaatttcagttcagctaacatatattaatacctttgtaactctttgctatggcttttgttatcacaccaaaactatgcaattggtacatggttgtttaagaagaaaccgtatttttccatgataaatcactgtttgaaatatttggttcatggtatgatcgaaatgtaaaagcataattaacacattggctgctagttaacaattggaataactttattctgcagatcatttaagaagtaacaggccgggcgcggtggctcacgcctgtaatcccagcactttgggaggctgaggcgggcagatcacctgaggtcaggagttggagaccagcctgaccaacatggacaaaccccgtctctactaaaaatacaaaattggcagggtgtggtggcacatgcctataatcccagctacttgggaggctaaggcaggagaatcgcttgaacccgggaggcggaggttgcagtgagccgagatcgcaccattgcactcctgcctgggcaacaagagtgaaactccatctccaaaaaaaaaaagaaaaagtaacaaaaggaaattatttgtttttgaaataccagttcaactttgtggattatttttcctctgaaggaaaagaaaaggcttaatggttaggatttttaagtattcccaaagatctgaagggtaataaaatgtactggattttttaaggtggtaccaaaaatgaatgtctgtcatatatttatattacaaatacattatatttatgttctattcatcttttgaatgtttagtatgctattaagtcattctgaatctttgtatttgcttttgcaaataggtatttcaaagctcttttcctaactggttaagtaaaataaaaaattgagctttctagaatatttgcctaattgggaattaaaaagtaaaataataggccaggcatggtggctcatgcctataagcaccctgggaggccgaggcaggcagattatttgagctcaggagtttgagaccatcctgggcaacatggcgaaaccctatctctacaaaaaatacaaaaattagccagacatggtggcacatgcctttagtcccagctactctggaggctgaagttggaggatggcttgagcccacgagatggaagttgcagtgaactgaaattgtgccactgcacttttcagcctgggtgccacagcgagaccctagttaagagaaaaaaaaagtaaaaacaaattgtgggtcaaagtaaatgtatacagttttattacaatgtaacaaaagttgaaaatcaggcagatgtgtattcagtatccaattcaatatatcttagaaaaagcacaggaaacagaccttaaaattgtaacctaccaactaacttacatgcttataaaagtaaaggagaataactggccgggcacggtggctcatgcctataaaattccagcactttgggaggccaaggcaggaggatcacttgagcctatgagttcaagaccagcctaggcaatgtagtgacacctcatttctatttattttaaaaaaaagagagagtaactacagaagaactttaaaaaataaaaaataagcttaccttggattcttggcttagagtagaggttttttttaagttatggaggaaacatttttgtaaaagtttaatgacccactttagatgctccaagaacaagcatcccttccatgtatgtcttgagaaagaaatcacagaagcatttctcaccaatactctttggcttaaaatgttcagcagaattgggcagtgggggtgacttttcttatattaataatatttacatccaatacactgaatcttcctttagaggtaagactttaatatctatactgtaaatatttggtttatttggcactactgtaagttttgtttttcacaaagctcttattatgaagcaaaataaaaattctagtttcttgtatgattttttgtactcattcattcctgttaagctgccaaaaattaaagtgcaatattgtatatttttaagaacaaatttaaaatagaattttgatgtttctcagatcacaagaaatacaaatctatatagtataataaaatcagcaaaaagatcaa

SEQ ID NO: 180710 - DNA, 4190 bp, Homo sapiens
  Payload ID: 15590
  Gene Symbol: SGK3
  Gene Name: serum/glucocorticoid regulated kinase family, member 3
  Uniprot ID: Q96BR1
  ENST ID: ENST00000396596
  CDS Start-End: 261-1751
ggggcctgcaggtttggcccccgcagggagcgcagctggcgccgctgggagctggtggcgcggcgcaggtcccggccgagtgtggcgcagcagtggcggcgcttcccattcgccatgcgccgggggtgggtgcccgaaggttgcatgatggaatttgaacattacttcaagaggttttgtattttggattagttaattgggtttgtcctctgctgactgtttcttcggatgcattttttggtgtgctcttgagggattaaatgcaaagagatcacaccatggactacaaggaaagctgcccaagtgtaagcattcccagctccgatgaacacagagagaaaaagaagaggtttactgtttataaagttctggtttcagtgggaagaagtgaatggtttgtcttcaggagatatgcagagtttgataaactttataacactttaaaaaaacagtttcctgctatggccctgaagattcctgccaagagaatatttggtgataattttgatccagattttattaaacaaagacgagcaggactaaacgaattcattcagaacctagttaggtatccagaactttataaccatccagatgtcagagcattccttcaaatggacagtccaaaacaccagtcagatccatctgaagatgaggatgaaagaagttctcagaagctacactctacctcacagaacatcaacctgggaccgtctggaaatcctcatgccaaaccaactgactttgatttcttaaaagttattggaaaaggcagctttggcaaggttcttcttgcaaaacggaaactggatggaaaattttatgctgtcaaagtgttacagaaaaaaatagttctcaacagaaaagagcaaaaacatattatggctgaacgtaatgtgctcttgaaaaatgtgaaacatccgtttttggttggattgcattattccttccaaacaactgaaaagctttattttgttctggattttgttaatggaggggagctttttttccacttacaaagagaacggtcctttcctgagcacagagctaggttttacgctgctgaaattgctagtgcattgggttacttacattccatcaaaatagtatacagagacttgaaaccagaaaatattcttttggattcagtaggacatgttgtcttaacagattttgggctttgtaaagaaggaattgctatttctgacaccactaccacattttgtgggacaccagagtatcttgcacctgaagtaattagaaaacagccctatgacaatactgtagattggtggtgccttggggctgttctgtatgaaatgctgtatggattgcctcctttttattgccgagatgttgctgaaatgtatgacaatatccttcacaaacccctaagtttgaggccaggagtgagtcttacagcctggtccattctggaagaactcctagaaaaagacaggcaaaatcgacttggtgccaaggaagactttcttgaaattcagaatcatcctttttttgaatcactcagctgggctgaccttgtacaaaagaagattccaccaccatttaatcctaatgtggctggaccagatgatatcagaaactttgacacagcatttacagaagaaacagttccatattctgtgtgtgtatcttctgactattctatagtgaatgccagtgtattggaggcagatgatgcattcgttggtttctcttatgcacctccttcagaagacttatttttgtgagcagtttgccattcagaaaccattgagcaaaataagtctatagatgggactgaaacttctatttgtgtgaatatattcaaatatgtataactagtgcctcatttttatatgtaatgatgaaaactatgaaaaaatgtattttcttctatgtgcaagaaaaatagggcatttcaaagagctgttttgattaaaatttatattcttgtttaataagcttatttttaaacaatttaaaagctattattcttagcattaacctatttttaaagaaaccttttttgctattgactgttttttccctctaagtttacactaacatctacccaagatagactgttttttaacagtcaatttcagttcagctaacatatattaatacctttgtaactctttgctatggcttttgttatcacaccaaaactatgcaattggtacatggttgtttaagaagaaaccgtatttttccatgataaatcactgtttgaaatatttggttcatggtatgatcgaaatgtaaaagcataattaacacattggctgctagttaacaattggaataactttattctgcagatcatttaagaagtaacaggccgggcgcggtggctcacgcctgtaatcccagcactttgggaggctgaggcgggcagatcacctgaggtcaggagttggagaccagcctgaccaacatggacaaaccccgtctctactaaaaatacaaaattggcagggtgtggtggcacatgcctataatcccagctacttgggaggctaaggcaggagaatcgcttgaacccgggaggcggaggttgcagtgagccgagatcgcaccattgcactcctgcctgggcaacaagagtgaaactccatctccaaaaaaaaaaagaaaaagtaacaaaaggaaattatttgtttttgaaataccagttcaactttgtggattatttttcctctgaaggaaaagaaaaggcttaatggttaggatttttaagtattcccaaagatctgaagggtaataaaatgtactggattttttaaggtggtaccaaaaatgaatgtctgtcatatatttatattacaaatacattatatttatgttctattcatcttttgaatgtttagtatgctattaagtcattctgaatctttgtatttgcttttgcaaataggtatttcaaagctcttttcctaactggttaagtaaaataaaaaattgagctttctagaatatttgcctaattgggaattaaaaagtaaaataataggccaggcatggtggctcatgcctataagcaccctgggaggccgaggcaggcagattatttgagctcaggagtttgagaccatcctgggcaacatggcgaaaccctatctctacaaaaaatacaaaaattagccagacatggtggcacatgcctttagtcccagctactctggaggctgaagttggaggatggcttgagcccacgagatggaagttgcagtgaactgaaattgtgccactgcacttttcagcctgggtgccacagcgagaccctagttaagagaaaaaaaaagtaaaaacaaattgtgggtcaaagtaaatgtatacagttttattacaatgtaacaaaagttgaaaatcaggcagatgtgtattcagtatccaattcaatatatcttagaaaaagcacaggaaacagaccttaaaattgtaacctaccaactaacttacatgcttataaaagtaaaggagaataactggccgggcacggtggctcatgcctataaaattccagcactttgggaggccaaggcaggaggatcacttgagcctatgagttcaagaccagcctaggcaatgtagtgacacctcatttctatttattttaaaaaaaagagagagtaactacagaagaactttaaaaaataaaaaataagcttaccttggattcttggcttagagtagaggttttttttaagttatggaggaaacatttttgtaaaagtttaatgacccactttagatgctccaagaacaagcatcccttccatgtatgtcttgagaaagaaatcacagaagcatttctcaccaatactctttggcttaaaatgttcagcagaattgggcagtgggggtgacttttcttatattaataatatttacatccaatacactgaatcttcctttagaggtaagactttaatatctatactgtaaatatttggtttatttggcactactgtaagttttgtttttcacaaagctcttattatgaagcaaaataaaaattctagtttcttgtatgattttttgtactcattcattcctgttaagctgccaaaaattaaagtgcaatattgtatatttttaagaacaaatttaaaatagaattttgatgtttctcagatcacaagaaatacaaatctatatagtataataaaatcagcaaaaagatc

SEQ ID NO: 180711 - DNA, 477 bp, Homo sapiens
  Payload ID: 15590
  Gene Symbol: SGK3
  Gene Name: serum/glucocorticoid regulated kinase family, member 3
  ENST ID: ENST00000519396
  CDS Start-End: 99-477
ttaaaaaaacagtttcctgctatggccctgaagattcctgccaagagaatatttggtgataattttgatccagtccagatgtcagagcattccttcaaatggacagtccaaaacaccagtcagatccatctgaagatgaggatgaaagaagttctcagaagctacactctacctcacagaacatcaacctgggaccgtctggaaatcctcatgccaaaccaactgactttgatttcttaaaagttattggaaaaggcagctttggcaaggttcttcttgcaaaacggaaactggatggaaaattttatgctgtcaaagtgttacagaaaaaaatagttctcaacagaaaagagcaaaaacatattatggctgaacgtaatgtgctcttgaaaaatgtgaaacatccgtttttggttggattgcattattccttccaaacaactgaaaagctttattttgttctggattttgttaatg

SEQ ID NO: 180712 - DNA, 577 bp, Homo sapiens
  Payload ID: 15590
  Gene Symbol: SGK3
  Gene Name: serum/glucocorticoid regulated kinase family, member 3
  ENST ID: ENST00000518388
  CDS Start-End: 193-577
gcacttggtccgagacagaaaacgtttgagttgttccacacacaccccctctaaatgtcgagaagccccaggttgcatgatggaatttgaacattacttcaagaggttttgtattttggattagttaattgggtttgtcctctgctgactgtttcttcggatgcattttttggtgtgctcttgagggattaaatgcaaagagatcacaccatggactacaaggaaagctgcccaagtgtaagcattcccagctccgatgaacacagagagaaaaagaagaggtttactgtttataaagttctggtttcagtgggaagaagtgaatggtttgtcttcaggagatatgcagagtttgataaactttataacactttaaaaaaacagtttcctgctatggccctgaagattcctgccaagagaatatttggtgataattttgatccagattttattaaacaaagacgagcaggactaaacgaattcattcagaacctagttaggtatccagaactttataaccatccagatgtcagagcattccttcaaatggacagtccaaaacaccagtcagatccat

SEQ ID NO: 180713 - DNA, 517 bp, Homo sapiens
  Payload ID: 15590
  Gene Symbol: SGK3
  Gene Name: serum/glucocorticoid regulated kinase family, member 3
  ENST ID: ENST00000521152
  CDS Start-End: 18-517
aaaaacagtttcctgctatggccctgaagattcctgccaagagaatatttggtgataattttgatccagattttattaaacaaagacgagcaggactaaacgaattcattcagaacctagttaggtatccagaactttataaccatccagatgtcagagcattccttcaaatggacagtccaaaacaccagtcagatccatctgaagatgaggatgaaagaagttctcagaaggttcttcttgcaaaacggaaactggatggaaaattttatgctgtcaaagtgttacagaaaaaaatagttctcaacagaaaagagcaaaaacatattatggctgaacgtaatgtgctcttgaaaaatgtgaaacatccgtttttggttggattgcattattccttccaaacaactgaaaagctttattttgttctggattttgttaatggaggggagctttttttccacttacaaagagaacggtcctttcctgagcacagagctaggttttacgctgctgaaat

SEQ ID NO: 180714 - DNA, 666 bp, Homo sapiens
  Payload ID: 15590
  Gene Symbol: SGK3
  Gene Name: serum/glucocorticoid regulated kinase family, member 3
  ENST ID: ENST00000522629
  CDS Start-End: 218-666
gctgggagctggtggcgcggcgcaggtcccggccgagtgtggcgcagcagtggcggcgcttcccattcgccatgcgccgggggtgggtgcccgaaggttgcatgatggaatttgaacattacttcaagaggttttgtattttggattagttaattgggtttgtcctctgctgactgtttcttcggatgcattttttggtgtgctcttgagggattaaatgcaaagagatcacaccatggactacaaggaaagctgcccaagtgtaagcattcccagctccgatgaacacagagagaaaaagaagaggtttactgtttataaagttctggtttcagtgggaagaagtgaatggtttgtcttcaggagatatgcagagtttgataaactttataacactttaaaaaaacagtttcctgctatggccctgaagattcctgccaagagaatatttggtgataattttgatccagattttattaaacaaagacgagcaggactaaacgaattcattcagaacctagttaggtatccagaactttataaccatccagatgtcagagcattccttcaaatggacagtccaaaacaccagtcagatccatctgaagatgaggatgaaagaagttctcagaaggttcttcttgcaaaacggaaactggatggaaa

SEQ ID NO: 180715 - DNA, 3106 bp, Homo sapiens
  Payload ID: 15590
  Gene Symbol: SGK3
  Gene Name: serum/glucocorticoid regulated kinase family, member 3
  Uniprot ID: Q96BR1
  ENST ID: ENST00000522398
  CDS Start-End: 357-1847
ggcgccgctgggagctggtggcgcggcgcaggtcccggccgagtgtggcgcagcagtggcggcgcttcccattcgccatgcgccgggggtgggtgcccgaagggatttagacatagtggactagtggctgttgcctgtttctagtgaggacttctgctgccctttctgttttgagttcccattctgcaaaccccccctcacatgcggcccctgccgttccctaccaaatatctaggttgcatgatggaatttgaacattacttcaagaggttttgtattttggattagttaattgggtttgtcctctgctgactgtttcttcggatgcattttttggtgtgctcttgagggattaaatgcaaagagatcacaccatggactacaaggaaagctgcccaagtgtaagcattcccagctccgatgaacacagagagaaaaagaagaggtttactgtttataaagttctggtttcagtgggaagaagtgaatggtttgtcttcaggagatatgcagagtttgataaactttataacactttaaaaaaacagtttcctgctatggccctgaagattcctgccaagagaatatttggtgataattttgatccagattttattaaacaaagacgagcaggactaaacgaattcattcagaacctagttaggtatccagaactttataaccatccagatgtcagagcattccttcaaatggacagtccaaaacaccagtcagatccatctgaagatgaggatgaaagaagttctcagaagctacactctacctcacagaacatcaacctgggaccgtctggaaatcctcatgccaaaccaactgactttgatttcttaaaagttattggaaaaggcagctttggcaaggttcttcttgcaaaacggaaactggatggaaaattttatgctgtcaaagtgttacagaaaaaaatagttctcaacagaaaagagcaaaaacatattatggctgaacgtaatgtgctcttgaaaaatgtgaaacatccgtttttggttggattgcattattccttccaaacaactgaaaagctttattttgttctggattttgttaatggaggggagctttttttccacttacaaagagaacggtcctttcctgagcacagagctaggttttacgctgctgaaattgctagtgcattgggttacttacattccatcaaaatagtatacagagacttgaaaccagaaaatattcttttggattcagtaggacatgttgtcttaacagattttgggctttgtaaagaaggaattgctatttctgacaccactaccacattttgtgggacaccagagtatcttgcacctgaagtaattagaaaacagccctatgacaatactgtagattggtggtgccttggggctgttctgtatgaaatgctgtatggattgcctcctttttattgccgagatgttgctgaaatgtatgacaatatccttcacaaacccctaagtttgaggccaggagtgagtcttacagcctggtccattctggaagaactcctagaaaaagacaggcaaaatcgacttggtgccaaggaagactttcttgaaattcagaatcatcctttttttgaatcactcagctgggctgaccttgtacaaaagaagattccaccaccatttaatcctaatgtggctggaccagatgatatcagaaactttgacacagcatttacagaagaaacagttccatattctgtgtgtgtatcttctgactattctatagtgaatgccagtgtattggaggcagatgatgcattcgttggtttctcttatgcacctccttcagaagacttatttttgtgagcagtttgccattcagaaaccattgagcaaaataagtctatagatgggactgaaacttctatttgtgtgaatatattcaaatatgtataactagtgcctcatttttatatgtaatgatgaaaactatgaaaaaatgtattttcttctatgtgcaagaaaaatagggcatttcaaagagctgttttgattaaaatttatattcttgtttaataagcttatttttaaacaatttaaaagctattattcttagcattaacctatttttaaagaaaccttttttgctattgactgttttttccctctaagtttacactaacatctacccaagatagactgttttttaacagtcaatttcagttcagctaacatatattaatacctttgtaactctttgctatggcttttgttatcacaccaaaactatgcaattggtacatggttgtttaagaagaaaccgtatttttccatgataaatcactgtttgaaatatttggttcatggtatgatcgaaatgtaaaagcataattaacacattggctgctagttaacaattggaataactttattctgcagatcatttaagaagtaacaggccgggcgcggtggctcacgcctgtaatcccagcactttgggaggctgaggcgggcagatcacctgaggtcaggagttggagaccagcctgaccaacatggacaaaccccgtctctactaaaaatacaaaattggcagggtgtggtggcacatgcctataatcccagctacttgggaggctaaggcaggagaatcgcttgaacccgggaggcggaggttgcagtgagccgagatcgcaccattgcactcctgcctgggcaacaagagtgaaactccatctccaaaaaaaaaaagaaaaagtaacaaaaggaaattatttgtttttgaaataccagttcaactttgtggattatttttcctctgaaggaaaagaaaaggcttaatggttaggatttttaagtattcccaaagatctgaagggtaataaaatgtactggattttttaaggtggtaccaaaaatgaatgtctgtcatatatttatattacaaatacattatatttatgttctattcatcttttgaatgtttagtatgctattaagtcattctgaatctttgtatttgcttttgcaaataggtatttcaaagctcttttcctaactggttaagtaaaataaaaaattgagctttctagaatatttgcctaattgggaattaaaaagtaaaa

SEQ ID NO: 180716 - DNA, 3306 bp, Homo sapiens
  Payload ID: 15590
  Gene Symbol: SGK3
  Gene Name: serum/glucocorticoid regulated kinase family, member 3
  Uniprot ID: Q96BR1
  ENST ID: ENST00000521198
  CDS Start-End: 538-2028
actgcgggcggagcagagggaaacaccagagtctgtgactccagacaggacccactgtgtcctcttgaactttgcacagcgcgtgacgggggcagacggtgcaccgtggcccggcctttcgcgggggtcctcggggaagagagaggagcgcgggtttcctcggaggcctgagcgggacgcagcctgcagcccctccccgcacgggctgcccccggcccgccgctcgcgccgctctgctgggatccggcgccttccccggctgtcctcggcctcccgcgcgctccgcgggaggagccgccagcggccgtgacgcgtcaaggaggaaacgccggcgcccggcggccctgccgggaaggaggaagcgcagtgcgttcggctccgcgcccgccgcgccgggagcagcaccgcggggccaggttgcatgatggaatttgaacattacttcaagaggttttgtattttggattagttaattgggtttgtcctctgctgactgtttcttcggatgcattttttggtgtgctcttgagggattaaatgcaaagagatcacaccatggactacaaggaaagctgcccaagtgtaagcattcccagctccgatgaacacagagagaaaaagaagaggtttactgtttataaagttctggtttcagtgggaagaagtgaatggtttgtcttcaggagatatgcagagtttgataaactttataacactttaaaaaaacagtttcctgctatggccctgaagattcctgccaagagaatatttggtgataattttgatccagattttattaaacaaagacgagcaggactaaacgaattcattcagaacctagttaggtatccagaactttataaccatccagatgtcagagcattccttcaaatggacagtccaaaacaccagtcagatccatctgaagatgaggatgaaagaagttctcagaagctacactctacctcacagaacatcaacctgggaccgtctggaaatcctcatgccaaaccaactgactttgatttcttaaaagttattggaaaaggcagctttggcaaggttcttcttgcaaaacggaaactggatggaaaattttatgctgtcaaagtgttacagaaaaaaatagttctcaacagaaaagagcaaaaacatattatggctgaacgtaatgtgctcttgaaaaatgtgaaacatccgtttttggttggattgcattattccttccaaacaactgaaaagctttattttgttctggattttgttaatggaggggagctttttttccacttacaaagagaacggtcctttcctgagcacagagctaggttttacgctgctgaaattgctagtgcattgggttacttacattccatcaaaatagtatacagagacttgaaaccagaaaatattcttttggattcagtaggacatgttgtcttaacagattttgggctttgtaaagaaggaattgctatttctgacaccactaccacattttgtgggacaccagagtatcttgcacctgaagtaattagaaaacagccctatgacaatactgtagattggtggtgccttggggctgttctgtatgaaatgctgtatggattgcctcctttttattgccgagatgttgctgaaatgtatgacaatatccttcacaaacccctaagtttgaggccaggagtgagtcttacagcctggtccattctggaagaactcctagaaaaagacaggcaaaatcgacttggtgccaaggaagactttcttgaaattcagaatcatcctttttttgaatcactcagctgggctgaccttgtacaaaagaagattccaccaccatttaatcctaatgtggctggaccagatgatatcagaaactttgacacagcatttacagaagaaacagttccatattctgtgtgtgtatcttctgactattctatagtgaatgccagtgtattggaggcagatgatgcattcgttggtttctcttatgcacctccttcagaagacttatttttgtgagcagtttgccattcagaaaccattgagcaaaataagtctatagatgggactgaaacttctatttgtgtgaatatattcaaatatgtataactagtgcctcatttttatatgtaatgatgaaaactatgaaaaaatgtattttcttctatgtgcaagaaaaatagggcatttcaaagagctgttttgattaaaatttatattcttgtttaataagcttatttttaaacaatttaaaagctattattcttagcattaacctatttttaaagaaaccttttttgctattgactgttttttccctctaagtttacactaacatctacccaagatagactgttttttaacagtcaatttcagttcagctaacatatattaatacctttgtaactctttgctatggcttttgttatcacaccaaaactatgcaattggtacatggttgtttaagaagaaaccgtatttttccatgataaatcactgtttgaaatatttggttcatggtatgatcgaaatgtaaaagcataattaacacattggctgctagttaacaattggaataactttattctgcagatcatttaagaagtaacaggccgggcgcggtggctcacgcctgtaatcccagcactttgggaggctgaggcgggcagatcacctgaggtcaggagttggagaccagcctgaccaacatggacaaaccccgtctctactaaaaatacaaaattggcagggtgtggtggcacatgcctataatcccagctacttgggaggctaaggcaggagaatcgcttgaacccgggaggcggaggttgcagtgagccgagatcgcaccattgcactcctgcctgggcaacaagagtgaaactccatctccaaaaaaaaaaagaaaaagtaacaaaaggaaattatttgtttttgaaataccagttcaactttgtggattatttttcctctgaaggaaaagaaaaggcttaatggttaggatttttaagtattcccaaagatctgaagggtaataaaatgtactggattttttaaggtggtaccaaaaatgaatgtctgtcatatatttatattacaaatacattatatttatgttctattcatcttttgaatgtttagtatgctattaagtcattctgaatctttgtatttgcttttgcaaataggtatttcaaagctcttttcctaactggttaagtaaaataaaaaattgagctttctagaatatttgcctaattgggaattaaaaagtaaaataataggccaggcatggtg

SEQ ID NO: 180717 - DNA, 537 bp, Homo sapiens
  Payload ID: 15590
  Gene Symbol: SGK3
  Gene Name: serum/glucocorticoid regulated kinase family, member 3
  ENST ID: ENST00000521960
  CDS Start-End: 212-537
agctggcgccgctgggagctggtggcgcggcgcaggtcccggccgagtgtggcgcagcagtggcggcgcttcccattcgccatgcgccgggggtgggtgcccgaaggtttataaagttctggtttcagtgggaagaagtgaatggtttgtcttcaggagatatgcagagtttgataaactttataacactttaaaaaaacagtttcctgctatggccctgaagattcctgccaagagaatatttggtgataattttgatccagattttattaaacaaagacgagcaggactaaacgaattcattcagaacctagttaggtatccagaactttataaccatccagatgtcagagcattccttcaaatggacagtccaaaacaccagtcagatccatctgaagatgaggatgaaagaagttctcagaagctacactctacctcacagaacatcaacctgggaccgtctggaaatcctcatgccaaaccaactgactttgatttcttaaaagttattggaaaaggcagctttggcaaggt

SEQ ID NO: 180718 - DNA, 2483 bp, Homo sapiens
  Payload ID: 15590
  Gene Symbol: SGK3
  Gene Name: serum/glucocorticoid regulated kinase family, member 3
  Uniprot ID: Q96BR1
  ENST ID: ENST00000520976
  CDS Start-End: 215-1609
gggagctggtggcgcggcgcaggtcccggccgagtgtggcgcagcagtggcggcgcttcccattcgccatgcgccgggggtgggtgcccgaaggttgcatgatggaatttgaacattacttcaagaggttttgtattttggattagttaattgggtttgtcctctgctgactgtttcttcggatgcattttttggtgtgctcttgagggattaaatgcaaagagatcacaccatggactacaaggaaagctgcccaagtgtaagcattcccagctccgatgaacacagagagaaaaagaagaggtttactgtttataaagttctggtttcagtgggaagaagtgaatggtttgtcttcaggagatatgcagagtttgataaactttataacactttaaaaaaacagtttcctgctatggccctgaagattcctgccaagagaatatttggtgataattttgatccagattttattaaacaaagacgagcaggactaaacgaattcattcagaacctagttaggtatccagaactttataaccatccagatgtcagagcattccttcaaatggacagtccaaaacaccagtcagatccatctgaagatgaggatgaaagaagttctcagaagctacactctacctcacagaacatcaacctgggaccgtctggaaatcctcatgccaaaccaactgactttgatttcttaaaagttattggaaaaggcagctttggcaaggttcttcttgcaaaacggaaactggatggaaaattttatgctgtcaaagtgttacagaaaaaaatagttctcaacagaaaagagcaaaaacatattatggctgaacgtaatgtgctcttgaaaaatgtgaaacatccgtttttggttggattgcattattccttccaaacaactgaaaagctttattttgttctggattttgttaatggaggggagctttttttccacttacaaagagaacggtcctttcctgagcacagagctaggttttacgctgctgaaattgctagtgcattgggttacttacattccatcaaaatagtatacagagacttgaaaccagaaaatattcttttggattcagtaggacatgttgtcttaacagattttgggctttgtaaagaaggaattgctatttctgacaccactaccacattttgtgggacaccagagcctcctttttattgccgagatgttgctgaaatgtatgacaatatccttcacaaacccctaagtttgaggccaggagtgagtcttacagcctggtccattctggaagaactcctagaaaaagacaggcaaaatcgacttggtgccaaggaagactttcttgaaattcagaatcatcctttttttgaatcactcagctgggctgaccttgtacaaaagaagattccaccaccatttaatcctaatgtggctggaccagatgatatcagaaactttgacacagcatttacagaagaaacagttccatattctgtgtgtgtatcttctgactattctatagtgaatgccagtgtattggaggcagatgatgcattcgttggtttctcttatgcacctccttcagaagacttatttttgtgagcagtttgccattcagaaaccattgagcaaaataagtctatagatgggactgaaacttctatttgtgtgaatatattcaaatatgtataactagtgcctcatttttatatgtaatgatgaaaactatgaaaaaatgtattttcttctatgtgcaagaaaaatagggcatttcaaagagctgttttgattaaaatttatattcttgtttaataagcttatttttaaacaatttaaaagctattattcttagcattaacctatttttaaagaaaccttttttgctattgactgttttttccctctaagtttacactaacatctacccaagatagactgttttttaacagtcaatttcagttcagctaacatatattaatacctttgtaactctttgctatggcttttgttatcacaccaaaactatgcaattggtacatggttgtttaagaagaaaccgtatttttccatgataaatcactgtttgaaatatttggttcatggtatgatcgaaatgtaaaagcataattaacacattggctgctagttaacaattggaataactttattctgcagatcatttaagaagtaacaggccgggcgcggtggctcacgcctgtaatcccagcactttgggaggctgaggcgggcagatcacctgaggtcaggagttggagaccagcctgaccaacatggacaaaccccgtctctactaaaaatacaaaattggcagggtgtggtggcacatgcctataatcccagctacttgggaggctaaggcaggagaatcgcttgaacccgggaggcggaggttgcagtgagccgagatcgcaccattgcactcctgcctgggcaacaagagtgaaactccatctcc

SEQ ID NO: 180719 - DNA, 1852 bp, Homo sapiens
  Payload ID: 15591
  Gene Symbol: SARS
  Gene Name: seryl-tRNA synthetase
  Uniprot ID: P49591
  ENST ID: ENST00000234677
  CDS Start-End: 76-1620
gcagtgcggcggtcacaggctgagtgctgcggcgcgatccttgcttccctgagcgttggcccgggaggaaagaagatggtgctggatctggatttgtttcgggtggataaaggaggggacccagccctcatccgagagacgcaggagaagcgcttcaaggacccgggactagtggaccagctggtgaaggcagacagcgagtggcgacgatgtagatttcgggcagacaacttgaacaagctgaagaacctatgcagcaagacaatcggagagaaaatgaagaaaaaagagccagtgggagatgatgagtctgtcccagagaatgtgctgagtttcgatgaccttactgcagacgctttagctaacctgaaagtctcacaaatcaaaaaagtccgactcctcattgatgaagccatcctgaagtgtgacgcggagcggataaagttggaagcagagcggtttgagaacctccgagagattgggaaccttctgcacccttctgtacccatcagtaacgatgaggatgtggacaacaaagtagagaggatttggggtgattgtacagtcaggaagaagtactctcatgtggacctggtggtgatggtagatggctttgaaggcgaaaagggggccgtggtggctgggagtcgagggtacttcttgaagggggtcctggtgttcctggaacaggctctcatccagtatgcccttcgcaccttgggaagtcggggctacattcccatttataccccctttttcatgaggaaggaggtcatgcaggaggtggcacagctcagccagtttgatgaagaactttataaggtgattggcaaaggcagtgaaaagtctgatgacaactcctatgatgagaagtacctgattgccacctcagagcagcccattgctgccctgcaccgggatgagtggctccggccggaggacctgcccatcaagtatgctggcctgtctacctgcttccgtcaggaggtgggctcccatggccgtgacacccgtggcatcttccgagtccatcagtttgagaagattgaacagtttgtgtactcatcaccccatgacaacaagtcatgggagatgtttgaagagatgattaccaccgcagaggagttctaccagtccctggggattccttaccacattgtgaatattgtctcaggttctttgaatcatgctgccagtaagaagcttgacctggaggcctggtttccgggctcaggagccttccgtgagttggtctcctgttctaattgcacggattaccaggctcgccggcttcgaatccgatatgggcaaaccaagaagatgatggacaaggtggagtttgtccatatgctcaatgctaccatgtgcgccactacccgtaccatctgcgccatcctggagaactaccagacagagaagggcatcactgtgcctgagaaattgaaggagttcatgccgccaggactgcaagaactgatcccctttgtgaagcctgcgcccattgagcaggagccatcaaagaagcagaagaagcaacatgagggcagcaaaaagaaagcagcagcaagagacgtcaccctagaaaacaggctgcagaacatggaggtcaccgatgcttgaacattcctgcctccctatttgccaggctttcatttctgtctgctgagatctcagagcctgcccaacagcagggaagccaagcacccattcatccccctgcccccatctgactgcgtagctgagaggggaacagtgccatgtaccacacagatgttcctgtctcctcgcatgggcatagggacccatcattgatgactgatgaaaccatgtaataaagcatctctggggaggg

SEQ ID NO: 180720 - DNA, 1882 bp, Homo sapiens
  Payload ID: 15591
  Gene Symbol: SARS
  Gene Name: seryl-tRNA synthetase
  ENST ID: ENST00000369923
  CDS Start-End: 12-1622
gaggaaagaagatggtgctggatctggatttgtttcgggtggataaaggaggggacccagccctcatccgagagacgcaggagaagcgcttcaaggacccgggactagtggaccagctggtgaaggcagacagcgagtggcgacgatgtagatttcgggcagacaacttgaacaagctgaagaacctatgcagcaagacaatcggagagaaaatgaagaaaaaagagccagtgggagatgatgagtctgtcccagagaatgtgctgagtttcgatgaccttactgcagacgctttagctaacctgaaagtctcacaaatcaaaaaagtccgactcctcattgatgaagccatcctgaagtgtgacgcggagcggataaagttggaagcagagcggtttgagaacctccgagagattgggaaccttctgcacccttctgtacccatcagtaacgatgaggatgtggacaacaaagtagagaggatttggggtgattgtacagtcaggaagaagtactctcatgtggacctggtggtgatggtagatggctttgaaggcgaaaagggggccgtggtggctgggagtcgagggtacttcttgaagggggtcctggtgttcctggaacaggctctcatccagtatgcccttcgcaccttgggaagtcggggctacattcccatttataccccctttttcatgaggaaggaggtcatgcaggaggtggcacagctcagccagtttgatgaagaactttataaggtgattggcaaaggcagtgaaaagtctgatgacaactcctatgatgagaagtacctgattgccacctcagagcagcccattgctgccctgcaccgggatgagtggctccggccggaggacctgcccatcaagtatgctggcctgtctacctgcttccgtcaggaggtgggctcccatggccgtgacacccgtggcatcttccgagtccatcagtttgagaagattgaacagtttgtgtactcatcaccccatgacaacaagtcatgggagatgtttgaagagatgattaccaccgcagaggagttctaccagtccctggggattccttaccacattgtgaatattgtctcaggttctttgaatcatgctgccagtaagaagcttgacctggaggcctggtttccgggctcaggagccttccgtgagttggtctcctgttctaattgcacggattaccaggctcgccggcttcgaatccgatatgggcaaaccaagaagatgatggacaagagaaagaataatctccatttatctacacagaacaagttggaggcttccctcttctcacccaagaaggtggagtttgtccatatgctcaatgctaccatgtgcgccactacccgtaccatctgcgccatcctggagaactaccagacagagaagggcatcactgtgcctgagaaattgaaggagttcatgccgccaggactgcaagaactgatcccctttgtgaagcctgcgcccattgagcaggagccatcaaagaagcagaagaagcaacatgagggcagcaaaaagaaagcagcagcaagagacgtcaccctagaaaacaggctgcagaacatggaggtcaccgatgcttgaacattcctgcctccctatttgccaggctttcatttctgtctgctgagatctcagagcctgcccaacagcagggaagccaagcacccattcatccccctgcccccatctgactgcgtagctgagaggggaacagtgccatgtaccacacagatgttcctgtctcctcgcatgggcatagggacccatcattgatgactgatgaaaccatgtaataaagcatctctggggagggcttaggactcttcctcagtcttcttccc

SEQ ID NO: 180721 - DNA, 2057 bp, Homo sapiens
  Payload ID: 15592
  Gene Symbol: SARS2
  Gene Name: seryl-tRNA synthetase 2, mitochondrial
  Uniprot ID: Q9NP81
  ENST ID: ENST00000221431
  CDS Start-End: 161-1717
tgaagaggcgggacacagacgacgattgggcgacgaaggactctatcgcggtcaactttcctcaggatctgattggctcgtcacggtcaggttcgctgccttgcaattggtctaaacgcggagtgggcgggacgaagtgccgccttgttcccggtccaagatggctgcgtccatggcgcggcgcttgtggcctttgctgactcgtcgggggttccggccccggggaggctgcatctccaacgatagtccaaggagaagtttcactacagagaaacgaaaccggaacctcctgtacgagtatgcgcgcgagggctacagcgcactccctcagctggacatagagcggttctgcgcatgcccagaagaggccgcacacgccctggagctccgcaagggggagctgcgctcggcggacctgcccgcgatcatctcgacatggcaggagctgaggcagctgcaggagcagatccggagcctggaggaagagaaggcagctgtgactgaggcagtgcgggccctgctggcaaaccaggacagtggtgaagtgcagcaggaccccaagtaccagggtctgcgggcacgtggccgggagatccggaaggagcttgttcacctgtaccccagggaggcccagcttgaggagcagttctacctgcaggcgctgaagctgcccaaccagacccacccagacgtgcccgtcggggatgagagccaggctcgagtgctccacatggtcggagacaagccagttttctccttccaacctcggggccacctggaaattggcgagaaactcgacatcatccgtcagaagcgcctgtcccacgtgtctggccaccggtcctattacctgcgcggggctggagccctcctgcagcacggcctggtcaacttcacattcaacaagcttctccgccggggcttcacccccatgacggtgccagaccttctccgcggagcagtgtttgaaggctgtgggatgacaccaaatgccaacccatcccaaatttacaacatcgaccctgcccgcttcaaagatctcaacctggctggaacagcggaggtggggcttgcaggctacttcatggaccacaccgtggccttcagggacctgccagtcaggatggtttgctccagcacctgctaccgggcagagacaaacacgggacaggaaccccgggggctgtatcgagtacaccacttcaccaaggtggagatgtttggggtgacaggccctgggctggagcagagctcacagctgctggaggagttcctgtcccttcagatggagatcttgacagagctgggcttgcacttccgggtcctggatatgcccacccaagaactgggcctccccgcctaccgcaagtttgacattgaggcctggatgccaggccgaggccgctttggagaggtcaccagtgcttccaactgcacagacttccagagccgccgcctccacatcatgttccagaccgaggctggggagctgcagtttgcccacacggtgaacgccaccgcctgtgctgtcccccgccttctcatcgcgctcctggagagtaaccagcagaaggacggctcagtgctcgtgccccctgccctccagtcctacctcggcactgatcggatcacagcccctacccacgtgcctctccagtacatcggccccaaccagccccggaagcctgggctgcctggccagcctgctgtaagctaagaacccacccacagcagccctcgggggtgtcactgcttcctggagttcaggagaccccggacacctgggacctgtgttgctgagcccgtcctgacatctgtgttcttcctgtcagctccacgcccgggcccctggaccacggggtccacctctcctctgtccttgctgcctcagagtcagtcactgaccctgttatcattgagggtcccagtgggaagcaggacgtctgggctttacggttctagggacaggagaagcagaggaagaggcttccatccctccttccttctttcctcctacagtgctgagcaaaaagtccccaataaatggtcaggacaaa

SEQ ID NO: 180722 - DNA, 1886 bp, Homo sapiens
  Payload ID: 15592
  Gene Symbol: SARS2
  Gene Name: seryl-tRNA synthetase 2, mitochondrial
  ENST ID: ENST00000430193
  CDS Start-End: 23-1579
gccgccttgttcccggtccaagatggctgcgtccatggcgcggcgcttgtggcctttgctgactcgtcgggggttccggccccggggaggctgcatctccaacgatagtccaaggagaagtttcactacagagaaacgaaaccggaacctcctgtacgagtatgcgcgcgagggctacagcgcactccctcagctggacatagagcggttctgcgcatgcccagaagaggccgcacacgccctggagctccgcaagggggagctgcgctcggcggacctgcccgcgatcatctcgacatggcaggagctgaggcagctgcaggagcagatccggagcctggaggaagagaaggcagctgtgactgaggcagtgcgggccctgctggcaaaccaggacagtggtgaagtgcagcaggaccccaagtaccagggtctgcgggcacgtggccgggagatccggaaggagcttgttcacctgtaccccagggaggcccagcttgaggagcagttctacctgcaggcgctgaagctgcccaaccagacccacccagacgtgcccgtcggggatgagagccaggctcgagtgctccacatggtcggagacaagccagttttctccttccaacctcggggccacctggaaattggcgagaaactcgacatcatccgtcagaagcgcctgtcccacgtgtctggccaccggtcctattacctgcgcggggctggagccctcctgcagcacggcctggtcaacttcacattcaacaagcttctccgccggggcttcacccccatgacggtgccagaccttctccgcggagcagtgtttgaaggctgtgggatgacaccaaatgccaacccatcccaaatttacaacatcgaccctgcccgcttcaaagatctcaacctggctggaacagcggaggtggggcttgcaggctacttcatggaccacaccgtggccttcagggacctgccagtcaggatggtttgctccagcacctgctaccgggcagagacaaacacgggacaggaaccccgggggctgtatcgagtacaccacttcaccaaggctggtatgtttggggtgacaggccctgggctggagcagagctcacagctgctggaggagttcctgtcccttcagatggagatcttgacagagctgggcttgcacttccgggtcctggatatgcccacccaagaactgggcctccccgcctaccgcaagtttgacattgaggcctggatgccaggccgaggccgctttggagaggtcaccagtgcttccaactgcacagacttccagagccgccgcctccacatcatgttccagaccgaggctggggagctgcagtttgcccacacggtgaacgccaccgcctgtgctgtcccccgccttctcatcgcgctcctggagagtaaccagcagaaggacggctcagtgctcgtgccccctgccctccagtcctacctcggcactgatcggatcacagcccctacccacgtgcctctccagtacatcggccccaaccagccccggaagcctgggctgcctggccagcctgctgtaagctaagaacccacccacagcagccctcgggggtgtcactgcttcctggagttcaggagaccccggacacctgggacctgtgttgctgagcccgtcctgacatctgtgttcttcctgtcagctccacgcccgggcccctggaccacggggtccacctctcctctgtccttgctgcctcagagtcagtcactgaccctgttatcattgagggtcccagtgggaagcaggacgtctgggctttacggttctagggacaggagaagcagaggaagaggcttccatccctccttccttctttcctcctacagtgctg

SEQ ID NO: 180723 - DNA, 1118 bp, Homo sapiens
  Payload ID: 15592
  Gene Symbol: SARS2
  Gene Name: seryl-tRNA synthetase 2, mitochondrial
  ENST ID: ENST00000455102
  CDS Start-End: 25-735
gtgccgccttgttcccggtccaagatggctgcgtccatggcgcggcgcttgtggcctttgctgactcgtcgggggttccggccccggggaggctgcatctccaacgatagtccaaggagaagtttcactacagagaaacgaaaccggaacctcctgtacgagtatgcgcgcgagggctacagcgcactccctcagctggacatagagcggttctgcgcatgcccagaagaggccgcacacgccctggagctccgcaagggggagctgcgctcggcggacctgcccgcgatcatctcgacatggcaggagctgaggcagctgcaggagcagatccggagcctggaggaagagaaggcagctgtgactgaggcagtgcgggccctgctggcaaaccaggacagtggtgaagtgcagcaggaccccaagtaccagggtctgcgggcacgtggccgggagatccggaaggagcttgttcacctgtaccccagggaggcccagcttgaggagcagttctacctgcaggcgctgaagctgcccaaccagacccacccagacgtgcccgtcggggatgagagccaggctcgagtgctccacatggtcggagacaagccaggcgcctgtcccacgtgtctggccaccggtcctattacctgcgcggggctggagccctcctgcagcacggcctggtcaacttcacattcaacaagcttctccgccggggcttcacccccatgacggtgccagaccttctccgcggagcagtgtttgaaggctgtgggatgacaccaaatgccaacccatcccaaatttacaacatcgaccctgcccgcttcaaagatctcaacctggctggaacagcggaggtggggcttgcaggctacttcatggaccacaccgtggccttcagggacctgccagtcaggatggtttgctccagcacctgctaccgggcagagacaaacacgggacaggaaccccgggggctgtatcgagtacaccacttcaccaaggtggagatgtttggggtgacaggccctgggctggagcagagctcacagctgctggaggagttcctgtcccttcagatggagatcttgacagagctgggcttgcacttc

SEQ ID NO: 180724 - DNA, 665 bp, Homo sapiens
  Payload ID: 15592
  Gene Symbol: SARS2
  Gene Name: seryl-tRNA synthetase 2, mitochondrial
  ENST ID: ENST00000598831
  CDS Start-End: 1-564
atgtttggggtgacaggccctgggctggagcagagctcacagctgctggaggagttcctgtcccttcagatggagatcttgacagagctgggcttgcacttccgggtcctggatatgcccacccaagaactgggcctccccgcctaccgcaagtttgacattgaggcctggatgccaggccgaggccgctttggagaggtcaccagtgcttccaactgcacagacttccagagccgccgcctccacatcatgttccagaccgaggctggggagctgcagtttgcccacacggtgaacgccaccgcctgtgctgtcccccgccttctcatcgcgctcctggagagtaaccagcagaaggacggctcagtgctcgtgccccctgccctccagtcctacctcggcactgatcggatcacagcccctacccacgtgcctctccagtacatcggccccaaccagccccggaagcctgggctgcctggccagcctgctctccacgcccgggcccctggaccacggggtccacctctcctctgtccttgctgcctcagagtcagtcactgaccctgttatcattgagggtcccagtgggaagcaggacgtctgggctttacggttctagggacaggagaagcagaggaagaggcttccatccctccttcctt

SEQ ID NO: 180725 - DNA, 565 bp, Homo sapiens
  Payload ID: 15592
  Gene Symbol: SARS2
  Gene Name: seryl-tRNA synthetase 2, mitochondrial
  ENST ID: ENST00000593754
  CDS Start-End: 24-296
tgccgccttgttcccggtccaagatggctgcgtccatggcgcggcgcttgtggcctttgctgactcgtcgggggttccggccccggggaggctgcatctccaacgatagtccaaggagaagtttcactacagagaaacgaaaccggaacctcctgtacgagtatgcgcgcgagggctacagcgcactccctcagctggacatagagcggttctgcgcatgcccagaagaggccgcacacgccctggagctccgcaagggggagctgcgctcggcggacctgcccgcgatcgcctgagtgcagtcgcacaatctccggtcactgcaacctccgcctccttgattcaagtgatcgtcgtgcctcagtctcccaaatctcgacatggcaggagctgaggcagctgcaggagcagatccggagcctggaggaagagaaggcagctgtgactgaggcagtgcgggccctgctggcaaaccaggacagtggtgaagtgcagcaggtgcggctggatccaggtgctggctccatatttggtcctacgttcctcccattcccaggccagcttt

SEQ ID NO: 180726 - DNA, 1631 bp, Homo sapiens
  Payload ID: 15592
  Gene Symbol: SARS2
  Gene Name: seryl-tRNA synthetase 2, mitochondrial
  ENST ID: ENST00000594171
  CDS Start-End: 308-1294
aaaatggggagccaagtgtgaatcggacggggtcagggctggggtgtggtggagctcttgcgtttagagagagagatctcgacatggcaggagctgaggcagctgcaggagcagatccggagcctggaggaagagaaggcagctgtgactgaggcagtgcgggccctgctggcaaaccaggacagtggtgaagtgcagcagggaggcccagcttgaggagcagttctacctgcaggcgctgaagctgcccaaccagacccacccagacgtgcccgtcggggatgagagccaggctcgagtgctccacatggtcggagacaagccagttttctccttccaacctcggggccacctggaaattggcgagaaactcgacatcatccgtcagaagcgcctgtcccacgtgtctggccaccggtcctattacctgcgcggggctggagccctcctgcagcacggcctggtcaacttcacattcaacaagcttctccgccggggcttcacccccatgacggtgccagaccttctccgcggagcagtgtttgaaggctgtgggatgacaccaaatgccaacccatcccaaatttacaacatcgaccctgcccgcttcaaagatctcaacctggctggaacagcggaggtggggcttgcaggctacttcatggaccacaccgtggccttcagggacctgccagtcaggatggtttgctccagcacctgctaccgggcagagacaaacacgggacaggaaccccgggggctgtatcgagtacaccacttcaccaaggtggagatgtttggggtgacaggccctgggctggagcagagctcacagctgctggaggagttcctgtcccttcagatggagatcttgacagagctgggcttgcacttccgggtcctggatatgcccacccaagaactgggcctccccgcctaccgcaagtttgacattgaggcctggatgccaggccgaggccgctttggagaggtcaccagtgcttccaactgcacagacttccagagccgccgcctccacatcatgttccagaccgaggctggggagctgcagtttgcccacacggtgaacgccaccgcctgtgctgtcccccgccttctcatcgcgctcctggagagtaaccagcagaaggacggctcagtgctcgtgccccctgccctccagtcctacctcggcactgatcggatcacagcccctacccacgtgcctctccagtacatcggccccaaccagccccggaagcctgggctgcctggccagcctgctgtaagctaagaacccacccacagcagccctcgggggtgtcactgcttcctggagttcaggagaccccggacacctgggacctgtgttgctgagcccgtcctgacatctgtgttcttcctgtcagctccacgcccgggcccctggaccacggggtccacctctcctctgtccttgctgcctcagagtcagtcactgaccctgttatcattgagggtcccagtgggaagcaggacgtctgggctttacggttctagggacaggagaagcagaggaagaggcttccatccctccttccttctttcctcctacagtgctgagcaaaaagtccccaataaatggtcaggac

SEQ ID NO: 180727 - DNA, 541 bp, Homo sapiens
  Payload ID: 15592
  Gene Symbol: SARS2
  Gene Name: seryl-tRNA synthetase 2, mitochondrial
  ENST ID: ENST00000598343
  CDS Start-End: 24-431
tgccgccttgttcccggtccaagatggctgcgtccatggcgcggcgcttgtggcctttgctgactcgtcgggggttccggccccggggaggctgcatctccaacgatagtccaaggagaagtttcactacagagaaacgaaaccggaacctcctgtacgagtatgcgcgcgagggctacagcgcactccctcagctggacatagagcggttctgcgcatgcccagaagaggccgcacacgccctggagctccgcaagggggagctgcgctcggcggacctgcccgcgatcatctcgacatggcaggagctgaggcagctgcaggagcagatccggagcctggaggaagagaaggcagctgtgactgaggcagtgcgggccctgctggcaaaccaggacagtggtgaagtgcagcagggaggcccagcttgaggagcagttctacctgcaggcgctgaagctgcccaaccagacccacccagacgtgcccgtcggggatgagagccaggctcgagtgctccacatggtcggagacaagccag

SEQ ID NO: 180728 - DNA, 1630 bp, Homo sapiens
  Payload ID: 15592
  Gene Symbol: SARS2
  Gene Name: seryl-tRNA synthetase 2, mitochondrial
  Uniprot ID: Q9NP81
  ENST ID: ENST00000600042
  CDS Start-End: 26-1588
agtgccgccttgttcccggtccaagatggctgcgtccatggcgcggcgcttgtggcctttgctgactcgtcgggggttccggccccggggaggctgcatctccaacgatagtccaaggagaagtttcactacagagaaacgaaaccggaacctcctgtacgagtatgcgcgcgagggctacagcgcactccctcagctggacatagagcggttctgcgcatgcccagaagaggccgcacacgccctggagctccgcaagggggagctgcgctcggcggacctgcccgcgatcatctcgacatggcaggagctgaggcagctgcaggagcagatccggagcctggaggaagagaaggcagctgtgactgaggcagtgcgggccctgctggcaaaccaggacagtggtgaagtgcagcaggtgcggctggatccaggtgctggctccatatttggtcctacgttcctcccattcccaggccagctttctctccttgtggaggcccagcttgaggagcagttctacctgcaggcgctgaagctgcccaaccagacccacccagacgtgcccgtcggggatgagagccaggctcgagtgctccacatggtcggagacaagccagttttctccttccaacctcggggccacctggaaattggcgagaaactcgacatcatccgtcagaagcgcctgtcccacgtgtctggccaccggtcctattacctgcgcggggctggagccctcctgcagcacggcctggtcaacttcacattcaacaagcttctccgccggggcttcacccccatgacggtgccagaccttctccgcggagcagtgtttgaaggctgtgggatgacaccaaatgccaacccatcccaaatttacaacatcgaccctgcccgcttcaaagatctcaacctggctggaacagcggaggtggggcttgcaggctacttcatggaccacaccgtggccttcagggacctgccagtcaggatggtttgctccagcacctgctaccgggcagagacaaacacgggacaggaaccccgggggctgtatcgagtacaccacttcaccaaggtggagatgtttggggtgacaggccctgggctggagcagagctcacagctgctggaggagttcctgtcccttcagatggagatcttgacagagctgggcttgcacttccgggtcctggatatgcccacccaagaactgggcctccccgcctaccgcaagtttgacattgaggcctggatgccaggccgaggccgctttggagaggtcaccagtgcttccaactgcacagacttccagagccgccgcctccacatcatgttccagaccgaggctggggagctgcagtttgcccacacggtgaacgccaccgcctgtgctgtcccccgccttctcatcgcgctcctggagagtaaccagcagaaggacggctcagtgctcgtgccccctgccctccagtcctacctcggcactgatcggatcacagcccctacccacgtgcctctccagtacatcggccccaaccagccccggaagcctgggctgcctggccagcctgctgtaagctaagaacccacccacagcagccctcgggggtgtcactgcttcctg

SEQ ID NO: 180729 - DNA, 541 bp, Homo sapiens; identical to SEQ ID NO: 180727
  Payload ID: 15592
  Gene Symbol: SARS2
  Gene Name: Seryl-tRNA synthetase 2, mitochondrial
  ENST ID: ENST00000635040
  CDS Start-End: 24-431

SEQ ID NO: 180730 - DNA, 1886 bp, Homo sapiens; identical to SEQ ID NO: 180722
  Payload ID: 15592
  Gene Symbol: SARS2
  Gene Name: Seryl-tRNA synthetase 2, mitochondrial
  ENST ID: ENST00000635472
  CDS Start-End: 23-1579

SEQ ID NO: 180731 - DNA, 665 bp, Homo sapiens; identical to SEQ ID NO: 180724
  Payload ID: 15592
  Gene Symbol: SARS2
  Gene Name: Seryl-tRNA synthetase 2, mitochondrial
  ENST ID: ENST00000635594
  CDS Start-End: 1-564

SEQ ID NO: 180732 - DNA, 1631 bp, Homo sapiens; identical to SEQ ID NO: 180726
  Payload ID: 15592
  Gene Symbol: SARS2
  Gene Name: Seryl-tRNA synthetase 2, mitochondrial
  ENST ID: ENST00000634916
  CDS Start-End: 308-1294

SEQ ID NO: 180733 - DNA, 565 bp, Homo sapiens; identical to SEQ ID NO: 180725
  Payload ID: 15592
  Gene Symbol: SARS2
  Gene Name: Seryl-tRNA synthetase 2, mitochondrial
  ENST ID: ENST00000635353
  CDS Start-End: 24-296

SEQ ID NO: 180734 - DNA, 1630 bp, Homo sapiens; identical to SEQ ID NO: 180728
  Payload ID: 15592
  Gene Symbol: SARS2
  Gene Name: Seryl-tRNA synthetase 2, mitochondrial
  ENST ID: ENST00000635245
  CDS Start-End: 26-1588

SEQ ID NO: 180735 - DNA, 1118 bp, Homo sapiens; identical to SEQ ID NO: 180723
  Payload ID: 15592
  Gene Symbol: SARS2
  Gene Name: Seryl-tRNA synthetase 2, mitochondrial
  ENST ID: ENST00000634481
  CDS Start-End: 25-735

SEQ ID NO: 180736 - DNA, 2057 bp, Homo sapiens; identical to SEQ ID NO: 180721
  Payload ID: 15592
  Gene Symbol: SARS2
  Gene Name: Seryl-tRNA synthetase 2, mitochondrial
  ENST ID: ENST00000634687
  CDS Start-End: 161-1717

SEQ ID NO: 180737 - DNA, 2718 bp, Homo sapiens
  Payload ID: 15593
  Gene Symbol: SESN1
  Gene Name: sestrin 1
  Uniprot ID: Q9Y6P5
  ENST ID: ENST00000302071
  CDS Start-End: 336-1616
tgaaacagcctgtggatatgccccctcgattgtcttgtcttgtgaaaacagattatttagccaccttcatcccctttgcctcctacttaaaagagagagaaagaaaaaaaacacatttgactcagggaagagatgatgttgcctggaataagtgtgtcctgcaagctctatgacgttatgcacagcgtttactcttgcgtattaagccatcccttttctgaattgtcctttagaaagaggaacttggcattagaattcctcgaccactaggacagggaccaagcagattcatcccagaaaaggagatcctccaagtggggagtgaagacgcacagatgcatgctttatttgcagattcttttgctgctttgggccgtttggataacattacgttagtgatggttttccacccacaatatttagaaagtttcttaaaaactcagcactatctactgcaaatggatgggccgttacccctacattatcgtcactacattggaataatggctgcggcaagacatcagtgctcctacttagtgaacctgcatgtaaatgatttccttcatgttggtggggaccccaagtggctcaatggtttagagaatgctcctcaaaaactacagaatttaggagaacttaacaaagtgttagcccatagaccttggcttattaccaaagaacacattgagggacttttaaaagctgaagagcacagctggtcccttgcggaattggtacatgcagtagttttactcacacactatcattctcttgcctcattcacattcggctgtggaatcagtccagaaattcattgtgatggtggccacacattcagacctccttctgttagcaactactgcatctgtgacattacaaatggcaatcacagtgtggatgagatgccggtcaactcagcagaaaatgtttctgtaagtgattctttctttgaggttgaagccctcatggaaaagatgaggcagttacaggaatgtcgagatgaagaagaggcaagtcaggaagagatggcttcacgttttgaaatagaaaaaagagagagtatgtttgtcttctcttcagatgatgaagaagttacaccagcaagagctgtatctcgtcattttgaggatactagttatggctataaagatttctctagacatgggatgcatgttccaacatttcgtgtccaggactattgctgggaagatcatggttattctttggtaaatcgcctttatccagatgtgggacagttgattgatgaaaaatttcacattgcttacaatcttacttataatacaatggcaatgcacaaagatgttgatacctcaatgcttagacgggcaatttggaactatattcactgcatgtttggaataagatatgatgattatgactatggtgaaattaaccagctattggatcgtagctttaaagtttatatcaaaactgttgtttgcactcctgaaaaggttaccaaaagaatgtatgatagcttctggaggcagttcaagcactctgagaaggttcatgttaatctgcttcttatagaagctaggatgcaagcagaactcctttatgctctgagagccattacccgctatatgacctgatgcctttccttcattaaagatgattctggaatgatcagcagatatagtctacaagggggaaggtactaagccccaggaccaatggtagacaaaataattcagaaatccattgtgccatgattcctttagtttctgctatttttctgtggaaaaccactgctggcacaagcagtgactgtttggcagcttcaagtttagagctgtgaagacaggctgccattcacagtattttgctttttgacagtacaagatgctgtgtaactgttttaatacagcaaatagtaactctccaaatcctgttgcttttatgttaaataagataacaagaattggagcatgcaaagaatgggacttggataatgacttaagctttatatgtaaagaattttagaagatcttggtgctgctattcctgctggaggaatgaatagatggctgtttcagttaagctattagtaataaaagtgaacattgctactatctgagcctacatacataacttgtgtgatttcaaattaaacttgcattatgtgttaattttcttgcatctaaaaaagcatagaattcctactcacacagctcagcaacaaccattttgatggtaacagttaatttctttcattagttttttaaattcagggttctggatattaaattaaaatggcattcttaaagattttcttcaaaaagcaatcctaaatgaaagtgtgtaaattataagaagctggcgatcttttgatatgctgtttcacaggatcctgacactggagggcagctgtcttgtgcattacttgtgtttccagcaccaaagttgtgggacatgttgctgtagactgctgcgcagtcctgggtgcattcagtctctctgcctctgcctgcctcctggtccccactttaaaggctgtgcagctccttaaataataaagctggaaaatatttttagtcgggttatcaaatttgatttacaaaaacgctaactttgtttgaaatgcaaacaggtttgaaaatatgtattaagtactttgtattctggaagcgtgaattgcttttgaagtctgtcagtattactggtatttttaaataaagaagaatttttctccaa

SEQ ID NO: 180738 - DNA, 2676 bp, Homo sapiens
  Payload ID: 15593
  Gene Symbol: SESN1
  Gene Name: sestrin 1
  Uniprot ID: Q9Y6P5
  ENST ID: ENST00000356644
  CDS Start-End: 96-1574
gccgtccgtgctgactgaggcgctgcagccaggagccgcggccggctgcccagcgctcgccgcctccgcgcgtccgcagccgtccccgcgccgacatgcgcttggccgccgccgcgaacgaggcgtacacggcccctttggcggtctcggggctgctgggctgcaagcagtgcggcgggggccgcgaccaggacgaggaacttggcattagaattcctcgaccactaggacagggaccaagcagattcatcccagaaaaggagatcctccaagtggggagtgaagacgcacagatgcatgctttatttgcagattcttttgctgctttgggccgtttggataacattacgttagtgatggttttccacccacaatatttagaaagtttcttaaaaactcagcactatctactgcaaatggatgggccgttacccctacattatcgtcactacattggaataatggctgcggcaagacatcagtgctcctacttagtgaacctgcatgtaaatgatttccttcatgttggtggggaccccaagtggctcaatggtttagagaatgctcctcaaaaactacagaatttaggagaacttaacaaagtgttagcccatagaccttggcttattaccaaagaacacattgagggacttttaaaagctgaagagcacagctggtcccttgcggaattggtacatgcagtagttttactcacacactatcattctcttgcctcattcacattcggctgtggaatcagtccagaaattcattgtgatggtggccacacattcagacctccttctgttagcaactactgcatctgtgacattacaaatggcaatcacagtgtggatgagatgccggtcaactcagcagaaaatgtttctgtaagtgattctttctttgaggttgaagccctcatggaaaagatgaggcagttacaggaatgtcgagatgaagaagaggcaagtcaggaagagatggcttcacgttttgaaatagaaaaaagagagagtatgtttgtcttctcttcagatgatgaagaagttacaccagcaagagctgtatctcgtcattttgaggatactagttatggctataaagatttctctagacatgggatgcatgttccaacatttcgtgtccaggactattgctgggaagatcatggttattctttggtaaatcgcctttatccagatgtgggacagttgattgatgaaaaatttcacattgcttacaatcttacttataatacaatggcaatgcacaaagatgttgatacctcaatgcttagacgggcaatttggaactatattcactgcatgtttggaataagatatgatgattatgactatggtgaaattaaccagctattggatcgtagctttaaagtttatatcaaaactgttgtttgcactcctgaaaaggttaccaaaagaatgtatgatagcttctggaggcagttcaagcactctgagaaggttcatgttaatctgcttcttatagaagctaggatgcaagcagaactcctttatgctctgagagccattacccgctatatgacctgatgcctttccttcattaaagatgattctggaatgatcagcagatatagtctacaagggggaaggtactaagccccaggaccaatggtagacaaaataattcagaaatccattgtgccatgattcctttagtttctgctatttttctgtggaaaaccactgctggcacaagcagtgactgtttggcagcttcaagtttagagctgtgaagacaggctgccattcacagtattttgctttttgacagtacaagatgctgtgtaactgttttaatacagcaaatagtaactctccaaatcctgttgcttttatgttaaataagataacaagaattggagcatgcaaagaatgggacttggataatgacttaagctttatatgtaaagaattttagaagatcttggtgctgctattcctgctggaggaatgaatagatggctgtttcagttaagctattagtaataaaagtgaacattgctactatctgagcctacatacataacttgtgtgatttcaaattaaacttgcattatgtgttaattttcttgcatctaaaaaagcatagaattcctactcacacagctcagcaacaaccattttgatggtaacagttaatttctttcattagttttttaaattcagggttctggatattaaattaaaatggcattcttaaagattttcttcaaaaagcaatcctaaatgaaagtgtgtaaattataagaagctggcgatcttttgatatgctgtttcacaggatcctgacactggagggcagctgtcttgtgcattacttgtgtttccagcaccaaagttgtgggacatgttgctgtagactgctgcgcagtcctgggtgcattcagtctctctgcctctgcctgcctcctggtccccactttaaaggctgtgcagctccttaaataataaagctggaaaatatttttagtcgggttatcaaatttgatttacaaaaacgctaactttgtttgaaatgcaaacaggtttgaaaatatgtattaagtactttgtattctggaagcgtgaattgcttttgaagtctgtcagtattactggtatttttaaataaagaagaatttttctccaa

SEQ ID NO: 180739 - DNA, 3509 bp, Homo sapiens
  Payload ID: 15593
  Gene Symbol: SESN1
  Gene Name: sestrin 1
  Uniprot ID: Q9Y6P5
  ENST ID: ENST00000436639
  CDS Start-End: 747-2402
gattgccagggccgccctgtgccctctggctcggcggtggtgggcgagggctcagggatcggagaagtagcgtcttcccgggggtgccgaattggcggggctgggggacgctttttttcaccgccgcccgccgagactacggctgcccgagactgccgccctccgacagcgcccaagcctccggccgctgcggccagtgggccagggttcggcgagccttccctgccggcgccggccggctgctgaggcgctgggaggagctgcggagggcggggactggtgtcggagaaggggcggggtgggaacgccggagagaacccggtggctgcacagacaaaaaagccccgaatggctggagggcgttcagctgttaacagccttttggggcagagcacggatttgacagctccacaacgtgaggatatccactgaccccgcgagacggaggagaacgcttccccgaaattctctgcccaccaaagccagcgctgcaaggttgcaactttcaaactttgtttttccagaaagaagactgccctttcgtgtacaaggagagggtgagagggtgacctagcttgtagatcggctgaaggcaccagtggttccaaatgtcacccagatgtgtgttttcatgacgatttgatttctctgattttatttttacatttttcattttaaaaatacaaagcaatttttttggggcatgctgaaaggtaactgaagaccgcaaaggaaaaactattgtcatggctgaaggagagaatgaagtgagatgggatggactctgcagcagagattcaactactagggagacagcattggaaaacattaggcaaaccattttgaggaaaaccgagtatcttcgttcggtgaaagaaacacctcatcgtccatcagacgggctttcaaataccgagtcttcggatgggttgaataagctacttgctcatctgcttatgctttctaagaggtgtcccttcaaagatgtgagagagaaaagtgagtttattctgaagagcatccaggaacttggcattagaattcctcgaccactaggacagggaccaagcagattcatcccagaaaaggagatcctccaagtggggagtgaagacgcacagatgcatgctttatttgcagattcttttgctgctttgggccgtttggataacattacgttagtgatggttttccacccacaatatttagaaagtttcttaaaaactcagcactatctactgcaaatggatgggccgttacccctacattatcgtcactacattggaataatggctgcggcaagacatcagtgctcctacttagtgaacctgcatgtaaatgatttccttcatgttggtggggaccccaagtggctcaatggtttagagaatgctcctcaaaaactacagaatttaggagaacttaacaaagtgttagcccatagaccttggcttattaccaaagaacacattgagggacttttaaaagctgaagagcacagctggtcccttgcggaattggtacatgcagtagttttactcacacactatcattctcttgcctcattcacattcggctgtggaatcagtccagaaattcattgtgatggtggccacacattcagacctccttctgttagcaactactgcatctgtgacattacaaatggcaatcacagtgtggatgagatgccggtcaactcagcagaaaatgtttctgtaagtgattctttctttgaggttgaagccctcatggaaaagatgaggcagttacaggaatgtcgagatgaagaagaggcaagtcaggaagagatggcttcacgttttgaaatagaaaaaagagagagtatgtttgtcttctcttcagatgatgaagaagttacaccagcaagagctgtatctcgtcattttgaggatactagttatggctataaagatttctctagacatgggatgcatgttccaacatttcgtgtccaggactattgctgggaagatcatggttattctttggtaaatcgcctttatccagatgtgggacagttgattgatgaaaaatttcacattgcttacaatcttacttataatacaatggcaatgcacaaagatgttgatacctcaatgcttagacgggcaatttggaactatattcactgcatgtttggaataagatatgatgattatgactatggtgaaattaaccagctattggatcgtagctttaaagtttatatcaaaactgttgtttgcactcctgaaaaggttaccaaaagaatgtatgatagcttctggaggcagttcaagcactctgagaaggttcatgttaatctgcttcttatagaagctaggatgcaagcagaactcctttatgctctgagagccattacccgctatatgacctgatgcctttccttcattaaagatgattctggaatgatcagcagatatagtctacaagggggaaggtactaagccccaggaccaatggtagacaaaataattcagaaatccattgtgccatgattcctttagtttctgctatttttctgtggaaaaccactgctggcacaagcagtgactgtttggcagcttcaagtttagagctgtgaagacaggctgccattcacagtattttgctttttgacagtacaagatgctgtgtaactgttttaatacagcaaatagtaactctccaaatcctgttgcttttatgttaaataagataacaagaattggagcatgcaaagaatgggacttggataatgacttaagctttatatgtaaagaattttagaagatcttggtgctgctattcctgctggaggaatgaatagatggctgtttcagttaagctattagtaataaaagtgaacattgctactatctgagcctacatacataacttgtgtgatttcaaattaaacttgcattatgtgttaattttcttgcatctaaaaaagcatagaattcctactcacacagctcagcaacaaccattttgatggtaacagttaatttctttcattagttttttaaattcagggttctggatattaaattaaaatggcattcttaaagattttcttcaaaaagcaatcctaaatgaaagtgtgtaaattataagaagctggcgatcttttgatatgctgtttcacaggatcctgacactggagggcagctgtcttgtgcattacttgtgtttccagcaccaaagttgtgggacatgttgctgtagactgctgcgcagtcctgggtgcattcagtctctctgcctctgcctgcctcctggtccccactttaaaggctgtgcagctccttaaataataaagctggaaaatatttttagtcgggttatcaaatttgatttacaaaaacgctaactttgtttgaaatgcaaacaggtttgaaaatatgtattaagtactttgtattctggaagcgtgaattgcttttgaagtctgtcagtattactggtatttttaaataaagaagaatttttctccaatttta

SEQ ID NO: 180740 - DNA, 3453 bp, Homo sapiens
  Payload ID: 15594
  Gene Symbol: SESN2
  Gene Name: sestrin 2
  Uniprot ID: P58004
  ENST ID: ENST00000253063
  CDS Start-End: 322-1764
tccgcggcggggatgctgaggagcgctgggtccgggagcagccctggcccctgcggacttccgaggccgtgaaaacccctgcgctgcggcccttcccaggcccccgaggccgttcgccgttcccgaagcccgactgggggaagagtccagcaccaaagcggccgttctcggattccggagcgttctggagccccgagagacgccccggggttctagaagctccccggcggcgcccagtcccggcttcattcgggcgtccctccgaaacccactcgggtgcacgggtcgtcggcgagccgcgaccgggtcctggcgcgcaccatgatcgtggcggactccgagtgccgcgcagagctcaaggactacctgcggttcgccccgggcggcgtcggcgactcgggccccggagaggagcagagggagagccgggctcggcgaggccctcgagggcccagcgccttcatccccgtggaggaggtccttcgggagggggctgagagcctcgagcagcacctggggctggaggcactgatgtcctctgggcgagtagacaacctggcagtggtgatgggcctgcaccctgactactttaccagcttctggcgcctgcactacctgctgctgcacacggatggtcccttggccagctcctggcgccactacattgccatcatggctgccgcccgccatcagtgttcttacctggtaggctcccacatggccgagtttctgcagactggtggtgaccctgagtggctgctgggcctccaccgggcccccgagaagctgcgcaaactcagcgagatcaacaagttgctggcgcatcggccatggctcatcaccaaggaacacatccaggccttgctgaagaccggcgagcacacttggtccctggccgagctcattcaggctctggtcctgctcacccactgccactcgctctcctccttcgtgtttggctgtggcatcctccctgagggggatgcagatggcagccctgccccccaggcacctacaccccctagtgaacagagcagccccccaagcagggacccgttgaacaactctgggggctttgagtctgcccgcgacgtggaggcgctgatggagcgcatgcagcagctgcaggagagcctgctgcgggatgaggggacgtcccaggaggagatggagagccgctttgagctggagaagtcagagagcctgctggtgaccccctcagctgacatcctggagccctctccacacccagacatgctgtgctttgtggaagaccctactttcggatatgaggacttcactcggagaggggctcaggcaccccctaccttccgggcccaggattatacctgggaagaccatggctactcgctgatccagcggctttaccctgagggtgggcagctgctggatgagaagttccaggcagcctatagcctcacctacaataccatcgccatgcacagtggtgtggacacctccgtgctccgcagggccatctggaactatatccactgcgtctttggcatcagatatgatgactatgattatggggaggtgaaccagctcctggagcggaacctcaaggtctatatcaagacagtggcctgctacccagagaagaccacccgaagaatgtacaacctcttctggaggcacttccgccactcagagaaggtccacgtgaacttgctgctcctggaggcgcgcatgcaagccgctctgctgtacgccctccgtgccatcacccgctacatgacctgactcctgagcaggacctgggcccggttcagctccccacaaggacttctctgtctggagacagccccagacccttttgtgtcccatgcccaccctccccacgctgcagtgggcttgtgtgtgatgtgcagtcccgaagccacaccctcccttttcctcactggaatggacagttcattgcactgactctgggatctcagccctgctcctgggagctggaagagcacttggagatcctaagggaccacacccttcctccttcccctgcccacagaggcagagggcacaggaaagaagccgggccaagctcggaattaatgtgccacaagtgttgtggccttcctgaactgggaagtccctggctggcccccgggggagaggggcaaatgcctccgggactgacactccaggcagctttgccttctctcccctgtcatttccagatttcattacctcctacttgccattcacccatcaatgtgaaagtcagggtcacagctggtctgtgtgtccagttccctaaaagcctgttctgttgggcagcctgaggctgttgcccgaatcctagttcagttttttgacttcctttgccctttttcccttttctccatgcttaatggtgtgaggcgtcaggagagaggccaagtacataaaaaaaaaaaaagcagattatctctagagagtttgagcctttgctggtcacattgccttctgaagaggagggagtattagattataaatcctctttattttggtcctttatgcttgaggttccaacctggagccacagtgtgtgagaggaggaggagagggagaattctgttctcccagagctgcacctgcctcgcagaggccagcaccccactctcctgcctccagtggccctgccgcagatgtctcccaaaaagttgagcctttctagatggcttaggtggcaccatggctcagcaggaggggcgggaggcaccagggttcttgtttggaccctgcccctgggccatggccaggtgaccatggctacattgccaaacctctgactgccacagctgcagactgagagggtgggtctgagtccccacaatgtctgaagctgcccctgggattctcaggccaacctgccaacagcaagcggattttcttgcaagatcagggaccccatttctgcagccagtgtctcctgggtgccttctgaggactcccacccccatcccagtatctcatctgtcccctctcctggggcttaagtgggttgcttccaggcagaagcagccaaggaccgattccaggcactttctgtagcaaatgactgtgaattacgacttctcttgcccttcttctagcagtctgtgcctcctctctgaccagtttggagggcactgaagaaaggcaagggccgtgctgctgctgggcggggcaggagaggagcctggccagtgtgccacattaaatacccgtgcaggcgcggagaagcaaccggcacccccttccggcctgaaagccctccctgcaagaaggtgtgcaggagagaagaggccccggcatggggatctgggttctagagggcatgtgatgactgtaaatgttcactgggtgggtagggagtggtatccagtgttcaagtgcagaaatctttggctttgctaccagttccatatgatgagaaataaacgttcgctgaggttttgtttcata

SEQ ID NO: 180741 - DNA, 1710 bp, Homo sapiens
  Payload ID: 15595
  Gene Symbol: SESN3
  Gene Name: sestrin 3
  Uniprot ID: P58005
  ENST ID: ENST00000278499
  CDS Start-End: 542-1603
aaacaggtgatgtcataatgcacagtcctgtggccacggccatggccgggtggggagctgggctccagtgagcacagagctccttgccagtaggcgatgcaagttatctctggggcccggaggacacgagtgaggaccgggcaccaatcaggttctcgctctgcgccggcctttgttctcactcgggagcaggttgcgggcgtctagcatcgggaacccgcattcgactcggacgcgcattgctagccccttcgggagacctggctcccctacccgtctgtcccgccacactcggtcagcctgcgctttccccagtcaagtctgccttctctccgcagaacgtggacgctaaaaccctgacttaccattttaagctttagaagaggataaaagaatcagagtgtctcaacccttgacaagaggaccaagtgcctttattccagagaaggaagttgtccaagcaaacacagtggatgaacgtactaactttcttgtggaagaatactctacatccggtcgtctggacaacatcacacaggtcatgagtttacacactcagtacctggagtctttcttgcggagccagttttacatgttgcgcatggatggtccccttcctctaccatacaggcactatattgcaataatgaaacttgtcaaaactggagaaaataattggtctctgcctgaactggtacatgctgtggtcctcctggcacattatcatgctttggcaagctttgtttttggtagtggtatcaatccagagagagatccagaaatctccaatggattcaggctaatatcagtcaacaatttctgcgtttgtgatcttgctaatgacaacaacatagagaatgcatctctttcaggcagcaactttgggattgtggattctctaagtgagctagaggccttaatggaaaggatgaaaagacttcaagaagaaagggaagatgaagaggcgtctcaagaagaaatgagcactcgttttgaaaaggagaagaaagaaagtctttttgtggtctctggagatacttttcattcatttcctcattcagattttgaggatgacatgattataacatctgatgtctctcgatatattgaagaccctggttttgggtatgaagactttgccagacgaggagaagagcatttgccaacattccgagctcaggactatacctgggaaaatcatgggttctccctggtgaacagactttattctgacattggacatcttcttgatgaaaagtttcggatggtctacaatctcacatataacactatggccacccatgaggatgttgacacaaccatgctgcgcagagctttatttaactatgttcactgtatgtttggaatcaggtatgatgactatgattatggagaagttaatcaattacttgaaagaagcctgaaggtttacattaagacagtgacctgctatcctgagagaactacaaaacgcatgtatgatagttactggcggcagttcaaacactcagaaaaagttcatgtcaatctacttttaatggaagcacgaatgcaagctgaacttctttatgctcttcgtgccataactcggcatttgacctgaagtatcacccaaggaaaatgtcatacatgtgtaaagacctttcacataagataaacattgaagctatttgtgatatagcatcaaaaattattcagttctctagtgtc

SEQ ID NO: 180742 - DNA, 1408 bp, Homo sapiens
  Payload ID: 15595
  Gene Symbol: SESN3
  Gene Name: sestrin 3
  Uniprot ID: P58005
  ENST ID: ENST00000416495
  CDS Start-End: 187-1152
cgcggtggtcgcctctggcagtgccgctagctttcaggcagtcgcctctcctcccgacatcccgccttgaggaggctgaggcggaatcgcggctggcggcggggggacggaccggccctgcagtggccgcagtgacagcccggacccggccctccgcccgctctcgcctcggcgcccgcagccacgatgaaccggggcggcggcagcccgtcggccgccgccaactacctgctctgtaccaactgccggaaagtgctgcggaaggataaaagaatcagagtgtctcaacccttgacaagaggaccaagtgcctttattccagagaaggaagttgtccaagcaaacacagtggatgaacgtactaactttcttgtggaagaatactctacatccggtcgtctggacaacatcacacaggtcatgagtttacacactcagtacctggagtctttcttgcggagccagttttacatgttgcgcatggatggtccccttcctctaccatacaggcactatattgcaataatggctgcagctagacatcagtgttcttacttaataaacatgcatgtggatgaatttttaaagactggaggtattgctgagtggttgaatggtttggaatatgtgccacaaagactgaaaaatcttaatgaaattaataagctgctagcacatcgaccttggctgatcacaaaagagcacattcagaaacttgtcaaaactggagaaaataattggtctctgcctgaactggtacatgctgtggtcctcctggcacattatcatgctttggcaagctttgtttttggtagtggtatcaatccagagagagatccagaaatctccaatggattcaggctaatatcagtcaacaatttctgcgtttgtgatcttgctaatgacaacaacatagagaatgcatctctttcaggcagcaactttgggattgtggattctctaagtgagctagaggccttaatggaaaggatgaaaagacttcaagaagaaagggaagatgaagaggcgtctcaagaagaaatgagcactcgttttgaaaaggagaagaaagaaagtctttttgtggtctctggagatacttttcattcatttcctcattcaggtgcttttttgcacttttttgccttttagttgttcttagaaccctgacagggcaacttcagtgttttccatgtggatatgtaaaaatgattctgctaccatctttctcttatttagttctcctcttctatcttaccctcatgctattgctttccctcaggctggttcatccttgaatgtatttcagattgagttgagagaaactttcagctttgtagttcatactctatcctggataaaatgttatttaaagcagatcagttacttataaagttagatagacata

SEQ ID NO: 180743 - DNA, 607 bp, Homo sapiens
  Payload ID: 15595
  Gene Symbol: SESN3
  Gene Name: sestrin 3
  ENST ID: ENST00000542176
  CDS Start-End: 396-607
ataatgcacagtcctgtggccacggccatggccgggtggggagctgggctccagtgagcacagagctccttgccagtaggcgatgcaagttatctctggggcccggaggacacgagtgaggaccgggcaccaatcaggttctcgctctgcgccggcctttgttctcactcgggagcaggttgcgggcgtctagcatcgggaacccgcattcgactcggacgcgcattgctagccccttcgggagacctggctcccctacccgtctgtcccgccacactcggtcagcctgcgctttccccagtcaagtctgccttctctccgcagaacgtggacgctaaaaccctgacttaccattttaagctttagaagagccaagagcagccaattagagcataatggacaaggataaaagaatcagagtgtctcaacccttgacaagaggaccaagtgcctttattccagagaaggaagttgtccaagcaaacacagtggatgaacgtactaactttcttgtggaagaatactctacatccggtcgtctggacaacatcacacaggtcatgagtttacacactcagtacctggagtctttcttgcggagccagtt

SEQ ID NO: 180744 - DNA, 9558 bp, Homo sapiens
  Payload ID: 15595
  Gene Symbol: SESN3
  Gene Name: sestrin 3
  Uniprot ID: P58005
  ENST ID: ENST00000536441
  CDS Start-End: 338-1816
gaggcgctgcggcggcggtggtggcggtggcagcggtggcggctgctcgtcctagcctggcgggggcgggggtctggaagatgggggcgggtggaacaacgggccggtgaggagcagccgccgccgtctccgccgtcgctggggcagctgccgcggtggtcgcctctggcagtgccgctagctttcaggcagtcgcctctcctcccgacatcccgccttgaggaggctgaggcggaatcgcggctggcggcggggggacggaccggccctgcagtggccgcagtgacagcccggacccggccctccgcccgctctcgcctcggcgcccgcagccacgatgaaccggggcggcggcagcccgtcggccgccgccaactacctgctctgtaccaactgccggaaagtgctgcggaaggataaaagaatcagagtgtctcaacccttgacaagaggaccaagtgcctttattccagagaaggaagttgtccaagcaaacacagtggatgaacgtactaactttcttgtggaagaatactctacatccggtcgtctggacaacatcacacaggtcatgagtttacacactcagtacctggagtctttcttgcggagccagttttacatgttgcgcatggatggtccccttcctctaccatacaggcactatattgcaataatggctgcagctagacatcagtgttcttacttaataaacatgcatgtggatgaatttttaaagactggaggtattgctgagtggttgaatggtttggaatatgtgccacaaagactgaaaaatcttaatgaaattaataagctgctagcacatcgaccttggctgatcacaaaagagcacattcagaaacttgtcaaaactggagaaaataattggtctctgcctgaactggtacatgctgtggtcctcctggcacattatcatgctttggcaagctttgtttttggtagtggtatcaatccagagagagatccagaaatctccaatggattcaggctaatatcagtcaacaatttctgcgtttgtgatcttgctaatgacaacaacatagagaatgcatctctttcaggcagcaactttgggattgtggattctctaagtgagctagaggccttaatggaaaggatgaaaagacttcaagaagaaagggaagatgaagaggcgtctcaagaagaaatgagcactcgttttgaaaaggagaagaaagaaagtctttttgtggtctctggagatacttttcattcatttcctcattcagattttgaggatgacatgattataacatctgatgtctctcgatatattgaagaccctggttttgggtatgaagactttgccagacgaggagaagagcatttgccaacattccgagctcaggactatacctgggaaaatcatgggttctccctggtgaacagactttattctgacattggacatcttcttgatgaaaagtttcggatggtctacaatctcacatataacactatggccacccatgaggatgttgacacaaccatgctgcgcagagctttatttaactatgttcactgtatgtttggaatcaggtatgatgactatgattatggagaagttaatcaattacttgaaagaagcctgaaggtttacattaagacagtgacctgctatcctgagagaactacaaaacgcatgtatgatagttactggcggcagttcaaacactcagaaaaagttcatgtcaatctacttttaatggaagcacgaatgcaagctgaacttctttatgctcttcgtgccataactcggcatttgacctgaagtatcacccaaggaaaatgtcatacatgtgtaaagacctttcacataagataaacattgaagctatttgtgatatagcatcaaaaattattcagttctctagtgtcaaagtttagccgtttgtttttttttttttgttttttgcggctgtaatgtgcaatgatgtgttttattttccttgatgcttaacattactaacaattgcaaaaataatactgaggagcactactttgcattgtttgtagttggagttttggatactgatcataaatcatgaatctggcgtattaatgcttaacttcagcgcctttgggttgtgtgtatgtgtattttttctccccccaccccgcccttttttttttaagaataaggacaagtgcttacaatctgctcaagcaattgtttttcagatattggaattcagcaaagagtgacctctctggccattctaaaactttaatgttgtgtcctaaatctggtggaggaaaagcatgcgctgttgaaccaagctgctcactggacacatatttgtgtccccaggagattatttgtcaggcactgttttttatttgtttgtttgttcatttattgttgttttactgctattggcgataacatgaaatgtgatacagctattgcccataatttaatgtgaaattaatcatgatgaattctatagcatgctactgaaatgccaaattcagctattttctttctcttctaaaatggaagtttcagttttccatatcagatgtatataagtggaattataacacaatcctatcactgacagtaatcctcagtcaccttaaataatcagtgctcacagtgctgcttacagttcatttagttggcacatataaacctgtacccacacaagactgaccaaaaattttctttgcacatttttcctttctcatagtttttttctatatttcgttaagcaaaggaaggttaatatgcctatttttcctgttaggcttttagaaattattttccatgacttttgttcttataataggttagacagtttatttttcaaaggtaaaaattgtgtttctatgcattaatgtgattgaactacaaaaacagagtgcaatatgttcaaaaaatactcaactaaactttccccctgtcatatcactgcaaaagtgtccttttaaacagagccataaagaaatttttttcaaatttctttattgcacaggcttttttcagttttacctttctgggattgaacaatgttcctttcataatgccaaagcattcccttccccagaaaaatctccttggacaactggtttaaaaacgttattaagtcataggggaggaataagcggccaaaaagtcacatttttgcattggtttacgttgcttgattagactatcttcagagagcacattatgtgtttatagctttaatttgtattatgtcaatgaaccagtgaagtgcctaaagagatgcttacaactatccagtaggacacaactgcactgctttttaaacactttttggttagttaagggtgacttgaattgtacacatacatgctaatttttgaaaacttatccatttttcatagtaaataatatagataaaattttctgttagagttcccgcaaatatttcattttagacttacttgtgatataagatttaacttttcttttgtgaaagaatcgtgaactagtgtttcatgaaatcattttcctcttccatttatcatcctcctctggtacaatatattgggttgctttcttttagattttgttccagataggaaaacaaatatgactgtatacttattaacataaggtagttctgcatttttggattccaggatcctgtttgaaatcttccatgtgaggaaaaaattactaatatttttaaagacagggtggtttatttaaagagattattcagagaacttgtgccatatctcgtctgttttattgcatatgccatatgttaacttttattcaatattacattatgtagatatgtaatacaaagaaaatatttaggagaatggcaaaacacaaatggcaacataaatgtccatttgacttacctaacttcacaactttcaagttgaggatgtcatttattcttgaatttgtttttttactagatgctttcaattaatagccctatatttttgtgcaggcgaactgtataacaggataaaaaatgatttgtatgtattgaaaaggaggagaaattctcacagaacaccatatgagctttagaccaaaaggggaaacaaggtttaagtaactaaaatggccacttagtttgtgtttatttttttccctggaaatgtaagtagttggagtttaggctatggaaatattagtgcctttaatagatctctttccttgcaaagtttctttttagctcagcattgatctatcttatcaataggaaaataagttgacttggaactataaacaaaaacaacaccatatatttatgaacctcagtgaaccagcctagaaaaattgacttctgcaggtgctaaagcacctactaatacgcagcatgcacagcatttcaggttgtgaataccattttacaacgagtttgctgttaactctctttatccaatgcaaacttgaaattctgatgcggttttccagggtggtattttttcagagtattgaatttactatttagtaatttatagtatagctttttatattaaaatgtgatatttttaaaagagatatctggttcaattggtataatgacgtgattatgcaatatgctgatctacaccttgcgctcacattgtgccaaacttaaatgtgcaagtgtacgtgagaaaagcacatgtgaatgtgaattctttaattctttgcttattatgttaaaattagtcttcatagtccactgatgtgtatgcttgaataatgtctatttactttggaatttcaagatttccagcttcaatggtaatttataatttctcagatcaccttaagaaatattgagatactctcccacctgaaaataatctgttctttaacccacctgactatgggagtagccaggcaggtgcctcactggcttcttcagacgaggcttcctcaggtggatatatgactattaggggaaaagaggcttttgagacagcttattacctccttcccctttttgaactaagtacattgtctcagtcccagtatgaatttgtcccatttggggtatttttaaaataaaagatggctaacatggaatctggggcatagccttggcctttaattatggttgtaagcccaaataatggcagagaaacacagggctgtttttacaacagaaaactcaatataagttttatataagaatcctataaaatttgaaccagagctcctatttagttgttataatgtctcctaaagatcttaaatgcttctaaaagctaattattattccagagcaactttttccttttcccccttataaagtttttttttaaatccaaaatcttagatttctgtgccacagcaaaataaaatgatcaacaattaaagatctgtacttaaaatagtacaccatttttagtggagggagggtgcatgcctatatgatggtaagattcttttgaactctaaggacaattcctcatggaaaaaataaatttcagtgcatattataaaaatgatttgcactgtgttagcaaaataaggtgttttaggttgtattttaaagacaattctaaatcatttctctggaaagcaagaccttaaattcttctctttaatagaactgcttttatgcaaagagatggtcttaacatggactaaacagtacataacaataatgtttgttatgtaaatagtatatcacatttgcttagtagcacaattcaacagcaggctgaaagtcgtggctcctctgctcagattgagttttaagttacctaatttatgtaatcagaatctattctaggtggccgtcaacgtaaactgtgtttccctattatatccctctggagactgagaatcaaattaaatagtctttcttcaaagcagtactgtaacatgaatgtatttatctcagtcaacagaacttatatgcccactgtatgtggagcttatttcaatgctaatttggcttagttagcagacctagaatctgcccaggtgagacctagaacaaaaatagctggggtgaaatggataagagaggtagaggtatatgtcaaggcagagccctatgaggaaggaagagttttcaaagaatatgaggaacatagtgctgagagtgtggctgccttcagcaccgtacacctaatctagagaaaatatttcccatgtgggaggtcctgtctgcattcagtccacccttttctgcctgcttcttcctccaagtgcctcaacctctacatgctcactctcctccccttccctcagcccatcttggtctaagcagctttcacaatccaaaccaaacatcaccagccacccgctgataagtcaccagcatttactttcctgagttactttttctccattcattgagactatggattcatcccaactccttctaaatccctcaaccatccagctatattttggctaacctttgccctagacactctaccagatgttaatgcagtatcaagtgtaaattgtgtcaccctattctgttctacccttttccctgctgccgaaatatcttgctctcctctacctcatccccaaagagcctataaattcagagtatccaaccttttcatggattcactcactgttgttcagtaatacaacttccatattttaaataaatcataaaagatttttgccttctatcaaagtaggaaactttatatttatacatgatacagaaattgaactatttctatcgttcagaatttagcatataacaggattttaaagtgattgaattgccatcctaacttggatttgtattaggttatgaatgaatactgttgttagtccaagctatttgaatgtaaagttaaaattctccagcaatccagaatgacttgtaacccttcagtggaatgggaaatttctggtatgcaaatagggtggtgttccagacatttgttttattggtggtgtttgggccttgaaacacatttctaatagaatgacatatggcaaagggtatttagatggtcctatgggatcacagaagcccatatgatttaaaatatagataaaataacacaaaattgggtacataagggtttaaccaggctttcctgggttagactaagcctctaacctctgttcctatcctgttcttatgggaggaaaaaaaatgttccatgggatgaaaagaaaatgcattgactttgtagtctttattctcctagccgcacttcgggtatatccagaaggaagaggaaatgcaaagaggaagaagatgtaatagttcttctctccagctaggtgcacttgaggttgttcataaatgtaaaattatgtcaggtttctaacatgggacactgcacacagttgtctgacctgatgaaccatcccatttgaaagtatagattattattatttcttgtagtatttggttgttttccatctcattcatgaacaactcaacctgatagtagtatccaataaatgcctttcagggctcaggaatgaattgacatcctagttaagaaatgagacttaataatggagactgaatgaggcggtttgtattaaattatatgccatgaagtgttcattttagctttaacctaattatgactgtaccaccatgaagtacagaatgaaaaattatatatatgggggggaaacagaatgaatatctgattcttttgaatgcttgtggaaatctttgagatcgtgcagggcataccacaaaatagcctttagaacagatacccaattttacagttcataggacaacatcaaacattagtaagtctaaataagatgaatagaatttttgttatgtaaattttgctagaacagtctattttcttgcacccctcaagttaacctcttaaaaaaatgaatgtataatttctaccgaaagaatatcagagagaatctctctggcctatagtgttaaaatattgttcacaaatcctgattagttaagtgcatacattatgaaacttacagaataaaacttattatacatctctttcttaaattaatatctttacacattttcaactggctccccaagtctgataaggaaggattaaaagaaaaaagaaatgtattagttgggtggccaaggagtttcctttgtaatgttgagagacttccgctttctgaatttcgctggttctctaaggtaaaagagttaaatagtacccttgttcaccaaggaaagtgatccaaactatatatctagtgcagatatttcctttgcattatttagtcttctctggagagaaaatacagtttccccttcctctttctcttcacatttactcttttcaacccaaaataagagacatagaaagcaaaccacagccagtttggcatcttctcagtgctactagtataggcacatacacatacacagtctcagcaaggttataaagaaccctgtcaggtccacttgcaacatggccttgctacttggattagctcctttaagcctgaaaataactttcctggtcatggaagaactggacgcatcttttaacttatgaaatagaagttgaacttgaaaactctttttaaaaaatcctggttttgcaggacagctacataatgaatgtatatattaagactgtagctgaattgcacatgaaatcagattgccaacttcttgactttcaatgttagacatttatccttaagttgtgagcgatatatgtagcatgctgtgaaatgtctgttatagctctttaattcatcagtattaatacagaattatcatttgcgtttcttggtactttttattcaatgtaatcagaagctgtgatgttttgcctttgtagtcctgtgctttgttactgtaattttttttttttttttacgaagcacgtgactggactaatgtaaggcagatgacgtgatctttaagactgctatatatatcagtctcttactctataaggttttaaattagaataagcttttatcaaatagataattgatgcaatttaggattcacgcaagtttcagtgtcaaatggcggtcttatagtttcaattctgaaaatagcaaacttaataaacagccactttaaacttgttctggcaaaccagaccctgctgtagatatagtctaaggtagttaaccatataagccttttcaactcttaatgccctccacatgaatcagcagttaagaaggttctagaacccatgaaagcttttgtatgtattactaggttttgtttttcttatgtttgctgattttacagttctgactaaagctgacctaaatggatcagtttatgtgtaatattctagtgctttaatgactctttttttctttggagggagggtaacattatttggacagatgcagaaggaactgttagtgagtcaagacaaacacatctgaaataaaggaactgtgtattaacatgttaacaattcataactgcactttttatgacattttgaaaatctatttataggtacagaacaatgggttttgttaaactgtatcacatttatacttgcagaaatttatttcattgttattagtaggaattttattggttcaataaaattggcaaaactgaacaccaatcatttgcctactttgtttatactgga

SEQ ID NO: 180745 - DNA, 825 bp, Homo sapiens
  Payload ID: 15595
  Gene Symbol: SESN3
  Gene Name: sestrin 3
  ENST ID: ENST00000634898
  CDS Start-End: 575-825
agtcctgtggccacggccatggccgggtggggagctgggctccagtgagcacagagctccttgccagtaggcgatgcaagttatctctggggcccggaggacacgatgctggaatgaatccattcatctttaaatacttaactgcttctactacaatgagtactactgccagtttccactaataatagcagtactcatggctgccatttccagagtactcactagaactcattcttttggaaaagtgaaatagaaaaacatactactatgcaaatgaccactattacataaagctgtaaaaactagaccagaagtttacctcacatgtacaccattctaaggttgaagtagtcaaagatgaacaaggtactgaccgaccgccctacaaagaactgatgattcagtagagagagaggaggataaaagaatcagagtgtctcaacccttgacaagaggaccaagtgcctttattccagagaaggaagttgtccaagcaaacacagtggatgaacgtactaactttcttgtggaagaatactctacatccggtcgtctggacaacatcacacaggtcatgagtttacacactcagtacctggagtctttcttgcggagccagttttacatgttgcgcatggatggtccccttcctctaccatacaggcactatattgcaataatggctgcagctagacatcagtgttcttacttaataaacatgcatgtggatgaatttttaaagactggaggtattgctgagtggttgaatggtttggaatatgtgccacaaagactgaaaaatcttaatgaaattaataagctgct

SEQ ID NO: 180746 - DNA, 680 bp, Homo sapiens
  Payload ID: 15596
  Gene Symbol: SMYD1
  Gene Name: SET and MYND domain containing 1
  ENST ID: ENST00000438570
  CDS Start-End: 4-315
gagatgacaatagggagaatggagaacgtggaggtcttcaccgctgagggcaaaggaaggggtctgaaggccaccaaggagttctgggctgcagatatcatctttgctgagcgggcttattccgcagtggtttttgacagccttgttaattttgtgtgccacacctgcttcaagaggcaggagaagctccatcgctgtgggcagtgcaagtttgcccattactgcgaccgcacctgccagaaggatgcttggctgaaccacaagaatgaatgttcggccatcaagagatatgggaaggttttacaagaagactgatagtctttcaagcccccacatcacaggcttagggacggcactaactttctcccagggatctaactggctagttcaaattatcactcttttaccttcatataaaatgtctcccccaaacctttttcccttctttgtcattgttatctgctaagcccctggtcatttccccatattcgtagtctttttttccatcctatctttctaatatttgttgtctttaacaaactgtgttctgtgtctgtgctcctccttccctctcagaccactggaatgcaagtccttcttccctttggaatgtactctggatcccttcccctgctttgacccccagactttgctccatctattattgcttctccatcctg

SEQ ID NO: 180747 - DNA, 4433 bp, Homo sapiens
  Payload ID: 15596
  Gene Symbol: SMYD1
  Gene Name: SET and MYND domain containing 1
  Uniprot ID: Q8NB12
  ENST ID: ENST00000419482
  CDS Start-End: 86-1558
gggatgctgaaggtgctgaaatagcaatgacaagagacttggctcagtgttaaataactgccgcgctggcctgacagtctctgagatgacaatagggagaatggagaacgtggaggtcttcaccgctgagggcaaaggaaggggtctgaaggccaccaaggagttctgggctgcagatatcatctttgctgagcgggcttattccgcagtggtttttgacagccttgttaattttgtgtgccacacctgcttcaagaggcaggagaagctccatcgctgtgggcagtgcaagtttgcccattactgcgaccgcacctgccagaaggatgcttggctgaaccacaagaatgaatgttcggccatcaagagatatgggaaggtgcccaatgagaacatcaggctggcggcgcgcatcatgtggcgggtggagagagaaggcaccgggctcacggagggctgcctggtgtccgtggacgacttgcagaaccacgtggagcactttggggaggaggagcagaaggacctgcgggtggacgtggacacattcttgcagtactggccgccgcagagccagcagttcagcatgcagtacatctcgcacatcttcggagtgattaactgcaacggttttactctcagtgatcagagaggcctgcaggccgtgggcgtaggcatcttccccaacctgggcctggtgaaccatgactgttggcccaactgtactgtcatatttaacaatggcaatcatgaggcagtgaaatccatgtttcatacccagatgagaattgagctccgggccctaggcaagatctcagaaggagaggagctgactgtgtcctatattgacttcctcaacgttagtgaagaacgcaagaggcagctgaagaagcagtactactttgactgcacatgtgaacactgccagaaaaaactgaaggatgacctcttcctgggggtgaaagacaaccccaagccctctcaggaagtggtgaaggagatgatacaattctccaaggatacattggaaaagatagacaaggctcgttccgagggtttgtatcatgaggttgtgaaattatgccgggagtgcctggagaagcaggagccagtgtttgctgacaccaacatctacatgctgcggatgctgagcattgtttcggaggtcctttcctacctccaggcctttgaggaggcctcgttctatgccaggaggatggtggacggctatatgaagctctaccaccccaacaatgcccaactgggcatggccgtgatgcgggcagggctgaccaactggcatgctggtaacattgaggtggggcacgggatgatctgcaaagcctatgccattctcctggtgacacacggaccctcccaccccatcactaaggacttagaggccatgcgggtgcagacggagatggagctacgcatgttccgccagaacgaattcatgtactacaagatgcgcgaggctgccctgaacaaccagcccatgcaggtcatggccgagcccagcaatgagccatccccagctctgttccacaagaagcaatgaggactgcccagtggaggaggggcgatgtggctggggagctagggagagactctggaggtggtgggtctctcgggagacccctaatgaggaagttgaggtaatgcttaacattgttgctgtgagaatttactgccctatgtttcccagagccattttggctcaattcaagtctattcaattcaagttaactctagcccagcccagatcaactcctcctacaaatattattggatgataggccctagaacccaataaaggagctccaaatgtcgttgggtggggaagcaaaatgtagagaaacatttaaagcacactgtaataataaatgcaattataaactatatggaggagggtgcagaggagggaatgtgtctggtgtgtgatgtgtgtgtgtgcagtgggggtatcacagagagtatgacatctgagttgagggtagcaggtgcctggagtctcaggtggctgctcacccatctgtgcaggtgtctctggggctgctggtctcacctgtggtctgcagtagacacaattggctgagcaggatatgtgatactgtgtggttggtgtggagttttgaagaaggggctgtgtttgggccacgtaggctctactcagagacctgaaaccacttcagaatggtgcatatgtcgaaagagctggctgggggccttgcccaaaccaactgaggtcttaaagtccagggaaaaaaagtctgggttccaactagaattctagaaatatttctagaacacacagagagggaataagtccctctatcacccttattaccaagccttgtggttccctgtgattttagataatgtctgatatttttctggctatttgcctagtaggatttaaaaaatattttcaaagtgaagctgagagagaatcttggaaacacacatacctgttgatcatgggccctgcagaattggcccttgggggctttatttggttacatgtgcctgggtggtctttaccagcttagactctatcatgggcccccatgaagctccattctcaatactgaataattattacttcccttgttgagtttctttttctgtcatgccctgggggcttctgctcttctcaccagaaagaacatttgaatctggattcttgtacacctgggttagaccctgttcagaggtgtggccaatttatcccgatctcctggaaggctgttgtgatttccatctaagaaatgagggtcttgagaatcaaccagtcccaagattagcctgttatcctgttatctactgagaccccaaatttctcaccaatgttttgggagatcctggaaaagatcccttcagtttggggtgtcaccaagacttctacacaacccaggactaccattgacctcagagctgtaccccacatcttgaagtaaattgatcccaccaggtcccacgtttgttatctctgcctaaatgttagcttctccatcctcaccacatgatgacctgctgtgtccctctgagcactacccagtggctgaaaactctgcaaatgggccacacttttgcaaaatacttgtatctgacacttaggtcttgtttgaagaatttcctttctggaaggttttacaagaagactgatagtctttcaagcccccacatcacaggcttagggacggcactaactttctcccagggatctaactggctagttcaaattatcactcttttaccttcatataaaatgtctcccccaaacctttttcccttctttgtcattgttatctgctaagcccctggtcatttccccatattcgtagtctttttttccatcctatctttctaatatttgttgtctttaacaaactgtgttctgtgtctgtgctcctccttccctctcagaccactggaatgcaagtccttcttccctttggaatgtactctggatcccttcccctgctttgacccccagactttgctccatctattattgcttctccatcctggatccttgacatttgtcaccccactggccttctcaggtgcaatcagtaaaaatgctgagaactcttggatcttaatcttcatgactgagttttttttagttgtatagttatcatctgcctttcttcactttgcatttcttcttgaatccattgcagattgacttccactcccactccttcactaaaagggctcttaccaagatcaaatctaatgggtacattttagttcctatgtgatttggcctttcgatgtcaatcatcactcccagccattgattttggtgacccacttccctgtgatgatcttctgatctagtttctcaggttccttcgctggtcctttttctttccctgcccctgacatattgacatttcctggagttggttttgtccttgattcattctcatgtcattctgcacacagtctctgcatgaactcaggcagacccttcatttaatgaccaccttagggctgatgattctcaaatctgtattccccgatcttgcatttgagctccagccccactcatcctctcggatgttctgcaggcccagcaaactcatcatgtccaaagtgaaactttttctctttcctgtctcctctcctctgatctgttctttcttggaacaccacccaagaacgtcacctcctccatcagattgtgagctcctggagggcaggagctgtgtccttctattcatcttcctatccccagaaccttgcacagatcctggaatgtggtaggtgctcagtaaatgtgtgttgaataaatgaatgaatgaatgaacaaatgaatgaatttgcttacttcaaggcaaaagaaccatgaaactgtattttgagtttctatgttatagcagtcagcaaatcctattaaatactttgtgtttccaagcaaataa

SEQ ID NO: 180748 - DNA, 1816 bp, Homo sapiens
  Payload ID: 15596
  Gene Symbol: SMYD1
  Gene Name: SET and MYND domain containing 1
  ENST ID: ENST00000444564
  CDS Start-End: 41-1474
agtgttaaataactgccgcgctggcctgacagtctctgagatgacaatagggagaatggagaacgtggaggtcttcaccgctgagggcaaaggaaggggtctgaaggccaccaaggagttctgggctgcagatatcatctttgctgagcgggcttattccgcagtggtttttgacagccttgttaattttgtgtgccacacctgcttcaagaggcaggagaagctccatcgctgtgggcagtgcaagtttgcccattactgcgaccgcacctgccagaaggatgcttggctgaaccacaagaatgaatgttcggccatcaagagatatgggaaggtgcccaatgagaacatcaggctggcggcgcgcatcatgtggcgggtggagagagaaggcaccgggctcacggagggctgcctggtgtccgtggacgacttgcagaaccacgtggagcactttggggaggaggagcagaaggacctgcgggtggacgtggacacattcttgcagtactggccgccgcagagccagcagttcagcatgcagtacatctcgcacatcttcggagtgattaactgcaacggttttactctcagtgatcagagaggcctgcaggccgtgggcgtaggcatcttccccaacctgggcctggtgaaccatgactgttggcccaactgtactgtcatatttaacaatggcaaaattgagctccgggccctaggcaagatctcagaaggagaggagctgactgtgtcctatattgacttcctcaacgttagtgaagaacgcaagaggcagctgaagaagcagtactactttgactgcacatgtgaacactgccagaaaaaactgaaggatgacctcttcctgggggtgaaagacaaccccaagccctctcaggaagtggtgaaggagatgatacaattctccaaggatacattggaaaagatagacaaggctcgttccgagggtttgtatcatgaggttgtgaaattatgccgggagtgcctggagaagcaggagccagtgtttgctgacaccaacatctacatgctgcggatgctgagcattgtttcggaggtcctttcctacctccaggcctttgaggaggcctcgttctatgccaggaggatggtggacggctatatgaagctctaccaccccaacaatgcccaactgggcatggccgtgatgcgggcagggctgaccaactggcatgctggtaacattgaggtggggcacgggatgatctgcaaagcctatgccattctcctggtgacacacggaccctcccaccccatcactaaggacttagaggccatgcgggtgcagacggagatggagctacgcatgttccgccagaacgaattcatgtactacaagatgcgcgaggctgccctgaacaaccagcccatgcaggtcatggccgagcccagcaatgagccatccccagctctgttccacaagaagcaatgaggactgcccagtggaggaggggcgatgtggctggggagctagggagagactctggaggtggtgggtctctcgggagacccctaatgaggaagttgaggtaatgcttaacattgttgctgtgagaatttactgccctatgtttcccagagccattttggctcaattcaagtctattcaattcaagttaactctagcccagcccagatcaactcctcctacaaatattattggatgataggccctagaacccaataaaggagctccaaatgtcgttgggtggggaagcaaaatgtagagaaacatttaaagcacactgtaataataaatgcaattataaactat

SEQ ID NO: 180749 - DNA, 1671 bp, Homo sapiens
  Payload ID: 15597
  Gene Symbol: SMYD2
  Gene Name: SET and MYND domain containing 2
  Uniprot ID: Q9NRG4
  ENST ID: ENST00000366957
  CDS Start-End: 23-1324
gcggccgcgccccgccgccaccatgagggccgagggcctcggcggcctggagcgcttctgcagcccgggcaaaggccgggggctgcgggctctgcagcccttccaggtgggggacttgctgttctcctgcccggcctatgcctacgtgctcacggtcaacgagcggggcaaccactgcgagtactgcttcaccaggaaagaaggattgtccaaatgtggaagatgcaagcaggcattttactgcaatgtggagtgtcagaaagaagattggcccatgcacaagctggaatgttctcccatggttgtttttggggaaaactggaatccctcggagactgtaagactaacagcaaggattctggccaaacagaaaatccacccagagagaacaccttcggaaaaattgttagctgtgaaggagtttgaatcacatctggataagttagacaatgagaagaaggatttgattcagagtgacatagctgctctccatcacttttactccaagcatctcggattccctgacaatgatagcctcgtagtactctttgcacaggttaactgtaatggcttcacaattgaagatgaagaactttctcatttgggatcagcgatatttcctgatgttgcattgatgaatcatagctgttgccccaatgtcattgtgacctacaaagggaccctggcagaagtcagagctgtacaggaaatcaagccgggagaggaggtttttaccagctatattgatctcctgtacccaacggaagatagaaatgaccggttaagagattcttatttctttacctgtgagtgccaggagtgtaccaccaaggacaaggataaggccaaggtggaaatccggaagctcagcgatcccccaaaggcagaagccatccgagacatggtcagatatgcacgcaacgtcattgaagagttccggagggccaagcactataaatcccctagtgagctgctggagatctgcgagctcagccaggagaagatgagctctgtgtttgaggacagtaacgtgtacatgttgcacatgatgtaccaggccatgggtgtctgcttgtacatgcaggactgggaaggagccctgcaatatggacagaaaatcattaagccctacagtaagcactatcctttgtactccctcaacgtggcctccatgtggttgaagctagggagactctacatgggcctggaacacaaagccgcaggggagaaagccctgaagaaggccattgcaatcatggaagtagctcacggcaaagatcatccatatatttctgagatcaaacaggaaattgaaagccactgaaactatgcagcatttcagttttcatttaaacacttagttcagaaaccttaaaggatttgaatatttcaaattgcacacgtcactccagcatctctgtaaaataattggaatgaaaatacttcttgcacttaaacactgcacatgccgtactttgaggttagtctgaatcttgaactttaataccaaattaattttgaatgcttttgtttcctaagagataatggcatggtttcatatgttatactttggacagacagagttttaaaaatggaattattttttctttcatgcctcttgtaatgttctgaacaaacttgaatgatgaaagtattaaagagatatcagta

SEQ ID NO: 180750 - DNA, 702 bp, Homo sapiens
  Payload ID: 15597
  Gene Symbol: SMYD2
  Gene Name: SET and MYND domain containing 2
  ENST ID: ENST00000416415
  CDS Start-End: 1-296
ctcagcgatcccccaaaggcagaagccatccgagacatggtcagatatgcacgcaacgtcattgaagagttccggagggccaagcactataaatcccctagtgagctgctggagatctgcgagctcagccaggagaagatgagctctgtgtttgaggacagtaacgtgtacatgttgcacatgatgtaccaggccatgggtgtctgcttgtacatgcaggactgggaaggagccctgcaatatggacagaaaatcattaagccctacagcctaggccattgcaatcatggaagtagctcacggcaaagatcatccatatatttctgagatcaaacaggaaattgaaagccactgaaactatgcagcatttcagttttcatttaaacacttagttcagaaaccttaaaggatttgaatatttcaaattgcacacgtcactccagcatctctgtaaaataattggaatgaaaatacttcttgcacttaaacactgcacatgccgtactttgaggttagtctgaatcttgaactttaataccaaattaattttgaatgcttttgtttcctaagagataatggcatggtttcatatgttatactttggacagacagagttttaaaaatggaattattttttctttcatgcctcttgtaatgttctgaacaaacttgaatgatgaaagtattaaagagatatcagta

SEQ ID NO: 180751 - DNA, 732 bp, Homo sapiens
  Payload ID: 15598
  Gene Symbol: SMYD3
  Gene Name: SET and MYND domain containing 3
  ENST ID: ENST00000391836
  CDS Start-End: 290-732
ggcggaggccgtccctgaggaagtaggagaagaccactagggctgtgtctaagtcacagcgaaaagttgttccgtgagacctcttgcataatgactctaaggggcttcagagacattctcctgcgaggtaactgtgcctgtgatgtggggagagtgtgagactgggaagcagaagaccggaatgtgatacagcctttcccacgacttggctgaggaactgctgttgtgaaccttttgccctggtgggattattgtgatctgcaactctttcaccatctgtaatgcggagatgcaggaagttggtgttggcctatatcccagtatctctttgctcaatcacagctgtgaccccaactgttcgattgtgttcaatgggccccacctcttactgcgagcagtccgagacatcgaggtgggagaggagctcaccatctgctacctggatatgctgatgaccagtgaggagcgccggaagcagctgagggaccagtactgctttgaatgtgactgtttccgttgccaaacccaggacaaggatgctgatatgctaactggtgatgagcaagtatggaaggaagttcaagaatccctgaaaaaaattgaagaactgaaggcacactggaagtgggagcaggttctggccatgtgccaggcaatcataagcagcaattctgaacggcttcccgatatcaacatctaccagctgaaggtgctcgactgcgccatggatgc

SEQ ID NO: 180752 - DNA, 1209 bp, Homo sapiens
  Payload ID: 15598
  Gene Symbol: SMYD3
  Gene Name: SET and MYND domain containing 3
  ENST ID: ENST00000403792
  CDS Start-End: 96-644
gtgcgcgcagggcgcaggcgcgcgggtcccggcagcccgtgagacgcccgctgctggacgcgggtagccgtctgaggtgccggagctgcgggaggatggagccgctgaaggtggaaaagttcgcaaccgccaagaggggaaacgggctgcgcgccgtgaccccgctgcgccccggagagctactcttccgctcggatcccttggcgtacacggtgtgcaaggggagtcgtggcgtcgtctgcgaccgctgccttctcgggaaggaaaagctgatgcgatgctctcagtgccgcgtcgccaaatactgtagtgctaagtgtcagaaaaaagcttggccagaccacaagcgggaatgcaaatgccttaaaagctgcaaacccagatatcctccagactccgttcgacttcttggcagagttgtcttcaaacttatggatggagcaccttcagaatcagagaagctttactcattttatgatctggagtcaaatattaacaaactgactgaagataagaaagagggcctcaggcaactcgtaatgacatttcaacatttcatgagagaagaaatacaggatgcctctcagctgccacctgcctttgacctttttgaagcctttgcaaaacccataggcatgaaatgattgcttcttgatatttaccctgggatagggatgacagaaacaccccctcactgctatggatctgctgtcctcgctttctcacattgtgtgtttgcatttgttttaatgttgatcacaatttaataacaagtaaaactttacttttgacaattttgccacttattttgtaatttgtaagcacacgtttgaagatatatttatgccattaatattttaaggcatgttttaaaatttactgttttctgaaaaattaaatgtaattggtttgattgctggagatttattccagtttttctcaaatgtatttttattctgtatggtacatttttatgattttctgattaatgtcatcttagcattatattctggttatctataatttaaaattgatttcaaaatttactgatttcttacagtgcatctgaaaactttctcatctatttcatatgcttctgaaaattataacctgtagtagtatcgtgtgccgtgcccaaggctgttttcatgttcaacactataaacacgaacacctactgaaagataaaaatataccttatgatgatta

SEQ ID NO: 180753 - DNA, 566 bp, Homo sapiens
  Payload ID: 15598
  Gene Symbol: SMYD3
  Gene Name: SET and MYND domain containing 3
  ENST ID: ENST00000455277
  CDS Start-End: 345-566
agaggagaaagaatgtgaatgctcattgctggtcatttttttttcctgtgctatgccatcttaattgttcatagctcttctcttttaagaaagcttatgtgagagccacaattgtatcagagaacattattacataattatacagccttccctttcccttaaatggtcctttaaggctttacatctgcaatagagatagcttagtgaatattcttccaaataagtttttttagtttcatttttagattagccttttgtatttgcgtaaaacagtgcttttggtaaatgttgtgtatttaaggggaagaacaggatacttctgggggctgaggaaggaaaagctgatgcgatgctctcagtgccgcgtcgccaaatactgtagtgctaagtgtcagaaaaaagcttggccagaccacaagcgggaatgcaaatgccttaaaagctgcaaacccagatatcctccagactccgttcgacttcttggcagagttgtcttcaaacttatggatggagcaccttcagaatcagagaagctttactcattttatgatctggagtcaaatatt

SEQ ID NO: 180754 - DNA, 562 bp, Homo sapiens
  Payload ID: 15598
  Gene Symbol: SMYD3
  Gene Name: SET and MYND domain containing 3
  ENST ID: ENST00000453676
  CDS Start-End: 169-562
ggtcctgcctcttccccgccatcttctgtcagacaaaaggacttagtttttctatcagtgtctcacatggaaggttcaagaggaggctcatcagtgtgaaaatccaaatcttaagggactgtacataatggagtaaacagaacatacgggtgtccgaaggaaaagctgatgcgatgctctcagtgccgcgtcgccaaatactgtagtgctaagtgtcagaaaaaagcttggccagaccacaagcgggaatgcaaatgccttaaaagctgcaaacccagatatcctccagactccgttcgacttcttggcagagttgtcttcaaacttatggatggagcaccttcagaatcagagaagctttactcattttatgatctggagtcaaatattaacaaactgactgaagataagaaagagggcctcaggcaactcgtaatgacatttcaacatttcatgagagaagaaatacaggatgcctctcagctgccacctgcctttgacctttttgaagcctttgcaaaagtgatctgcaactctttcaccatctgtaatgcggagatgc

SEQ ID NO: 180755 - DNA, 1548 bp, Homo sapiens
  Payload ID: 15598
  Gene Symbol: SMYD3
  Gene Name: SET and MYND domain containing 3
  Uniprot ID: Q9H7B4
  ENST ID: ENST00000490107
  CDS Start-End: 41-1327
ggacgcgggtagccgtctgaggtgccggagctgcgggaggatggagccgctgaaggtggaaaagttcgcaaccgccaagaggggaaacgggctgcgcgccgtgaccccgctgcgccccggagagctactcttccgctcggatcccttggcgtacacggtgtgcaaggggagtcgtggcgtcgtctgcgaccgctgccttctcgggaaggaaaagctgatgcgatgctctcagtgccgcgtcgccaaatactgtagtgctaagtgtcagaaaaaagcttggccagaccacaagcgggaatgcaaatgccttaaaagctgcaaacccagatatcctccagactccgttcgacttcttggcagagttgtcttcaaacttatggatggagcaccttcagaatcagagaagctttactcattttatgatctggagtcaaatattaacaaactgactgaagataagaaagagggcctcaggcaactcgtaatgacatttcaacatttcatgagagaagaaatacaggatgcctctcagctgccacctgcctttgacctttttgaagcctttgcaaaagtgatctgcaactctttcaccatctgtaatgcggagatgcaggaagttggtgttggcctatatcccagtatctctttgctcaatcacagctgtgaccccaactgttcgattgtgttcaatgggccccacctcttactgcgagcagtccgagacatcgaggtgggagaggagctcaccatctgctacctggatatgctgatgaccagtgaggagcgccggaagcagctgagggaccagtactgctttgaatgtgactgtttccgttgccaaacccaggacaaggatgctgatatgctaactggtgatgagcaagtatggaaggaagttcaagaatccctgaaaaaaattgaagaactgaaggcacactggaagtgggagcaggttctggccatgtgccaggcaatcataagcagcaattctgaacggcttcccgatatcaacatctaccagctgaaggtgctcgactgcgccatggatgcctgcatcaacctcggcctgttggaggaagccttgttctatggtactcggaccatggagccatacaggatttttttcccaggaagccatcccgtcagaggggttcaagtgatgaaagttggcaaactgcagctacatcaaggcatgtttccccaagcaatgaagaatctgagactggcttttgatattatgagagtgacacatggcagagaacacagcctgattgaagatttgattctacttttagaagaatgcgacgccaacatcagagcatcctaagggaacgcagtcagagggaaatacggcgtgtgtctttgttgaatgccttattgaggtcacacactctatgctttgttagctgtgtgaacctctcctattggaaattctgttccgtgtttgtgtaggtaaataaaggcagacatggtttgcaaaccacaagaatcattagttgtagagaagcacgattataataaattcaaaacatttggttgaggatgcca

SEQ ID NO: 180756 - DNA, 1458 bp, Homo sapiens
  Payload ID: 15598
  Gene Symbol: SMYD3
  Gene Name: SET and MYND domain containing 3
  Uniprot ID: Q9H7B4
  ENST ID: ENST00000630181
  CDS Start-End: 128-1237
gtggatttgagagatacctcccctccttctgctcagctgccttgcagtaattaaactctttctctgctgcaacacccctactgttctccgtgtattggcttttctgggcagcaggaaggaaaagctgatgcgatgctctcagtgccgcgtcgccaaatactgtagtgctaagtgtcagaaaaaagcttggccagaccacaagcgggaatgcaaatgccttaaaagctgcaaacccagatatcctccagactccgttcgacttcttggcagagttgtcttcaaacttatggatggagcaccttcagaatcagagaagctttactcattttatgatctggagtcaaatattaacaaactgactgaagataagaaagagggcctcaggcaactcgtaatgacatttcaacatttcatgagagaagaaatacaggatgcctctcagctgccacctgcctttgacctttttgaagcctttgcaaaagtgatctgcaactctttcaccatctgtaatgcggagatgcaggaagttggtgttggcctatatcccagtatctctttgctcaatcacagctgtgaccccaactgttcgattgtgttcaatgggccccacctcttactgcgagcagtccgagacatcgaggtgggagaggagctcaccatctgctacctggatatgctgatgaccagtgaggagcgccggaagcagctgagggaccagtactgctttgaatgtgactgtttccgttgccaaacccaggacaaggatgctgatatgctaactggtgatgagcaagtatggaaggaagttcaagaatccctgaaaaaaattgaagaactgaaggcacactggaagtgggagcaggttctggccatgtgccaggcaatcataagcagcaattctgaacggcttcccgatatcaacatctaccagctgaaggtgctcgactgcgccatggatgcctgcatcaacctcggcctgttggaggaagccttgttctatggtactcggaccatggagccatacaggatttttttcccaggaagccatcccgtcagaggggttcaagtgatgaaagttggcaaactgcagctacatcaaggcatgtttccccaagcaatgaagaatctgagactggcttttgatattatgagagtgacacatggcagagaacacagcctgattgaagatttgattctacttttagaagaatgcgacgccaacatcagagcatcctaagggaacgcagtcagagggaaatacggcgtgtgtctttgttgaatgccttattgaggtcacacactctatgctttgttagctgtgtgaacctctcctattggaaattctgttccgtgtttgtgtaggtaaataaaggcagacatggtttgcaaaccacaagaatcattagttgtagagaagcacgattataataaattcaaaacatttggttgaggatgcca

SEQ ID NO: 180757 - DNA, 4384 bp, Homo sapiens
  Payload ID: 15599
  Gene Symbol: SMYD4
  Gene Name: SET and MYND domain containing 4
  Uniprot ID: Q8IYR2
  ENST ID: ENST00000305513
  CDS Start-End: 169-2583
ctggcgcgggacgccggacgcggtgcggggcggagcggggcgccaaggggcgcgccaggagctgcgcgggcgctgggagggagaccagggcgcagttccgggcgcgtctgagcggttctcgaggcgttctcgcctcggtctctggcgagtgcacggatcaaaagcagcatggatctgcctgtggatgaatggaaatcatatctgcttcaaaagtgggcttcactcccgacgtctgttcaggtcacaatttctacagcagagaccttgagggatatctttcttcactcctcttcacttcttcaacctgaggatgagctgtttctaaaaagactttctaaaggttacttggtgggaaaggactcggacgctcctcttttctacagagaagaaggaaacaaaaaatttcaggagaaagattacacaggagctgcagtgctgtactctaagggagtgtcacattcaaggcctaacactgaggacatgtcactgtgtcatgctaaccgctcggcagccctcttccacctgggtcagtatgagacgtgtcttaaagacattaacagagcacagacacatgggtatccagaaaggttgcaacccaagattatgttacgtaaagcagaatgtctggtggccctggggagactgcaggaggcaagccagaccatcagtgatcttgaaaggaacttcacagccacaccagccctagcagatgtcctccctcagactctgcagagaaacctccatcgtctgaaaatgaagatgcaagaaaaggacagtctcacagaaagcttcccagcagctctggccaaaacccttgaggatgcagcgctgagggaggagaatgaacaactttccaatgcctcatcatccatcggcttatgcgtagatcctttaaaaggtcgctgtctcgttgccacaaaagatattctcccaggagagctcctggtgcaggaggatgcttttgtgagtgttctcaacccaggagaactgccaccaccgcatcacggcctagacagcaaatgggacaccagagtcaccaatggggacctctattgtcaccgatgtttgaagcacactttggccacagttccgtgtgacggatgcagttatgccaagtattgcagccaggagtgtttgcagcaggcctgggagctctaccacaggacagaatgtcctctgggagggctgcttctcacactgggtgtcttttgccacattgccctgaggttgactcttttggtgggatttgaggatgttcgcaaaatcataacgaagctttgtgataagattagtaacaaggacatctgtttacctgaaagcaacaatcaggtcaagacacttaattatggcctaggggagagtgagaaaaatggcaacatcgttgagaccccaattcctggatgcgatattaatgggaagtatgaaaataattataatgctgtcttcaaccttttgccccacactgaaaaccatagcccagagcacaaattcctctgtgctctctgtgtttctgcactgtgcagacagctagaagcagccagtttacaggccatcccaactgagaggattgtgaactcctctcagcttaaagcagcagtgacacctgaattgtgtcctgacgtgactatttggggagtggcgatgctgagacacatgttacagcttcagtgtaacgctcaggcgatgaccaccatacaacacacaggacctaaagggagcatcgttaccgacagcaggcaggtgcgccttgccacaggcatcttccctgttatcagcctcctgaaccactcctgtagccccaacaccagcgtgtccttcattagcactgtcgccaccatccgggcgtcacagcggattagaaaggggcaagagattctccactgctatgggcctcacaagagccggatgggggttgccgaaaggcagcagaagctgaggtctcagtatttctttgactgcgcctgtccagcttgtcaaactgaggcacacaggatggctgcagggcccaggtgggaagcattctgttgcaacagttgcggagcgcccatgcagggagatgacgtgctgcgctgtggcagcagatcttgtgcagaatccgccgtcagcagggaccacctggtctctcggttacaggacctacagcagcaggtcagagtggcccagaagcttctcagagatggtgaactagagcgagctgttcagcggctgtcggggtgccagcgtgacgccgagagcttcctgtgggcagagcacgccgtggtgggagagatcgcggatggcctggcccgggcctgtgctgccttaggagactggcaaaagtcagccacccatctacagaggagtctctacgtggtggaggttcgccacgggccgtccagtgttgaaatgggccatgagctcttcaaattggcccagatctttttcaacgggtttgcagtacccgaagccctgagcacaatacagaaagctgaggaggttctgtcgctgcactgtggcccatgggacgatgaaatccaggagctccagaagatgaaatcctgtttgttggacttaccacccacccctgtagggcctgcattgtagggttccaggaggattttgacccacagaaaaggagcccatggaacacaagttaaagaggttttgctggccaggtatggtggctcacgcctgtaatcccagcactttgggaggctaaggtgggcggatcacctgatgtcaggagttcaagaccagcctggccaacatggtgaaaccccatctttactaaaaatacaaaaaactagccaggcgtggtggtgggcacctgtaatcccagctacttgggaggctgaggcaggagaatctcttgaacccaggaggcggaggttgcagtgagccgagatcgctccactgcactccagcccaggtgacagtgtgagactccatctcaaaaaaaaaaataagaggccgggtgcggtggctcaagcctgtaatcccagcactttgggaggccgaggcaggcagatcacgaggtcaggagatccagaccatcctggctaacacggtgaaaccccgtctctactaaaaatacaaaaaaattagtcgggcgtggtggcggacgcctgtattcacagctactcgggaggttgaggcaggagaatggggtgaacccgggaggaagagcttgcagtgagccgagatcgcgccactgcactccagcctgggtgacagagccagactccatctcaaagaaaaaaaaaaaatattaagaggttctgctgccagatgtgggttctgtgggtcgggtgtgggttctgtgggtcgggtgtgggttctgcagaccaggtgcggattctgtgtaggttctgcaggcccagtgtagaggctcacacctgtaatcccagtactttgagacgctgaggtgggaggatcacttgagcccaggagttcaaaaccagcctgggcaatatagtgagaccgtatcactacaaaaaagtttttttagttcaccgagcatggtggcacatgcctgtagtcccacctactcgagaagctgagatagggtcacctgagcctggtaggctgaggctgcagtgagccaagatcgcactactgcactccagcctgggtgacagagtaagaccctgtctcaacaaaaaaataacaggttctgttgctgctgagctttcgtcaggaagataagactttcccaacagtccgaagcctaggatatgagggctgaggaggactcaaaccgttgcagtcagagagacacctattttggtgaatattttttgaaatagttaagtggcctccagtacaaactcccagttcccagaaaagacttaaaactagtatctggagattccaagtcctttaaaaggattttagctgatctgcaggcatctggatgttagcctggggttttggctggattccacctcgctcagtgatgatagtctgtttccctggaacattcctgtggttttagtagtaatgagatgtgtgcaccactccagtgggaactgaagctcttagtagttacattgtaattaaaaaagaattataaaacaagaaatcagcaagcctgcttacctccagagacacaccgttccacttacagtatctagcttcctcgactcctttgttaaaatcgtggagtatgaaccgtgaccagagaagtaaatatggagccgttttattgagcagtttcctccagggatgacggctgtcagtgtgtttcctgccagttttccagtccttactctctgcccttcattctgtactcttggcagagtcagtaaccaaccactaataaaatcaaagttgtagtaaagactttataacacatatgcctccttctgagttgttggttttgttttgttttgttttgttttgtttt

SEQ ID NO: 180758 - DNA, 515 bp, Homo sapiens
  Payload ID: 15599
  Gene Symbol: SMYD4
  Gene Name: SET and MYND domain containing 4
  ENST ID: ENST00000576633
  CDS Start-End: 98-316
gctgggagggagaccagggcgcagttccgggcgcgtctgagcggttctcgaggcgttctcgcctcggtctctggcgagtgcacggatcaaaagcagcatggatctgcctgtggatgaatggaaatcatatctgcttcaaaagtgggcttcactcccgacgtctgttcaggtcacaatttctacagcagagaccttgagggatatctttcttcactcctcttcacttcttcagttggagtgtgatggtgcgatctcagctcactgcaaccttcacctcccaggctcaagcgattctcgtgcctcggcctcccaatagctgagactacaagtgcttgccaccacgcccggctaatttttgtattttttgtggaggtgggttccactatgttgcccaggctggtcgcaaactcgtggaccaggtgacctgcccacctcggcctcccagagtgctgggattacagacctgaggatgagctgtttctaaaaagactttctaaaggttacttggtgggaaa

SEQ ID NO: 180759 - DNA, 793 bp, Homo sapiens
  Payload ID: 15599
  Gene Symbol: SMYD4
  Gene Name: SET and MYND domain containing 4
  ENST ID: ENST00000570368
  CDS Start-End: 124-793
agggtgttggaatcacagctgggaaatcagggacgccgtcccggaggaggtgccatttgagccgagtcgaagaacgtgtgggaattttccaggtggactccataagccaggatcaaaagcagcatggatctgcctgtggatgaatggaaatcatatctgcttcaaaagtgggcttcactcccgacgtctgttcaggtcacaatttctacagcagagaccttgagggatatctttcttcactcctcttcacttcttcaacctgaggatgagctgtttctaaaaagactttctaaaggttacttggtgggaaaggactcggacgctcctcttttctacagagaagaaggaaacaaaaaatttcaggagaaagattacacaggagctgcagtgctgtactctaagggagtgtcacattcaaggcctaacactgaggacatgtcactgtgtcatgctaaccgctcggcagccctcttccacctgggtcagtatgagacgtgtcttaaagacattaacagagcacagacacatgggtatccagaaaggttgcaacccaagattatgttacgtaaagcagaatgtctggtggccctggggagactgcaggaggcaagccagaccatcagtgatcttgaaaggaacttcacagccacaccagccctagcagatgtcctccctcagactctgcagagaaacctccatcgtctgaaaatgaagatgcaagaaaaggacagtctcacagaaagcttcccagcagctctggccaaaacccttgaggatgcagcgctgagggagg

SEQ ID NO: 180760 - DNA, 3016 bp, Homo sapiens
  Payload ID: 15599
  Gene Symbol: SMYD4
  Gene Name: SET and MYND domain containing 4
  ENST ID: ENST00000491788
  CDS Start-End: 1-1677
aagatgcaagaaaaggacagtctcacagaaagcttcccagcagctctggccaaaacccttgaggatgcagcgctgagggaggagaatgaacaactttccaatgcctcatcatccatcggcttatgcgtagatcctttaaaaggtcgctgtctcgttgccacaaaagatattctcccaggagagctcctggtgcaggaggatgcttttgtgagtgttctcaacccaggagaactgccaccaccgcatcacggcctagacagcaaatgggacaccagagtcaccaatggggacctctattgtcaccgatgtttgaagcacactttggccacagttccgtgtgacggatgcagttatgccaagtattgcagccaggagtgtttgcagcaggcctgggagctctaccacaggacagaatgtcctctgggagggctgcttctcacactgggtgtcttttgccacattgccctgaggttgactcttttggtgggatttgaggatgttcgcaaaatcataacgaagctttgtgataagattagtaacaaggacatctgtttacctgaaagcaacaatcaggtcaagacacttaattatggcctaggggagagtgagaaaaatggcaacatcgttgagaccccaattcctggatgcgatattaatgggaagtatgaaaataattataatgctgtcttcaaccttttgccccacactgaaaaccatagcccagagcacaaattcctctgtgctctctgtgtttctgcactgtgcagacagctagaagcagccagtttacaggccatcccaactgagaggattgtgaactcctctcagcttaaagcagcagtgacacctgaattgtgtcctgacgtgactatttggggagtggcgatgctgagacacatgttacagcttcagtgtaacgctcaggcgatgaccaccatacaacacacaggacctaaagggagcatcgttaccgacagcaggcaggtgcgccttgccacaggcatcttccctgttatcagcctcctgaaccactcctgtagccccaacaccagcgtgtccttcattagcactgtcgccaccatccgggcgtcacagcggattagaaaggggcaagagattctccactgctatgggcctcacaagagccggatgggggttgccgaaaggcagcagaagctgaggtctcagtatttctttgactgcgcctgtccagcttgtcaaactgaggcacacaggatggctgcagggcccaggtgggaagcattctgttgcaacagttgcggagcgcccatgcagggagatgacgtgctgcgctgtggcagcagatcttgtgcagaatccgccgtcagcagggaccacctggtctctcggttacaggacctacagcagcaggtcagagtggcccagaagcttctcagagatggtgaactagagcgagctgttcagcggctgtcggggtgccagcgtgacgccgagagcttcctgtgggcagagcacgccgtggtgggagagatcgcggatggcctggcccgggcctgtgctgccttaggagactggcaaaagtcagccacccatctacagaggagtctctacgtggtggaggttcgccacgggccgtccagtgttgaaatgggccatgagctcttcaaattggcccagatctttttcaacgggtgagtccctttcccacttcacagggcacacactgttcctttcctaggctcttctgggtattactttttttctatggtgtttttaaaagcatgttgaaacttctttatttcctctttaggagagatctttgccttctgttttgctaacaaacataacgctttagaatttcctcctgggaggcggagcttgcagtgagccaagatcgcgccactgcactgtagcctgggcgacagagcgagactccatctcaaaaaaaaaaaaaaaaagaatttcctcctgggagatatggggaaagcttttagatctcaagtgagtttcccagagagaacttggccaggcagccccacccaccctccagtatagctctccttctggttgttctctggttcgtcacagcccctttggctgtctcattcccagcactctcagctccaggctctctgccttctccctactctgcatcctcttccttttaaagcgtttgcttgaaccagggctgattttacccccagacaacatgtggcattgcctggagacttttttttttttttttttgagaaggggtcttgctgtcttgcccaggctggagtacagtggctcggtcacagctcactgcttcctgcaactcctgggctcaagcgatctctggagacattttggattgtcatgacttggaaggggggtgctgctggcatctattcgaaagaggccagaggtgctgctaagcatcctcccgggtacaagacagtgccccccccaccaaccccagcaaagaaggagccagcaacagtgtcaatagtgtcagggtcgagaaaccctgcttttttgctgctgttgtttgttttttgttttaaatcccctgttctactttgaaggttaaaaggaaagaacagcacgctgatgagctgatgccaaatccacttttgctactgagaccatttagggcccaatttcaggatttccgggtggaacctccaaccctggtaaagctgcccttggtgtatgtggctatgagaaagtgcttaaagcttcaacctaaggctgtgctgagtgggcctggtacccaagacacagagacattctgtttggtcagagagagagaaaagggctgcagagttaggtcagaggtcagccctaagatggtcaccctaaaatgaaaactgctatgtaaacctgtggtaaataccagatgaaaactttgaggccgggtgtggtagctcacgcctgtaatccagctgcccaggaggttgaggcaggagaatcacttgaacccgggaggcggaggttgcagtgagccgaggtcgcacaaatacctgggcgacaagagtgaaactcttgtctc

SEQ ID NO: 180761 - DNA, 586 bp, Homo sapiens
  Payload ID: 15599
  Gene Symbol: SMYD4
  Gene Name: SET and MYND domain containing 4
  ENST ID: ENST00000571854
  CDS Start-End: 55-586
gaagcaagcagggcttaaacgcaaacgctgctgagaactcagatcaaaagcagcatggatctgcctgtggatgaatggaaatcatatctgcttcaaaagtgggcttcactcccgacgtctgttcaggtcacaatttctacagcagagaccttgagggatatctttcttcactcctcttcacttcttcaacctgaggatgagctgtttctaaaaagactttctaaaggttacttggtgggaaaggactcggacgctcctcttttctacagagaagaaggaaacaaaaaatttcaggagaaagattacacaggagctgcagtgctgtactctaagggagtgtcacattcaaggcctaacactgaggacatgtcactgtgtcatgctaaccgctcggcagccctcttccacctgggtcagtatgagacgtgtcttaaagacattaacagagcacagacacatgggtatccagaaaggttgcaacccaagattatgttacgtaaagcagaatgtctggtggccctggggagactgcaggaggcaagccagaccatcagtgatcttgaaaggaacttcacagccacaccag

SEQ ID NO: 180762 - DNA, 6045 bp, Homo sapiens
  Payload ID: 15600
  Gene Symbol: SBF1
  Gene Name: SET binding factor 1
  ENST ID: ENST00000348911
  CDS Start-End: 103-5709
gtgcgcggtccagggccggggccgggccatgagcgcgccgtcctcgagtccccgagccgcggagcccgcccgcgcccctcgggccgccccgcgtccctcgccatggcgcggctcgcggactacttcgtgctggtggcgttcgggccgcacccgcgcgggagtggggaaggccagggccagattctgcagcgcttcccagagaaggactgggaggacaacccattcccccagggcatcgagctgttttgccagcccagcgggtggcagctgtgtcccgagaggaatccaccgaccttctttgttgctgtcctcaccgacatcaactccgagcgccactactgcgcctgcttgaccttctgggagccagcggagccttcacagcaggaaacgacgcgcgtggaggatgccacagagagggaggaagagggggatgagggaggccagacccacctgtctcccacagcacctgccccatctgcccagctgtttgcaccgaagacgctggtactggtgtcgcgactcgaccacacggaggtgttcaggaacagccttggcctcatctatgccatccacgtggagggcctgaatgtgtgcctggagaacgtgattgggaacctgctgacgtgcactgtgcccctggctgggggctcgcagaggacgatctctttgggggctggtgaccggcaggtcatccagactccactggccgactcgctgcccgtcagccgctgcagcgtggccctgctcttccgccagctaggcatcaccaacgtgctgtctttgttctgtgccgccctcacggagcacaaggttctcttcctgtcccggagctaccagcggctcgccgatgcctgtaggggcctcctggcactgctgtttcctctcagatacagcttcacctatgtgcccatcctgccggctcagctgctggaggtcctcagcacacccacgcccttcatcattggggtcaacgcggccttccaggcagagacccaggagctgctcgatgtgattgttgctgatctggatggagggacggtcaccattcctgagtgtgtgcacattccacccttgccagagccactgcagagtcagacgcacagtgtgctgagcatggtcctggacccggagctggagttggctgacctcgccttccctccgcccacgacatccacctcctccctgaagatgcaggacaaggagctgcgcgcggtcttcctgcggctgttcgctcagctgctgcagggctatcgctggtgcctgcacgtcgtgcgcatccacccggagcctgtcatccgcttccataaggcagccttcctgggccagcgtgggctggtagaggacgatttcctgatgaaggtgctggagggcatggcctttgctggctttgtgtcagagcgtggggtcccataccgccctacggacctgttcgatgagctggtggcccacgaggtggcaaggatgcgggcggatgagaaccacccccagcgtgtcctgcgtcacgtccaggaactggcagagcagctctacaagaacgagaacccgtacccagccgtggcgatgcacaaggtacagaggcccggtgagagcagccacctgcgacgggtgccccgacccttcccccggctggatgagggcaccgtgcagtggatcgtggaccaggctgcagccaagatgcagggtgcacccccagctgtgaaggccgagaggaggaccaccgtgccctcagggccccccatgactgccatactggagcggtgcagtgggctgcatgtcaacagcgcccggcggctggaggttgtgcgcaactgcatctcctacgtgtttgaggggaaaatgcttgaggccaagaagctgctcccagccgtgttgagggccctgaaggggcgagctgcccgccgctgcctcgcccaggagctgcacctgcatgtgcagcagaaccgtgcggtcctggaccaccagcagtttgactttgtcgtccgtatgatgaactgctgcctgcaggactgcacttctctggacgagcatggcattgcggcggctctgctgcctctggtcacagccttctgccggaagctgagcccgggggtgacgcagtttgcatacagctgtgtgcaggagcacgtggtgtggagcacgccacagttctgggaggccatgttctatggggatgtgcagactcacatccgggccctctacctggagcccacggaggacctggcccccgcccaggaggttggggaggcaccttcccaggaggacgagcgctctgccctagacgtggcttctgagcagcggcgcttgtggccaactctgagtcgtgagaagcagcaggagctggtgcagaaggaggagagcacggtgttcagccaggccatccactatgccaaccgcatgagctacctcctcctgcccctggacagcagcaagagccgcctacttcgggagcgtgccgggctgggcgacctggagagcgccagcaacagcctggtcaccaacagcatggctggcagtgtggccgagagctatgacacggagagcggcttcgaggatgcagagacctgcgacgtagctggggctgtggtccgcttcatcaaccgctttgtggacaaggtctgcacggagagtggggtcaccagcgaccacctcaaggggctgcatgtcatggtgccagacattgtccagatgcacatcgagaccctggaggccgtgcagcgggagagccggaggctgccgcccatccagaagcccaagctgctgcggccgcgcctgctgccgggtgaggagtgtgtgctggacggcctgcgcgtctacctgctgccggatgggcgtgaggagggcgcggggggcagtgctgggggaccagcattgctcccagctgagggcgccgtcttcctcaccacgtaccgggtcatcttcacggggatgcccacggaccccctggttggggagcaggtggtggtccgctccttcccggtggctgcgctgaccaaggagaagcgcatcagcgtccagacccctgtggaccagctcctgcaggacgggctccagctgcgctcctgcacattccagctgctgaaaatggcctttgacgaggaggtggggtctgacagcgccgagctcttccgtaagcagctgcataagctgcggtacccgccggacatcagggccacctttgcgttcaccttgggctctgcccacacacctggccggccaccgcgagtcaccaaggacaagggtccttccctcagaaccctgtcccggaacctggtcaagaacgccaagaagaccatcgggcggcagcatgtcactcgcaagaagtacaacccccccagctgggagcaccggggccagccgccccctgaggaccaggaggacgagatctcagtgtcggaggagctggagcccagcacgctgaccccgtcctcagccctgaagccctccgaccgcatgaccatgagcagcctggtggaaagggcttgctgtcgcgactaccagcgcctcggtctgggcaccctgagcagcagcctgagccgggccaagtctgagcccttccgcatttctccggtcaaccgcatgtatgccatctgccgcagctacccagggctgctgatcgtgccccagagtgtccaggacaacgccctgcagcgcgtgtcccgctgctaccgccagaaccgcttccccgtggtctgctggcgcagcgggcggtccaaggcggtgctgctgcgctctggaggcctgcatggcaaaggtgtcgtcggcctcttcaaggcccagaacgcaccttctccaggccagtcccaggcggactcgagtagcctggagcaggagaagtacctgcaggctgtggtcagctccatgccccgctacgccgacgcgtcgggacgcaacacgcttagcggcttctcctcagcccacatgggcagtcacggtaagtggggcagtgtccggaccagtggacgcagcagtggccttggcaccgatgtgggctcccggctagctggcagagacgcgctggccccaccccaggccaacgggggccctcccgacccgggcttcctgcgtccgcagcgagcagccctctatatccttggggacaaagcccagctcaagggtgtgcggtcagaccccctgcagcagtgggagctggtgcccattgaggtattcgaggcacggcaggtgaaggctagcttcaagaagctgctgaaagcatgtgtcccaggctgccccgctgctgagcccagcccagcctccttcctgcgctcactggaggactcagagtggctgatccagatccacaagctgctgcaggtgtctgtgctggtggtggagctcctggattcaggctcctccgtgctggtgggcctggaggatggctgggacatcaccacccaggtggtatccttggtgcagctgctctcagaccccttctaccgcacgctggagggctttcgcctgctggtggagaaggagtggctgtccttcggccatcgcttcagccaccgtggagctcacaccctggccgggcagagcagcggcttcacacccgtcttcctgcagttcctggactgcgtacaccaggtccacctgcagttccccatggagtttgagttcagccagttctacctcaagttcctcggctaccaccatgtgtcccgccgtttccggaccttcctgctcgactctgactatgagcgcattgagctggggctgctgtatgaggagaagggggaacgcaggggccaggtgccgtgcaggtctgtgtgggagtatgtggaccggctgagcaagaggacgcctgtgttccacaattacatgtatgcgcccgaggacgcagaggtcctgcggccctacagcaacgtgtccaacctgaaggtgtgggacttctacactgaggagacgctggccgagggccctccctatgactgggaactggcccaggggccccctgaacccccagaggaagaacggtctgatggaggcgctccccagagcaggcgccgcgtggtgtggccctgttacgacagctgcccgcgggcccagcctgacgccatctcacgcctgctggaggagctgcagaggctggagacagagttgggccaacccgctgagcgctggaaggacacctgggaccgggtgaaggctgcacagcgcctcgagggccggccagacggccgtggcacccctagctccctccttgtgtccaccgcaccccaccaccgtcgctcgctgggtgtgtacctgcaggaggggcccgtgggctccaccctgagcctcagcctggacagcgaccagagtagtggctcaaccacatccggctcccgtcaggctgcccgccgcagcaccagcaccctgtacagccagttccagacagcagagagtgagaacaggtcctacgagggcactctgtacaagaagggggccttcatgaagccttggaaggcccgctggttcgtgctggacaagaccaagcaccagctgcgctactacgaccaccgtgtggacacagagtgcaagggtgtcatcgacttggcggaggtggaggctgtggcacctggcacgcccactatgggtgcccctaagactgtggacgagaaggccttctttgacgtgaagacaacgcgtcgcgtttacaacttctgtgcccaggacgtgccctcggcccagcagtgggtggaccggatccagagctgcctgtcggacgcctgagcctcccagccctgcccggctgctctgcttccggtcgttaccgaccactaggggtgggcagggccgccccggccatgtttacagccccggccctcgacagtattgaggccccgagcccccagcacttgtgtgtacagcccccgtccccgccccgccccgcccggccggccctaacttattttggcgtcacagctgagcaccgtgccgggaggtggccaaggtacagcccgcaatgggcctgtaaatagtccggccccgtcagcgtgtgctggtccagccagcggctgcaggcgagtttctagaaccagagtctatataaagagagaactaacgcca

SEQ ID NO: 180763 - DNA, 8008 bp, Homo sapiens
  Payload ID: 15600
  Gene Symbol: SBF1
  Gene Name: SET binding factor 1
  Uniprot ID: O95248
  ENST ID: ENST00000380817
  CDS Start-End: 185-5866
ctggctgggaagatggcggcgggaacctgggccgccgccgccgccgccgccgccgccgcggagcgaaccaggggtgtccggggtgcgcggtccagggccggggccgggccatgagcgcgccgtcctcgagtccccgagccgcggagcccgcccgcgcccctcgggccgccccgcgtccctcgccatggcgcggctcgcggactacttcgtgctggtggcgttcgggccgcacccgcgcgggagtggggaaggccagggccagattctgcagcgcttcccagagaaggactgggaggacaacccattcccccagggcatcgagctgttttgccagcccagcgggtggcagctgtgtcccgagaggaatccaccgaccttctttgttgctgtcctcaccgacatcaactccgagcgccactactgcgcctgcttgaccttctgggagccagcggagccttcacaggaaacgacgcgcgtggaggatgccacagagagggaggaagagggggatgagggaggccagacccacctgtctcccacagcacctgccccatctgcccagctgtttgcaccgaagacgctggtactggtgtcgcgactcgaccacacggaggtgttcaggaacagccttggcctcatctatgccatccacgtggagggcctgaatgtgtgcctggagaacgtgattgggaacctgctgacgtgcactgtgcccctggctgggggctcgcagaggacgatctctttgggggctggtgaccggcaggtcatccagactccactggccgactcgctgcccgtcagccgctgcagcgtggccctgctcttccgccagctaggcatcaccaacgtgctgtctttgttctgtgccgccctcacggagcacaaggttctcttcctgtcccggagctaccagcggctcgccgatgcctgtaggggcctcctggcactgctgtttcctctcagatacagcttcacctatgtgcccatcctgccggctcagctgctggaggtcctcagcacacccacgcccttcatcattggggtcaacgcggccttccaggcagagacccaggagctgctcgatgtgattgttgctgatctggatggagggacggtcaccattcctgagtgtgtgcacattccacccttgccagagccactgcagagtcagacgcacagtgtgctgagcatggtcctggacccggagctggagttggctgacctcgccttccctccgcccacgacatccacctcctccctgaagatgcaggacaaggagctgcgcgcggtcttcctgcggctgttcgctcagctgctgcagggctatcgctggtgcctgcacgtcgtgcgcatccacccggagcctgtcatccgcttccataaggcagccttcctgggccagcgtgggctggtagaggacgatttcctgatgaaggtgctggagggcatggcctttgctggctttgtgtcagagcgtggggtcccataccgccctacggacctgttcgatgagctggtggcccacgaggtggcaaggatgcgggcggatgagaaccacccccagcgtgtcctgcgtcacgtccaggaactggcagagcagctctacaagaacgagaacccgtacccagccgtggcgatgcacaaggtacagaggcccggtgagagcagccacctgcgacgggtgccccgacccttcccccggctggatgagggcaccgtgcagtggatcgtggaccaggctgcagccaagatgcagggtgcacccccagctgtgaaggccgagaggaggaccaccgtgccctcagggccccccatgactgccatactggagcggtgcagtgggctgcatgtcaacagcgcccggcggctggaggttgtgcgcaactgcatctcctacgtgtttgaggggaaaatgcttgaggccaagaagctgctcccagccgtgttgagggccctgaaggggcgagctgcccgccgctgcctcgcccaggagctgcacctgcatgtgcagcagaaccgtgcggtcctggaccaccagcagtttgactttgtcgtccgtatgatgaactgctgcctgcaggactgcacttctctggacgagcatggcattgcggcggctctgctgcctctggtcacagccttctgccggaagctgagcccgggggtgacgcagtttgcatacagctgtgtgcaggagcacgtggtgtggagcacgccacagttctgggaggccatgttctatggggatgtgcagactcacatccgggccctctacctggagcccacggaggacctggcccccgcccaggaggttggggaggcaccttcccaggaggacgagcgctctgccctagacgtggcttctgagcagcggcgcttgtggccaactctgagtcgtgagaagcagcaggagctggtgcagaaggaggagagcacggtgttcagccaggccatccactatgccaaccgcatgagctacctcctcctgcccctggacagcagcaagagccgcctacttcgggagcgtgccgggctgggcgacctggagagcgccagcaacagcctggtcaccaacagcatggctggcagtgtggccgagagctatgacacggagagcggcttcgaggatgcagagacctgcgacgtagctggggctgtggtccgcttcatcaaccgctttgtggacaaggtctgcacggagagtggggtcaccagcgaccacctcaaggggctgcatgtcatggtgccagacattgtccagatgcacatcgagaccctggaggccgtgcagcgggagagccggaggctgccgcccatccagaagcccaagctgctgcggccgcgcctgctgccgggtgaggagtgtgtgctggacggcctgcgcgtctacctgctgccggatgggcgtgaggagggcgcggggggcagtgctgggggaccagcattgctcccagctgagggcgccgtcttcctcaccacgtaccgggtcatcttcacggggatgcccacggaccccctggttggggagcaggtggtggtccgctccttcccggtggctgcgctgaccaaggagaagcgcatcagcgtccagacccctgtggaccagctcctgcaggacgggctccagctgcgctcctgcacattccagctgctgaaaatggcctttgacgaggaggtggggtctgacagcgccgagctcttccgtaagcagctgcataagctgcggtacccgccggacatcagggccacctttgcgttcaccttgggctctgcccacacacctggccggccaccgcgagtcaccaaggacaagggtccttccctcagaaccctgtcccggaacctggtcaagaacgccaagaagaccatcgggcggcagcatgtcactcgcaagaagtacaacccccccagctgggagcaccggggccagccgccccctgaggaccaggaggacgagatctcagtgtcggaggagctggagcccagcacgctgaccccgtcctcagccctgaagccctccgaccgcatgaccatgagcagcctggtggaaagggcttgctgtcgcgactaccagcgcctcggtctgggcaccctgagcagcagcctgagccgggccaagtctgagcccttccgcatttctccggtcaaccgcatgtatgccatctgccgcagctacccagggctgctgatcgtgccccagagtgtccaggacaacgccctgcagcgcgtgtcccgctgctaccgccagaaccgcttccccgtggtctgctggcgcagcgggcggtccaaggcggtgctgctgcgctctggaggcctgcatggcaaaggtgtcgtcggcctcttcaaggcccagaacgcaccttctccaggccagtcccaggcggactcgagtagcctggagcaggagaagtacctgcaggctgtggtcagctccatgccccgctacgccgacgcgtcgggacgcaacacgcttagcggcttctcctcagcccacatgggcagtcacgttcccagccccagagccagggtcaccacgctgtccaaccccatggcggcctcggcctccagacggaccgcaccccgaggtaagtggggcagtgtccggaccagtggacgcagcagtggccttggcaccgatgtgggctcccggctagctggcagagacgcgctggccccaccccaggccaacgggggccctcccgacccgggcttcctgcgtccgcagcgagcagccctctatatccttggggacaaagcccagctcaagggtgtgcggtcagaccccctgcagcagtgggagctggtgcccattgaggtattcgaggcacggcaggtgaaggctagcttcaagaagctgctgaaagcatgtgtcccaggctgccccgctgctgagcccagcccagcctccttcctgcgctcactggaggactcagagtggctgatccagatccacaagctgctgcaggtgtctgtgctggtggtggagctcctggattcaggctcctccgtgctggtgggcctggaggatggctgggacatcaccacccaggtggtatccttggtgcagctgctctcagaccccttctaccgcacgctggagggctttcgcctgctggtggagaaggagtggctgtccttcggccatcgcttcagccaccgtggagctcacaccctggccgggcagagcagcggcttcacacccgtcttcctgcagttcctggactgcgtacaccaggtccacctgcagttccccatggagtttgagttcagccagttctacctcaagttcctcggctaccaccatgtgtcccgccgtttccggaccttcctgctcgactctgactatgagcgcattgagctggggctgctgtatgaggagaagggggaacgcaggggccaggtgccgtgcaggtctgtgtgggagtatgtggaccggctgagcaagaggacgcctgtgttccacaattacatgtatgcgcccgaggacgcagaggtcctgcggccctacagcaacgtgtccaacctgaaggtgtgggacttctacactgaggagacgctggccgagggccctccctatgactgggaactggcccaggggccccctgaacccccagaggaagaacggtctgatggaggcgctccccagagcaggcgccgcgtggtgtggccctgttacgacagctgcccgcgggcccagcctgacgccatctcacgcctgctggaggagctgcagaggctggagacagagttgggccaacccgctgagcgctggaaggacacctgggaccgggtgaaggctgcacagcgcctcgagggccggccagacggccgtggcacccctagctccctccttgtgtccaccgcaccccaccaccgtcgctcgctgggtgtgtacctgcaggaggggcccgtgggctccaccctgagcctcagcctggacagcgaccagagtagtggctcaaccacatccggctcccgtcaggctgcccgccgcagcaccagcaccctgtacagccagttccagacagcagagagtgagaacaggtcctacgagggcactctgtacaagaagggggccttcatgaagccttggaaggcccgctggttcgtgctggacaagaccaagcaccagctgcgctactacgaccaccgtgtggacacagagtgcaagggtgtcatcgacttggcggaggtggaggctgtggcacctggcacgcccactatgggtgcccctaagactgtggacgagaaggccttctttgacgtgaagacaacgcgtcgcgtttacaacttctgtgcccaggacgtgccctcggcccagcagtgggtggaccggatccagagctgcctgtcggacgcctgagcctcccagccctgcccggctgctctgcttccggtcgttaccgaccactaggggtgggcagggccgccccggccatgtttacagccccggccctcgacagtattgaggccccgagcccccagcacttgtgtgtacagcccccgtccccgccccgccccgcccggccggccctaacttattttggcgtcacagctgagcaccgtgccgggaggtggccaaggtacagcccgcaatgggcctgtaaatagtccggccccgtcagcgtgtgctggtccagccagcggctgcaggcgagtttctagaaccagagtctatataaagagagaactaacgccacgctcctgtgcctgccttccccactccccggctgcctgctctcggcctacccagagggtcccatctgcccctatccaggcccacctggcgggaggttggcatctttctcgtgagcctctcctggtgcctgggtccacccagctcggcctgcatgtccctgggagtgactttgctctgggggcggatcgagcaggaggcttcactggggacttgcttgattccctccacgcctcagggctggtctaggggccggcacggctggagaggaagcccccatccctacccaggggatgcagaagctgacctcacagaggcttgggggtgaaagggtgggtggtcatttgaccccagaaggctgttgcaggtccagaggacacttgaggtggacgtcagtttctggctagacccgagctgaagggatggaggccggaggcgggggggggggggggacagtgggctcccaggggaatgcaggttgaccacatctggctcctgccaggcaacgagcagcatctggcagagtaaggggccaacgcccatgggggatggaccctctcagttcttgggaattctgccccaaaagtcctttccctggggtctcagagggcccccgtccttcccttcttggtgtcactgtggcccctcactgctcttttcctattcaaacctgagtcccaccaggcccagggcttcacctgctgagctgttgtgtccttgcctgtgacgaggcctggccaggggtgcaggagcagaaggtggggagggttatagacgctgcaaaggccaagagaacatctgagagtggcagctggtgacctggccagaggggctggtgaggggcagagaacctggctagaggctgggtccctcaggtggtcctctcaggtgggaggcgagcagcaggtgtgggtgaggggaaggttctgatgacagctgcagaggcagggcccagtgctggcaggtggggggccaagaccctcccctggtgggacgttgaagccaaggatggccttggaccctgtcaggcccagcatggtcccgccacctcccccaccccacaggtggtgttgggacacctgggcgagatgtgagggtgggctcacttgagccactgaaaccagccaggtcttccctcaggccggacagatggcgcctgaccgaagttcctggcacctggaaaacccacaggtcagagtaaggggagaaaggaccctgccctccctgttccacgtctgtggggggagaggacaaatgccaggcacagggtaggcggcgagaacaaggcactcaatgtgtagctggggcagagactcggcctctggggagctgagcgggttccctccacccccaaccgtggtggaaagacaagctcgctggggcggggtgggggtctggtctccacctgcccctcccactcagccactgaggacaaggtggggcccaggcttctgggagggggagctggcacaaaaggaagtcctggggttgatgtgtttgagcgttaggcgaagtggttccccccatcccccaaacggaaaaatgtcagtatttgctaagctgtagagacctgatgccgtgatgtggcctgttccgcctccacccattacacggggataacgctggggggtggcgggcccacaaaagaggtgctggaggagactctcccacccctggccgggccggggctttggggccggaaggttcacagtacgcggtttgtccgaacgtcacggcttttattgggagttgggggtttggggtgccctgtcaggtgatcagaacattaaaaatggactcaacgtaaaa

SEQ ID NO: 180764 - DNA, 1578 bp, Homo sapiens
  Payload ID: 15600
  Gene Symbol: SBF1
  Gene Name: SET binding factor 1
  ENST ID: ENST00000418590
  CDS Start-End: 1-1246
cttctaccgcacgctggagggctttcgcctgctggtggagaaggagtggctgtccttcggccatcgcttcagccaccgtggagctcacaccctggccgggcagagcagcggcttcacacccgtcttcctgcagttcctggactgcgtacaccaggtccacctgcagttccccatggagtttgagttcagccagttctacctcaagttcctcggctaccaccatgtgtcccgccgtttccggaccttcctgctcgactctgactatgagcgcattgagctggggctgctgtatgaggagaagggggaacgcaggggccaggtgccgtgcaggtctgtgtgggagtatgtggaccggctgagcaagaggacgcctgtgttccacaattacatgtatgcgcccgaggacgcagaggtgtgggacttctacactgaggagacgctggccgagggccctccctatgactgggaactggcccaggggccccctgaacccccagaggaagaacggtctgatggaggcgctccccagagcaggcgccgcgtggtgtggccctgttacgacagctgcccgcgggcccagcctgacgccatctcacgcctgctggaggagctgcagaggctggagacagagttgggccaacccgctgagcgctggaaggacacctgggaccgggtgaaggctgcacagcgcctcgagggccggccagacggccgtggcacccctagctccctccttgtgtccaccgcaccccaccaccgtcgctcgctgggtgtgtacctgcaggaggggcccgtgggctccaccctgagcctcagcctggacagcgaccagagtagtggctcaaccacatccggctcccgtcaggctgcccgccgcagcaccagcaccctgtacagccagttccagacagcagagagtgagaacaggtcctacgagggcactctgtacaagaagggggccttcatgaagccttggaaggcccgctggttcgtgctggacaagaccaagcaccagctgcgctactacgaccaccgtgtggacacagagtgcaagggtgtcatcgacttggcggaggtggaggctgtggcacctggcacgcccactatgggtgcccctaagactgtggacgagaaggccttctttgacgtgaagacaacgcgtcgcgtttacaacttctgtgcccaggacgtgccctcggcccagcagtgggtggaccggatccagagctgcctgtcggacgcctgagcctcccagccctgcccggctgctctgcttccggtcgttaccgaccactaggggtgggcagggccgccccggccatgtttacagccccggccctcgacagtattgaggccccgagcccccagcacttgtgtgtacagcccccgtccccgccccgccccgcccggccggccctaacttattttggcgtcacagctgagcaccgtgccgggaggtggccaaggtacagcccgcaatgggcctgtaaatagtccggccccgtcagcgtgtgctggtccagccagcggctgcaggcgagtttctagaaccagagtctatataaagagagaactaac

SEQ ID NO: 180765 - DNA, 7439 bp, Homo sapiens
  Payload ID: 15601
  Gene Symbol: SBF2
  Gene Name: SET binding factor 2
  Uniprot ID: Q86WG5
  ENST ID: ENST00000256190
  CDS Start-End: 139-5688
ggttgtcaaacatggctgaagcgctgccgctgccgctactgccgctgcagggaaaatgctgagccctcccgggccgggtgggcggcggcggcgagggcggcgacggggacccgcttcccgagcgcggcggcggcggccatggcccggctggctgactacttcatcgtggtaggctatgaccacgagaagccaggatcaggagaaggtctggggaaaataatccagagatttccacagaaggactgggatgatacaccttttccacagggaattgagttgttttgtcagcctggcgggtggcagctgtccagagagaggaagcagccaacgttctttgtggttgtcctgacagacattgactcagatcgacattactgctcatgcctaaccttctatgaggcagagatcaatcttcagggaacaaagaaggaagagattgaaggtgaagcaaaagtgtctggtttaattcagcctgcagaagtgtttgctcccaaaagcctggtgttggtatccagattatattatccagaaatttttagggcttgcctgggtttgatctataccgtgtatgtggacagcctgaatgtctccttggaaagtctaattgcaaacctttgtgcctgccttgtcccagcggctggagggtctcagaagctgttttctttgggtgcaggagatagacagttgatccagactcctttacatgatagtcttcctatcacgggcactagtgtggctctcctgttccagcaattgggaattcaaaatgtcctcagcctcttttgtgcagtcctcacagaaaataaggttctcttccattctgcaagtttccagagacttagtgatgcttgtagagccctggaatctttaatgtttcctcttaaatatagttatccttatatccctattctcccggctcagctactggaagttctaagttccccaacgcctttcattattggagtacattctgtctttaaaactgatgtccatgaacttttagatgtaatcatagcagatttggatggaggcactattaaaattcccgaatgtattcacctctcttccctcccagaaccacttctacatcagactcaatcagctctttctttgattttacacccagatttggaagtagcagatcatgcttttcctcctccacgaacagctttatcccactcaaaaatgctggataaagaggtgcgagccgttttccttagattatttgcacaactcttccaaggatatagatcctgcctgcaacttataagaattcatgcagagccagtaatacatttccacaagacagcattcttggggcagcgtggtttggtcgagaatgatttcctcactaaagtactcagtggaatggcatttgcaggttttgtttcagaaagaggtcctccttatagatcttgtgatctctttgatgagttggtagcctttgaagtagagagaattaaagttgaagaaaataacccagtgaagatgataaagcatgtcagggaacttgctgagcaactattcaaaaatgagaatccaaatcctcatatggcattccagaaagttccacggccaacagaaggatcccatttgcgagttcatattcttcctttcccagagattaatgaagcccgggttcaggaattaatacaggaaaatgttgctaagaaccagaatgcacctcctgccacacgaatagaaaagaaatgtgttgtgccagcaggtccacctgttgtttcgataatggacaaggtgacgacagttttcaacagtgcacaaagactagaagttgtcagaaactgtatctcattcatatttgaaaataaaattttggaaactgaaaagacccttcctgctgcactcagagcccttaaaggaaaggcagcaagacagtgtctcactgatgaattgggtttgcatgtccagcaaaaccgggcaatattagaccatcaacagtttgactacataataaggatgatgaattgtactctacaggattgttcaagtttagaagaatacaacattgccgcagcattactccctttgaccagtgctttctataggaaacttgcccctggagtcagccagtttgcttacacgtgtgtacaagaccaccccatttggacaaatcagcaattttgggagacaaccttttacaatgcagtgcaggaacaggttcgctccctttatctctcagccaaggaagacaatcatgccccgcatctgaagcaaaaggataagcttcctgatgaccattatcaggagaagacagcaatggacctggcagctgagcaactacgcctttggcctaccctgagcaagtcaactcagcaagagctagtgcaacatgaggaaagcactgtctttagtcaggccattcactttgcaaacctcatggtgaacctgctagttccactcgacacaagtaaaaacaagctcctaagaacatcagcgccaggtgactgggagagcggaagcaacagcattgtcacaaacagtattgcaggaagtgtagctgagagctatgatacagagagtgggtttgaagattcagagaatactgacattgccaattctgttgtgcggttcattacccgatttattgacaaagtttgtacagagagtggagttactcaggatcacatcaagagccttcattgcatgataccaggaattgtagctatgcacattgagaccctagaagcagtacatcgagaaagcagaagacttccgcctattcagaagcccaagattcttagacctgctctgctgccaggagaagaaattgtctgtgagggtcttcgagtcttgctggatcctgatggaagagaagaagctactggaggtcttcttggaggccctcagctcctgccagcagaaggagccttgttcctcaccacatacagaattctcttcagaggaacaccccatgatcagttagtgggtgagcagacagttgtgcggagctttcccattgcctccatcaccaaggagaagaagattacaatgcagaaccagctacagcagaacatgcaagaaggactgcagatcacatcagcatcttttcagttgattaaggtagcatttgatgaagaagtcagtccagaagtagtagagatctttaagaaacagctgatgaagttccgttatcctcagtccattttcagtacctttgcttttgctgctggacaaactaccccacaaataattttaccaaaacagaaggaaaagaacacttcttttcgtaccttctcaaaaacaattgtgaaaggtgccaaaagggcagggaaaatgacaattgggcggcaatatttactgaagaagaagacagggacaattgtggaagaaagagtaaatcgtcctggatggaatgaagatgatgatgtatctgtttcagatgagagtgagctccccacaagtaccaccctgaaggcctccgagaagtctacaatggaacagttggtggaaaaagcttgtttcagagactatcagcgtttaggtttaggaaccataagtggcagctcttcccgttcaagacccgagtattttagaattactgcctccaacaggatgtattcactctgccggagctatcctggccttttagtcgtacctcaagctgtacaggacagtagtttaccaagagtagctcgctgctatcgacacaatcgcctgcctgttgtatgttggaagaactcaagaagtggtactctgctcctccgatctggaggattccatgggaagggagtcgttggtcttttcaaatctcagaactcccctcaggccgctcctacctcctctttagaatcttccagtagcatagaacaagagaaatacttgcaagccttactgaatgctgtttctgtccatcagaaactcagaggcaacagcactcttactgtcaggccagcctttgctctatctccaggtgtgtgggcaagtcttcgctctagcactcgcttgatcagctctccaacatccttcattgatgttggcgcccggctggcaggcaaggatcactcggcctccttcagtaacagcagctacctacaaaaccagctcttgaaacggcaagcagccctttacatatttggtgaaaagtcgcaactaaggaacttcaaggtagaatttgctttaaattgtgagtttgttcctgttgaatttcatgaaatccggcaagtgaaagccagttttaagaagctgatgagggcttgtatcccaagcaccatccctactgactcagaagtgaccttcctgaaagcgctgggagattctgagtggttcccacagcttcacaggataatgcagctggctgtggttgtatcagaagtacttgagaatggttcctcagttttggtctgtttggaggaaggctgggacatcactgcacaagtgacatccctggttcagttactcagtgatcccttttataggacacttgaaggcttccagatgttggttgaaaaagagtggctctcttttggtcacaaattcagtcagaggagcagcttgaccctcaactgtcaggggagtggttttgctccagtcttcttacagttcttagactgtgtacaccaggttcacaaccagtatccaactgagtttgaattcaatctctattacttaaagttcttggctttccactatgtgtctaatcgctttaaaacatttctcctggattcagactatgaaagattagagcacggaactttatttgatgataaaggagaaaagcatgccaaaaaaggagtctgtatttgggaatgtattgacagaatgcacaagaggagtcccattttctttaattatttatattcaccattggaaatagaggctctaaagcccaatgtaaacgtctctagcctcaagaagtgggattactacatagaagagaccctgtccacaggcccttcctatgactggatgatgctaacccccaagcacttcccctccgaagactctgacctggctggagaagctgggccacggagccagaggagaacagtgtggccatgctatgatgatgtcagctgtactcagcctgatgctctcaccagccttttcagtgaaattgaaaaattggagcacaaattgaaccaagcccctgagaagtggcagcagctgtgggaaagggtaaccgtggaccttaaagaagaaccaagaacagatcgctcccaaagacacctgtcgagatccccaggaattgtgtctaccaacctaccttcctatcagaagaggtctctgctacatctcccagacagcagcatgggggaggaacagaattccagcatctccccatccaatggagtggagcgaagagcagccacgctctatagccagtatacatccaagaatgatgaaaacaggtcctttgagggaacactttataaaagaggggctttgctgaaaggttggaagccccgttggtttgttttggatgtaacaaaacatcagctgcgctactatgactcaggtgaggacacaagctgtaaaggccacattgatctggctgaagtagaaatggtcatccctgctggccccagcatgggagccccaaagcacacaagtgacaaggctttctttgatctcaagaccagcaaacgtgtgtataacttctgcgcccaggatggacagagtgcccagcaatggatggacaagatccagagttgtatctctgatgcctgatgcccatggtcaacccacgcagaagaaacagaagaactcatgctgccagatagatagaaaaagaagcatggatccttgaggagctgacaacaagttatcccagggcctgaggttctcctgcccagtcccctcttgcaggggttgctatatctacttaacctgaataggtgtttcacacaggtctggtcaacagccccatgcactccctgtatcttgcactaaatttttctaacagggtcttagtggttaatgatcagaagatgtctcctgagccaactgtgaacctcacccaggcaaaatggctaccacctacttgggtccttcttcatgaaagctatagatccttttttgttctctgaggtcataatttcctcggagacctgtttaacaagcaaaaatcaaaaccctccaagattgtctcatattctacctggactaggtttcctatgagagacatctacttgtaatgcctgacctttgagatgctcagttctctggtgctgccaaaagatgcttccatggtccgtgctctgccagtggggttcacaacaagagacgtcattgttcagtagcaggcaaagagggagcacacagcattattctgatggaaaaagattatccagggaatggtacaacaatgaccagcccaatgcaggaaaacactacttccaaaacactgaattctctagaccagaggtgctctgaggatccagggccttgtgttcttatgtatcttctgcttcctgacagcttctttttcaaaataacatgcaaaaaaagctgaatgcactaactcacaaaacaaacacttgcactgaattcccaatgaagtgaagatgttggaaagacagaggccagctatttaggaccatacgcacctgtgacaagggctgtgttgaccacagtcacactgtggcatgactggatacccaaactacacttctacacatgaaaagtaagaactgtctttagattttctttactttgataacttgtgattgtttagcttaagacccaagaaatgctgtttgctcatggtaaacagaaacagcatcttcgctacaaccactgacaccagctggcgtcataggtagctagatcattgcatttgttttgaaatgttaatatgttaaatactaaactaatatttcaaaaatgtgtatatatgatttctatatccttgtttttcagatagcctgcttataatttaatataaattaactgatgcattcataagatttcaataatgaaatggttcccttttaaaaaataaaaatactttgtagattaaaaataaatcagaatttcaaatttaaaattgtccacacactaggaaatagaactgtgttaatatataagaaatctggggataattaagaatgaaggacttttctatcatttccattttataaattgccacctgtgaaaatggtttttgcacattatttgtatttttctttgtatatgaaataattttttgtactttgtaaaatatggagcccattgtaccttcagctatttgagactatacacagtgcttcttttgtaactggattactttaactttcgtgaaggcattacattgcctcacattcactaaccaccttgaattaaatttatttcttaagaaaaagcatccctcatttactgtgaactaaagttcattctgtagtgcacagcattcaggagggtaacactcaggattcatacatgggactaaaggttcaagaataaaacaaagcatgacccac

SEQ ID NO: 180766 - DNA, 1188 bp, Homo sapiens
  Payload ID: 15601
  Gene Symbol: SBF2
  Gene Name: SET binding factor 2
  ENST ID: ENST00000420722
  CDS Start-End: 1-1188
ggataaagaggtgcgagccgttttccttagattatttgcacaactcttccaaggatatagatcctgcctgcaacttataagaattcatgcagagccagtaatacatttccacaagttggtagcctttgaagtagagagaattaaagttgaagaaaataacccagtgaagatgataaagcatgtcagggaacttgctgagcaactattcaaaaatgagaatccaaatcctcatatggcattccagaaagttccacggccaacagaaggatcccatttgcgagttcatattcttcctttcccagagattaatgaagcccgggttcaggaattaatacaggaaaatgttgctaagaaccagaatgcacctcctgccacacgaatagaaaagaaatgtgttgtgccagcaggtccacctgttgtttcgataatggacaaggtgacgacagttttcaacagtgcacaaagactagaagttgtcagaaactgtatctcattcatatttgaaaataaaattttggaaactgaaaagacccttcctgctgcactcagagcccttaaaggaaaggcagcaagacagtgtctcactgatgaattgggtttgcatgtccagcaaaaccgggcaatattagaccatcaacagtttgactacataataaggatgatgaattgtactctacaggattgttcaagtttagaagaatacaacattgccgcagcattactccctttgaccagtgctttctataggaaacttgcccctggagtcagccagtttgcttacacgtgtgtacaagaccaccccatttggacaaatcagcaattttgggagacaaccttttacaatgcagtgcaggaacaggttcgctccctttatctctcagccaaggaagacaatcatgccccgcatctgaagcaaaaggataagcttcctgatgaccattatcaggagaagacagcaatggacctggcagctgagcaactacgcctttggcctaccctgagcaagtcaactcagcaagagctagtgcaacatgaggaaagcactgtctttagtcaggccattcactttgcaaacctcatggtgaacctgctagttccactcgacacaagtaaaaacaagctcctaagaacatcagcgccaggtgactgggagagcggaagcaacagcattgtcacaaacagtattgc

SEQ ID NO: 180767 - DNA, 993 bp, Homo sapiens
  Payload ID: 15601
  Gene Symbol: SBF2
  Gene Name: SET binding factor 2
  ENST ID: ENST00000530741
  CDS Start-End: 1-993
actatcagcgtttaggtttaggaaccataagtggcagctcttcccgttcaagacccgagtattttagaattactgcctccaacaggatgtattcactctgccggagctatcctggccttttagtcgtacctcaagctgtacaggacagtagtttaccaagagtagctcgctgctatcgacacaatcgcctgcctgttgtatgttggaagaactcaagaagtggtactctgctcctccgatctggaggattccatgggaagggagtcgttggtcttttcaaatctcagaactcccctcaggccgctcctacctcctctttagaatcttccagtagcatagaacaagagaaatacttgcaagccttactgaatgctgtttctgtccatcagaaactcagaggcaacagcactcttactgtcaggccagcctttgctctatctccagggactgaaaggaggacttcaagaatgtccactgtgcttaagcaggtagtgccaggacatttggatgtaaacccatccaatagctttgctcaaggaggtgtgtgggcaagtcttcgctctagcactcgcttgatcagctctccaacatccttcattgatgttggcgcccggctggcaggcaaggatcactcggcctccttcagtaacagcagctacctacaaaaccagctcttgaaacggcaagcagccctttacatatttggtgaaaagtcgcaactaaggaacttcaaggtagaatttgctttaaattgtgagtttgttcctgttgaatttcatgaaatccggcaagtgaaagccagttttaagaagctgatgagggcttgtatcccaagcaccatccctactgactcagaagtgaccttcctgaaagcgctgggagattctgagtggttcccacagcttcacaggataatgcagctggctgtggttgtatcagaagtacttgagaatggttcctcagttttggtctgtttggaggaaggctgggaca

SEQ ID NO: 180768 - DNA, 587 bp, Homo sapiens
  Payload ID: 15601
  Gene Symbol: SBF2
  Gene Name: SET binding factor 2
  ENST ID: ENST00000532095
  CDS Start-End: 1-399
ggagaagctgggccacggagccagaggagaacagtgtggccatgctatgatgatgtcagctgtactcagcctgatgctctcaccagccttttcagtgaaattgaaaaattggagcacaaattgaaccaagcccctgagaagtggcagcagctgtgggaaagggtaaccgtggaccttaaagaagaaccaagaacagatcgctcccaaagacacctgtcgagatccccaggaattgtgtctaccaacctaccttcctatcagaagaggtctctgctacatctcccagacagcagcatgggggaggaacagaattccagcatctccccatccaatggagtggagcgaagagcagccacgctctatagccagtatacatccaagaatgatgaaaacaggtgacatgctgaaccctgctcgctgtgctgaagacttccccacagcacctgaggctaaaccacaggtccctcaataagctaggcctgtgcagtacagccttttataaacttgaaatggatttgctttaatttttgtaatgttttagatgtttctttgaaaagacaaaaaacaaaaattacaactaaaaataa

SEQ ID NO: 180769 - DNA, 7160 bp, Homo sapiens
  Payload ID: 15601
  Gene Symbol: SBF2
  Gene Name: SET binding factor 2
  ENST ID: ENST00000617179
  CDS Start-End: 1-5409
ttttgtcagcctggcgggtggcagctgtccagagagaggaagcagccaacgttctttgtggttgtcctgacagacattgactcagatcgacattactgctcatgcctaaccttctatgaggcagagatcaatcttcagggaacaaagaaggaagagattgaaggtgaagcaaaagtgtctggtttaattcagcctgcagaagtgtttgctcccaaaagcctggtgttggtatccagattatattatccagaaatttttagggcttgcctgggtttgatctataccgtgtatgtggacagcctgaatgtctccttggaaagtctaattgcaaacctttgtgcctgccttgtcccagcggctggagggtctcagaagctgttttctttgggtgcaggagatagacagttgatccagactcctttacatgatagtcttcctatcacgggcactagtgtggctctcctgttccagcaattgggaattcaaaatgtcctcagcctcttttgtgcagtcctcacagaaaataaggttctcttccattctgcaagtttccagagacttagtgatgcttgtagagccctggaatctttaatgtttcctcttaaatatagttatccttatatccctattctcccggctcagctactggaagttctaagttccccaacgcctttcattattggagtacattctgtctttaaaactgatgtccatgaacttttagatgtaatcatagcagatttggatggaggcactattaaaattcccgaatgtattcacctctcttccctcccagaaccacttctacatcagactcaatcagctctttctttgattttacacccagatttggaagtagcagatcatgcttttcctcctccacgaacagctttatcccactcaaaaatgctggataaagaggtgcgagccgttttccttagattatttgcacaactcttccaaggatatagatcctgcctgcaacttataagaattcatgcagagccagtaatacatttccacaagacagcattcttggggcagcgtggtttggtcgagaatgatttcctcactaaagtactcagtggaatggcatttgcaggttttgtttcagaaagaggtcctccttatagatcttgtgatctctttgatgagttggtagcctttgaagtagagagaattaaagttgaagaaaataacccagtgaagatgataaagcatgtcagggaacttgctgagcaactattcaaaaatgagaatccaaatcctcatatggcattccagaaagttccacggccaacagaaggatcccatttgcgagttcatattcttcctttcccagagattaatgaagcccgggttcaggaattaatacaggaaaatgttgctaagaaccagaatgcacctcctgccacacgaatagaaaagaaatgtgttgtgccagcaggtccacctgttgtttcgataatggacaaggtgacgacagttttcaacagtgcacaaagactagaagttgtcagaaactgtatctcattcatatttgaaaataaaattttggaaactgaaaagacccttcctgctgcactcagagcccttaaaggaaaggcagcaagacagtgtctcactgatgaattgggtttgcatgtccagcaaaaccgggcaatattagaccatcaacagtttgactacataataaggatgatgaattgtactctacaggattgttcaagtttagaagaatacaacattgccgcagcattactccctttgaccagtgctttctataggaaacttgcccctggagtcagccagtttgcttacacgtgtgtacaagaccaccccatttggacaaatcagcaattttgggagacaaccttttacaatgcagtgcaggaacaggttcgctccctttatctctcagccaaggaagacaatcatgccccgcatctgaagcaaaaggataagcttcctgatgaccattatcaggagaagacagcaatggacctggcagctgagcaactacgcctttggcctaccctgagcaagtcaactcagcaagagctagtgcaacatgaggaaagcactgtctttagtcaggccattcactttgcaaacctcatggtgaacctgctagttccactcgacacaagtaaaaacaagctcctaagaacatcagcgccaggtgactgggagagcggaagcaacagcattgtcacaaacagtattgcaggaagtgtagctgagagctatgatacagagagtgggtttgaagattcagagaatactgacattgccaattctgttgtgcggttcattacccgatttattgacaaagtttgtacagagagtggagttactcaggatcacatcaagagccttcattgcatgataccaggaattgtagctatgcacattgagaccctagaagcagtacatcgagaaagcagaagacttccgcctattcagaagcccaagattcttagacctgctctgctgccaggagaagaaattgtctgtgagggtcttcgagtcttgctggatcctgatggaagagaagaagctactggaggtcttcttggaggccctcagctcctgccagcagaaggagccttgttcctcaccacatacagaattctcttcagaggaacaccccatgatcagttagtgggtgagcagacagttgtgcggagctttcccattgcctccatcaccaaggagaagaagattacaatgcagaaccagctacagcagaacatgcaagaaggactgcagatcacatcagcatcttttcagttgattaaggtagcatttgatgaagaagtcagtccagaagtagtagagatctttaagaaacagctgatgaagttccgttatcctcagtccattttcagtacctttgcttttgctgctggacaaactaccccacaaataattttaccaaaacagaaggaaaagaacacttcttttcgtaccttctcaaaaacaattgtgaaaggtgccaaaagggcagggaaaatgacaattgggcggcaatatttactgaagaagaagacagggacaattgtggaagaaagagtaaatcgtcctggatggaatgaagatgatgatgtatctgtttcagatgagagtgagctccccacaagtaccaccctgaaggcctccgagaagtctacaatggaacagttggtggaaaaagcttgtttcagagactatcagcgtttaggtttaggaaccataagtggcagctcttcccgttcaagacccgagtattttagaattactgcctccaacaggatgtattcactctgccggagctatcctggccttttagtcgtacctcaagctgtacaggacagtagtttaccaagagtagctcgctgctatcgacacaatcgcctgcctgttgtatgttggaagaactcaagaagtggtactctgctcctccgatctggaggattccatgggaagggagtcgttggtcttttcaaatctcagaactcccctcaggccgctcctacctcctctttagaatcttccagtagcatagaacaagagaaatacttgcaagccttactgaatgctgtttctgtccatcagaaactcagaggcaacagcactcttactgtcaggccagcctttgctctatctccaggtgtgtgggcaagtcttcgctctagcactcgcttgatcagctctccaacatccttcattgatgttggcgcccggctggcaggcaaggatcactcggcctccttcagtaacagcagctacctacaaaaccagctcttgaaacggcaagcagccctttacatatttggtgaaaagtcgcaactaaggaacttcaaggtagaatttgctttaaattgtgagtttgttcctgttgaatttcatgaaatccggcaagtgaaagccagttttaagaagctgatgagggcttgtatcccaagcaccatccctactgactcagaagtgaccttcctgaaagcgctgggagattctgagtggttcccacagcttcacaggataatgcagctggctgtggttgtatcagaagtacttgagaatggttcctcagttttggtctgtttggaggaaggctgggacatcactgcacaagtgacatccctggttcagttactcagtgatcccttttataggacacttgaaggcttccagatgttggttgaaaaagagtggctctcttttggtcacaaattcagtcagaggagcagcttgaccctcaactgtcaggggagtggttttgctccagtcttcttacagttcttagactgtgtacaccaggttcacaaccagtatccaactgagtttgaattcaatctctattacttaaagttcttggctttccactatgtgtctaatcgctttaaaacatttctcctggattcagactatgaaagattagagcacggaactttatttgatgataaaggagaaaagcatgccaaaaaaggagtctgtatttgggaatgtattgacagaatgcacaagaggagtcccattttctttaattatttatattcaccattggaaatagaggctctaaagcccaatgtaaacgtctctagcctcaagaagtgggattactacatagaagagaccctgtccacaggcccttcctatgactggatgatgctaacccccaagcacttcccctccgaagactctgacctggctggagaagctgggccacggagccagaggagaacagtgtggccatgctatgatgatgtcagctgtactcagcctgatgctctcaccagccttttcagtgaaattgaaaaattggagcacaaattgaaccaagcccctgagaagtggcagcagctgtgggaaagggtaaccgtggaccttaaagaagaaccaagaacagatcgctcccaaagacacctgtcgagatccccaggaattgtgtctaccaacctaccttcctatcagaagaggtctctgctacatctcccagacagcagcatgggggaggaacagaattccagcatctccccatccaatggagtggagcgaagagcagccacgctctatagccagtatacatccaagaatgatgaaaacaggtcctttgagggaacactttataaaagaggggctttgctgaaaggttggaagccccgttggtttgttttggatgtaacaaaacatcagctgcgctactatgactcaggtgaggacacaagctgtaaaggccacattgatctggctgaagtagaaatggtcatccctgctggccccagcatgggagccccaaagcacacaagtgacaaggctttctttgatctcaagaccagcaaacgtgtgtataacttctgcgcccaggatggacagagtgcccagcaatggatggacaagatccagagttgtatctctgatgcctgatgcccatggtcaacccacgcagaagaaacagaagaactcatgctgccagatagatagaaaaagaagcatggatccttgaggagctgacaacaagttatcccagggcctgaggttctcctgcccagtcccctcttgcaggggttgctatatctacttaacctgaataggtgtttcacacaggtctggtcaacagccccatgcactccctgtatcttgcactaaatttttctaacagggtcttagtggttaatgatcagaagatgtctcctgagccaactgtgaacctcacccaggcaaaatggctaccacctacttgggtccttcttcatgaaagctatagatccttttttgttctctgaggtcataatttcctcggagacctgtttaacaagcaaaaatcaaaaccctccaagattgtctcatattctacctggactaggtttcctatgagagacatctacttgtaatgcctgacctttgagatgctcagttctctggtgctgccaaaagatgcttccatggtccgtgctctgccagtggggttcacaacaagagacgtcattgttcagtagcaggcaaagagggagcacacagcattattctgatggaaaaagattatccagggaatggtacaacaatgaccagcccaatgcaggaaaacactacttccaaaacactgaattctctagaccagaggtgctctgaggatccagggccttgtgttcttatgtatcttctgcttcctgacagcttctttttcaaaataacatgcaaaaaaagctgaatgcactaactcacaaaacaaacacttgcactgaattcccaatgaagtgaagatgttggaaagacagaggccagctatttaggaccatacgcacctgtgacaagggctgtgttgaccacagtcacactgtggcatgactggatacccaaactacacttctacacatgaaaagtaagaactgtctttagattttctttactttgataacttgtgattgtttagcttaagacccaagaaatgctgtttgctcatggtaaacagaaacagcatcttcgctacaaccactgacaccagctggcgtcataggtagctagatcattgcatttgttttgaaatgttaatatgttaaatactaaactaatatttcaaaaatgtgtatatatgatttctatatccttgtttttcagatagcctgcttataatttaatataaattaactgatgcattcataagatttcaataatgaaatggttcccttttaaaaaataaaaatactttgtagattaaaaataaatcagaatttcaaatttaaaattgtccacacactaggaaatagaactgtgttaatatataagaaatctggggataattaagaatgaaggacttttctatcatttccattttataaattgccacctgtgaaaatggtttttgcacattatttgtatttttctttgtatatgaaataattttttgtactttgtaaaatatggagcccattgtaccttcagctatttgagactatacacagtgcttcttttgtaactggattactttaactttcgtgaaggcattacattgcctcacattcactaaccaccttgaattaaatttatttcttaagaaaaagcatccctcatttactgtgaactaaagttcattctgtagtgcacagcattcaggagggtaacactcaggattcatacatgggactaaaggttcaagaataaaacaaagcatgacccac

SEQ ID NO: 180770 - DNA, 9899 bp, Homo sapiens
  Payload ID: 15602
  Gene Symbol: SETBP1
  Gene Name: SET binding protein 1
  Uniprot ID: Q9Y6X0
  ENST ID: ENST00000282030
  CDS Start-End: 297-5087
ggttaagtggagctagagagctacattgtaacctagttggatttttttggggggggaatgtatcagaatctaacgtgtcgttaatagaaagaagaacaggcaagaagtggtccagccggcgaagttgcagatctgatctcttctgaacacctcatcgtgtctccatccctgggaatctgaccctagcaactggaccactttgttcttggaattttgggtgtcctcttttctcacctttcccttttcccttttccccttccccctcctgagaactccggaagactgtagagattgtcatggagtccagggaaaccttaagcagctcccggcaaagagggggcgagtcagacttcctgccggtctcctcagccaagcccccagctgctcctggctgtgcaggagaacctttgctctccactccaggacctgggaaggggatcccggtgggcggagagcgcatggagccagaggaggaggatgaactaggctcagggcgggatgtggattccaactccaacgcggacagtgagaaatgggtggcaggagatggtttggaagagcaggaattttctatcaaggaggcaaacttcacagagggaagtctgaagctaaagattcagaccacaaagcgggctaagaaacccccaaagaatttggagaactatatatgtccacctgagatcaagatcaccatcaagcagtctggggaccagaaggtgtcccgtgctggaaaaaatagcaaagccacgaaggaggaagaaagaagccactccaaaaagaagctcctcacagccagtgaccttgcagccagtgacctcaaaggatttcagccacaggcttacgagaggccccagaaacattcaactctccattatgacacgggcctcccacaggacttcaccggtgacaccttaaaaccaaagcaccagcaaaaaagcagcagccagaaccacatggactggtccaccaactctgacagcggacccgtcactcagaattgcttcatcagtccagagtctggcagagaaactgcaagcaccagcaagatccccgctcttgagcccgtggcttcctttgcaaaggcccagggtaagaaaggcagtgcagggaacacgtggagtcagttgtctaacaataacaaagatctgctcttgggaggtgtggctccatccccaagcagccacagctcaccagccccacccagcagctctgctgagtgcaacgggcttcagcccttggtggatcaagatggaggaggtacaaaggagcccccagaaccacctacggtgggcagcaagaaaaagtccagtaaaaaagatgtgataagtcagaccataccaaacccagacctggattgggtcaagaatgcccagaaagcatttgacaatacagaagggaaaagggaaggttattccgcagatagtgcccaagaggcatcaccagccaggcagaacgtgagttctgccagtaatcctgaaaatgactcaagtcatgtccggattactatccccatcaaggcaccctctctggatccaaccaaccataagaggaaaaaaagacagtccattaaagcggtggtggaaaagatcatgccagagaaagccttggcttctggaatcaccatgagcagtgaagtagttaacaggatactttccaactctgaggggaataagaaggatccccgtgtccctaagttgagtaaaatgatagagaatgagtccccctcagttggccttgaaactggtggaaatgctgagaaagttatcccaggaggtgtgtctaagccgcggaagccacccatggtcatgacacctccaacgtgcacagatcactctccatccagaaagctgccagaaatccagcatccaaaatttgctgcaaaacgaaggtggacttgcagcaaaccaaaacctagcaccatgcttcgagaggcagttatggccacctctgataaactgatgctggagcccccgtctgcatatcccatcaccccatccagccctctctacaccaacacagacagtcttactgtgatcactccagtcaaaaagaagcggggacgaccaaagaagcagcctttgctcacagtcgagacgattcatgagggaacttccaccagccccgtcagtcccatcagccgagagtttcctggcactaagaaaagaaagcgacgacgcaatttagcgaagttggcccagctagtgccgggagaggacaaacccatgagcgagatgaaatttcacaagaaagttggaaagctcggcgtgttggataagaagaccatcaaaactatcaataagatgaagacactcaagaggaaaaacatcttgaatcagatcttgtcctgttccagcagcgttgctctgaaggcaaaagctcccccagagaccagccctggggcagcagccattgaaagcaaactgggcaagcagattaatgtcagcaagaggggaaccatctacattggcaagaagcggggcaggaagccaagagcagagctgccacccccatccgaagaacccaaaacagccatcaagcaccccaggcctgtttctagccagccggatgttccagccgtgccttccaactttcagtcacttgtggcgtcttcaccagcagctatgcacccactttcaacacagttaggtgggtccaatggcaacctgagccctgccagcactgaaaccaatttttcagagttgaaaactatgccaaatctccagcccatcagtgctcttccaaccaaaacccaaaagggaatacacagtggaacctggaagctgtctccacccagactgatggccaactccccttcacacctgtgcgagattggctccctaaaggaaatcacgctgtcccctgtgagcgagtcccacagtgaggagacgatccccagcgacagcggcattgggacagacaacaacagcacttctgaccaagcggagaagagctcagaatcccgaaggaggtactcttttgatttctgctccctggacaacccggaggccattccgtccgacaccagcacaaagaaccggcatggccaccggcaaaagcatctcattgtggacaactttctggcccacgaaagcctcaagaagccaaagcacaagaggaaacggaaaagcctgcaaaaccgcgatgacctccagtttctggcagacctggaggagctaatcaccaagttccaagtgttcagaatctcccaccggagttacaccttctaccacgagaatccatatcccagcatttttcggattaattttgatcactattacccggtgccatatatccagtatgacccgttgctctatcttcgtaggacttcagacttgaagtcaaagaagaagcgtggtaggcctgcaaaaaccaatgacaccatgacaaaggtgccttttttacaagggttcagctaccctattcccagtggaagttactatgcaccctatggaatgccttacacatcaatgcctatgatgaaccttggttattacggtcagtacccagctcctttgtacctatcgcacacgcttggagcagcttccccattcatgaggccaacagtgccaccacctcagttccacacaaactcccacgtaaagatgtccggtgcagctaagcataaagccaagcatggagtacacctgcagggacctgttagcatgggccttggtgacatgcagccttctctgaaccctcccaaggtaggcagtgccagtctgtccagtggtcggctccataagaggaaacacaaacacaagcataagcacaaggaagaccggatcctagggacccatgacaacctgagtggtctttttgcaggcaaagccacaggcttctccagccacatcctgagcgagcggctgagtagcgcagacaaagagctcccgctggtgagtgagaagaacaagcataaggagaaacagaagcaccagcacagcgaagccggccacaaagcttctaagaacaactttgaggtggacaccctgtctacactgtcactttccgacgcccagcattggacacaggccaaggaaaaaggagacttgagcagtgagcctgtggactcatgcacgaaaagatactctggcagtggcggggatggtggcagcacgagatcagagaacctggacgtgttcagtgaaatgaacccttcgaatgacaagtgggacagtgacgtgagtgggagtaaaaggaggagctatgaaggctttggaacgtacagggaaaaggacatccaagccttcaagatgaaccgcaaggagagaagttcttatgactcctccatgtctccagggatgccaagtccccacttaaaagtggaccagacagcagtgcatagtaagaacgaaggctcagtgcccaccatgatgaccaggaagaagccagccgcagttgacagtgttacaattccaccagccccagtgttatctctccttgctgcatctgcagcaacgtcggatgcagtcggctcctccctgaagaagaggttcaagcggcgggagatcgaagccatccagtgcgaagtgcggaagatgtgcaactacaccaagatcctgtccaccaagaagaacctggaccacgtgaacaagatcctgaaggccaagcggctgcagagacaatcaaaaacaggcaacaacttcgtgaagaagaggcgcgggcgtcccaggaagcagcccacccagttcgatgaggactccagagaccaaatgccggtgctggaaaaatgcatcgacctgcccagcaaaagaggccagaagcccagcctgagcccgctggtgctggagcccgccgccagccaagacaccatcatggccaccatcgaggcggtcatccacatggcccgggaggcgccgcccctgcccccgccaccgccgccgcccctgccgccaccgccgccaccacccctgcccccgccaccccctctacccaagaccccccgaggcggaaagaggaaacacaaaccgcaggcccccgctcagcccccacagcagtcgcccccgcagcagccccttccccaggaagaggaggtgaaagccaaaaggcagaggaagtcccgagggagtgagagcgaggtccttccctagggcgggtctgggcgtctgcacctggggcctagggaactgacacgtgggaagcgcagtgagccggggcgggggcggaatcccccgctgcagggacacccacgcccttctctccagaagccgggcaggcagaatccggccagacgacggggctgagccatcaggagctcttgggaaagcaaagcagggagacaccttcagaagaagcttgtctgagcttcaccgcagctcccaccacgcggcgcttcagtacggctggatcctccgcaggcgagcggaaggcccccaggaggagcaggctggtggcactctcctgacctcacgctgccaaggtgcgccctcgactcccgatttcatttgctggccaggaaaatcgaaagggaaacaccctcaattaggaaacattccaaggggagaaaagctgcaaattgctcaactggcattgctgtaacccgttccatttaattggtttttatttcttttgattttcaagctctgctaagctttggggtaccaacgtcatcttcaggtgacctgaatctttcccttaaccgtacagtttctcgatggaattgtgtgatcagaaggtggaattctagtgataggcgacctcagacccgcattcatgttctgtgtgcctcttctattgcacatacactgatttttagcattgtctattcctatttttcctttgcccattgtacttccatatatcttttcattaacttacttgctgccttttttttttcttggtacacatttaaataaagtaatccttaacctgtgctgtaaagttcacccttggcatgctgttccaagaacctgggtttgaatcccaatcgttgtgaaacatactcagtattgataaaacctttttaataagtgatgcagagcagccaaggatatgttgacccagatgtcaaccaggctatttttatacttaaaacatgtcagcagagcataggcagaataaaatggtttaaataccccacagcaaatagagtaactgacaaaccaccaaaaactgaaaccccagacccaccagaaagacaagtgtctagcaatgccttggtacctgatctttttcattcaaataattgtcataggttgttcaaaaaaaaaaaaaaaaaggaaacaaaaacacaatagaagtccattatcccttgataattatttcttaaaagcaaatgggagtaagtgttcttatctggaaaaataaataaataaaatgctcaaagggtatcaccacttcaattttatcaagccaccttggacaaagtatccaaattgtggttgccttaataaactaaaacattattgtacataatgtaattataaatctatcagtctgcatggatgcaaactgtgtgtgacaaatcgtcttttaaatggtcaatttcagctgtacatttctcatccaagttgtactctagccattggtttagcgtggacagatactccatctctattatccatttccacagcccaaataaaatatgttaagcaggctcagaatgaatatgaagaattccatttccgtagatgttttctaaaagtcagattgtggaaatttcaaataagtattttcaatttcctccctcactccctcttaccttccccaagacatcaaacacctggcatggtagattatagaaagagacactgagagagagaattaaattttctaatgggaattagaatatctggtttacctccaaattaagtttctttacaggaagttgggaccagctggaaattgtattatcatttcggaacacaatattacttccttagagagagatggatttttgttggcaacataaaagaataagtgatggggtatctatgtgagtaaatttttaaattccaagttaatatgcttgcaaacattactgctgcgttatggcaccaagagttggttgaaattacccacgtagtcatactcctgtgctctgtcaccatggacttcacatcatttgctgcccactagttcaatcgcatttaatcctagcaatatgtaagtttaaaggactgcattcccctctactttaaagcttatatcctagatactcagtttgtgaccttggttgacctttggcatttcacgcaagttgaacagcaaaatcaaagcagccatttttaattcgtcattcccaagccctatctgagtggttccaaagtcacctgagaggaaggtttaaattagtccctctcaccccaccattgctataaaacagcaacgttttcattccaattcagccataaagaggtttctcttcttactgggttttgaaatcatttccttttttctttcgtttgcccttcttccttcctgtgttgtactatctctccaaccacgtctataagcagactcaatcttcttgcagaggaagatgagctggcactctgcaaacttctttaataaggacccaaagtttacttgacattaacctctagtaggtgagaaattccaaaaaagctttggggtacattagaatttccaaagctctgaaagatatttcaggagatttaacagcagagttgcaacttacacgtgaattctggtctatagtggtcatgtgagttaaattcgaatcctctacttgtatgaccctaggaatagattggaatactgcagaggaccaaagctgaggcatgctaaacagctgcttggaggtggaagcaagttcagtcacctactcagcttcctctctccaccacccagttcctccctcagtatcacattatttttttcttctgcttttcattaacctaactcatctcatcagtacaaccattttcttattctctaactacccccaattcctttagcctctccccacctgtccaaactcagctcagccgtgggccaatgcagcttacagacggttgcagagctaggaagaaaacccagctctcccaaccctgatcgtggaggtctctggccccccaacactgccttctgggggctgcattttttttttttttttgagaagaggtcttttgggatgcatggtgctccacatacagcttcacaaaatatttcattataagagaaaccccttgatttttatttctttttcttttgttttctggattacctgccttcagtaagcagatgcagacccacttgtaaggagtctggttagtgatgagaaaaggatgaaatctagatacaaaagtcaccttgaaggtgatgatggatctttaatccacttgactaagtgtctggaagagctacttgctcttccacccctcatctcaaatgagaggagcagaagtttaacttcctcaaatagcccagctctggctaaaacccaaagaagaaaggtcaaaggaagggaaagcatgtcaggggctggtttgtgacttggcaggaccaggaaacagcagccactgacagcccagagaaggtgactaagggctggcagaagattagaatgttaatttggctgctgtccggactaggaggccatgttcaatggcagtcagaatttgtgttctgcgcattgctgggtctataaatatgataagcaagtggtgacagaattatagtataaggtgatgtactacatgcagatcataaaggctttggttttaagacttaagtagaaaatccctctcctagcttattacccaacaatattcagataatgagcttttggagaatatctttttcctatcactagaaagatttacctgggaactgtctaaagtctacacacatatttccaaagcctttaaataccaactgcagcatggagagagaggggtggcagaagctgaaatgcctcaaaagccatttaagtgttacgttgcaggattttcagtccttctcgttatgtaaaagtagataaatatagacgttattctcaacactaccctatagtatcacagtggtccaaatgccagagcttacagataatgtcatcacagtgcctagaaactcgaactgtaatatatcgtagcattttcttggtgtttcttaaagtttctttccacaatacaaggtcctctctgcctcttgtttcttggagagttcaccccactgatgagtcttccttccctgttggactcagtcatttggggaacagtcttagaagcacatatcaaccaaggaagaaacttcctggatatctattgcccacttgcccaggtctaataaacactaaaggggggaaattgaaaggagctgccaactggtcaacgtggaagggcggttccaccctagattggtgtctttctttttcttcctttttttaaaaaaaatctatttcttaaataataataaatgcacatgatgtgttaaatatgtacatatatatttcaaaagaaaaaatggggcacaagattgtcttacaagtcgtgctggctaatttttagtttgtattcataagtggtttttaaaagccttttttaaagtgtaatttgcatgttctactttgattgtatgtaaacatattttagaacaaaaaatgtatttgtattttattgaatatagaggcaagaaaattgtacattgtttgaaatgttctttttgtaacagtttttattcataaagcatttttgtacatttaaaatgaacatggacttgctgttatttgaggcgtagatacatctagcatgcttactgtcatgctcctccatggtcttagatgttgggttttaaacatttttttctaaaagaaagctcagtcttttccgctaccagatcaggttagcacagtatagagcacttaactattaaaaaaaaaaagttaatcctattcatatgttattcattgtgtgaaattaaagacattcaattcagtctaa

SEQ ID NO: 180771 - DNA, 1785 bp, Homo sapiens
  Payload ID: 15602
  Gene Symbol: SETBP1
  Gene Name: SET binding protein 1
  Uniprot ID: Q9Y6X0
  ENST ID: ENST00000426838
  CDS Start-End: 396-1124
aagcgcggggccggccggggcgcccgccgctcgccgccgcctccgcgcgcccgggggccccggcgccccccgagctagggcggccagctcgcggctcgccgtttgacagatgctcatcgccatggagttgccgcagcagcacctttgggggctcgggcgagcgacgggagccgggatctgagcgagcgccggggccagcggagccggagccgccgggacatggttgcagatctgatctcttctgaacacctcatcgtgtctccatccctgggaatctgaccctagcaactggaccactttgttcttggaattttgggtgtcctcttttctcacctttcccttttcccttttccccttccccctcctgagaactccggaagactgtagagattgtcatggagtccagggaaaccttaagcagctcccggcaaagagggggcgagtcagacttcctgccggtctcctcagccaagcccccagctgctcctggctgtgcaggagaacctttgctctccactccaggacctgggaaggggatcccggtgggcggagagcgcatggagccagaggaggaggatgaactaggctcagggcgggatgtggattccaactccaacgcggacagtgagaaatgggtggcaggagatggtttggaagagcaggaattttctatcaaggaggcaaacttcacagagggaagtctgaagctaaagattcagaccacaaagcgggctaagaaacccccaaagaatttggagaactatatatgtccacctgagatcaagatcaccatcaagcagtctggggaccagaaggtgtcccgtgctggaaaaaatagcaaagccacgaaggaggaagaaagaagccactccaaaaagaagctcctcacagccagtgaccttgcagccagtgacctcaaaggatttcagccacagattaaagactccagtaaggaggaagtctggaagagaagaggaggccaaggcatcccattcaaaaagcaattcctgtcccaggaacgtgccatgtgcttctcatgcccccggaacccattccccgcaaaacccggttctctcactcttccttttcacagtgaacctgcagtctgggcacaagaagtataacttcgcatggattctgcaaagcccacacctgtggtcattccctgttctttccattcaacaatggagacttgcccaagattgtaaactagtgagtgacagcatttgggcttatgatcttctctgcctgctagctagacattctctctgggtctaaaagataatccaaaaagatccagcttcacaatgctgccctgaagagataatgcattaggcggccctgatgcagcattcactgtcttccagggcaggcttgatcccatgagtttgcttgctcagacgatcacttaggaaacacatgcctttactctctaggccttttttctagcttgccttgtatcagctatgccatggatctttgctctcttaccccatgctatacagagtatgggctccaagccacagctggcctgtcaagtgtgtgtcgctggtccaccatgggatacatttagaaacttttatagcaatttgacatttttgtgatatccaagcatgtgattgttttcctacggatttgtcttatagtattttaccaaagtttccacacaaaaagtatggattaaggacaaagtatctggtccttcatcaaagatcgtttgataagctctgttctagttaaccaacactgagctttcctagttttaataaaagagtaggatttgga

SEQ ID NO: 180772 - DNA, 762 bp, Homo sapiens
  Payload ID: 15602
  Gene Symbol: SETBP1
  Gene Name: SET binding protein 1
  ENST ID: ENST00000591940
  CDS Start-End: 352-762
gcgtgagcctgtgcgtgtgctcacacgcgcattttggcagggctgaatcacaagaggactcgcagttgatacccagactcaccaaaaaattgagctgtgaatttggggaggcaggtacgtgctgggaaggaagctaaaggagaacaacagctttgtgtgctgatgaagtaaacagacagttgcagatctgatctcttctgaacacctcatcgtgtctccatccctgggaatctgaccctagcaactggaccactttgttcttggaattttgggtgtcctcttttctcacctttcccttttcccttttccccttccccctcctgagaactccggaagactgtagagattgtcatggagtccagggaaaccttaagcagctcccggcaaagagggggcgagtcagacttcctgccggtctcctcagccaagcccccagctgctcctggctgtgcaggagaacctttgctctccactccaggacctgggaaggggatcccggtgggcggagagcgcatggagccagaggaggaggatgaactaggctcagggcgggatgtggattccaactccaacgcggacagtgagaaatgggtggcaggagatggtttggaagagcaggaattttctatcaaggaggcaaacttcacagagggaagtctgaagctaaagattcagaccacaaagcgggctaagaaacccccaaagaatttggagaactatatatgtccacctgagatcaagatcaccatcaagcagtctggg

SEQ ID NO: 180773 - DNA, 701 bp, Homo sapiens
  Payload ID: 15603
  Gene Symbol: SETMAR
  Gene Name: SET domain and mariner transposase fusion gene
  ENST ID: ENST00000358950
  CDS Start-End: 65-701
ctcccagtcgcgaccttttgtcttctcttacagcgcacccgttggtgcgcgggaataggtgtgcatgccccggcctgggcctttttctgttgacccacggcatcaccttagcaagggtgttgtccttttcagtccattccctgaagcgcagaaccggaggccttgtgagaacctggctttttgtccagtcctgtcctcagaactcaaggaggcatcacggggggagtcatttacctccctggtctcaggtgtctctcacagttctctgtactgccccgtagaaaagtcgaacatcagttgtggaaatgagaaggaacccagcatgtgtggctcagccccttctgtgttcccctcctgcaagcgattgacccttgagactatgaaaatgatgttagacaaaaagcaaattcgagcaattttcttattcgagttcaaaatgggtcgtaaagcagcagaaacaactcgcaacatcaacaatgcatttggcccaggaactgctaacgaacgtacagtgcagtggtggttcaagaagttttgcaaaggagatgagagccttgaagatgaggagcgtagtggccggccatcagaagttgacaacgaccagttgagagcaatcatcgaagctgatccccttacaactacacgagaagttgctgaagaactcaatgtcaaccattctacggtcgttcgacatttgaagc

SEQ ID NO: 180774 - DNA, 2443 bp, Homo sapiens
  Payload ID: 15603
  Gene Symbol: SETMAR
  Gene Name: SET domain and mariner transposase fusion gene
  Uniprot ID: Q53H47
  ENST ID: ENST00000358065
  CDS Start-End: 68-2122
acaagtcccagcatccaccgcgcggcccaggactgtcagggtagtgggcgttgcgtgaggcgggtaaatgttcgcggaagcggcaaagacgacacggccttgtgggatggcggagtttaaggagaagcctgaggccccgactgagcagctggatgtcgcgtgcggccaggaaaacttgccggtgggcgcgtggcccccgggggccgcgccggcgcccttccagtacactcctgatcatgtagttggacctggagcagacattgatcccactcaaataacctttcccggatgcatttgtgtcaaaactccctgcctccctggcacttgctcctgtctccgccatggagagaactatgatgataactcatgccttagagatataggatctggaggaaagtatgcagagcctgtttttgaatgcaatgtcctgtgccgatgcagtgaccactgcagaaacagagtggtccagaaaggtctacagttccacttccaagtgttcaagacgcataaaaaaggctggggacttcgtaccttggaatttataccgaaaggaaggtttgtctgtgaatatgctggtgaggttttaggattctctgaagttcagagaagaattcacttacaaacaaaatccgactccaattacattatagccatcagggaacatgtttataatgggcaggtaatggaaacatttgttgaccctacttatataggaaatattggaagattccttaatcattcttgtgagccaaaccttttgatgattcctgtccgaattgactcaatggtacctaagttggcactttttgcagccaaagatattgtgccagaagaagaactctcttatgattattcaggaagatatcttaatctaacagtcagtgaagacaaagaaaggctagatcatgggaaactaaggaaaccttgttactgtggtgccaaatcatgtactgctttcctgccttttgacagttctctgtactgccccgtagaaaagtcgaacatcagttgtggaaatgagaaggaacccagcatgtgtggctcagccccttctgtgttcccctcctgcaagcgattgacccttgagactatgaaaatgatgttagacaaaaagcaaattcgagcaattttcttattcgagttcaaaatgggtcgtaaagcagcagaaacaactcgcaacatcaacaatgcatttggcccaggaactgctaacgaacgtacagtgcagtggtggttcaagaagttttgcaaaggagatgagagccttgaagatgaggagcgtagtggccggccatcagaagttgacaacgaccagttgagagcaatcatcgaagctgatccccttacaactacacgagaagttgctgaagaactcaatgtcaaccattctacggtcgttcgacatttgaagcaaattggaaaggtgaaaaagctcgataagtgggtgcctcatgagctgactgaaaatcaaaaaaatcgtcgttttgaagtgtcatcttctcttattctacgcaaccacaacgaaccatttctcgatcggattgtgacgtgtgatgaaaagtggattttatatgacaaccggcgacgatcagctcagtggttggatcaagaagaagctccaaagcacttcccaaagccaatcttgcacccaaaaaaggtcatggtcactatttggtggtctgctgctggtctgatccactacagctttctgaatcccggtgaaaccattacatctgagaagtatgctcaggaaatcgatgagatgaaccaaaaactgcaacgcctgcagctggcattggtcaacagaaagggcccaattcttctccacgacaatgcccgaccgcatgttgcacaacccacacttcaaaagttgaatgaattgggctatgaagttttgcctcatccaccgtattcacctgacctcttgccaaccaactaccacgtctttaagcatctcaacaactttttgcagggaaaacgcttccacaaccagcaggatgcagaaaatgctttccaagagttcgtcgaatcccaaagcacggatttttacgctacaggaataaaccaacttatttctcgttggcaaaaatgtgttgattgtaatggttcctattttgattaataaaaatgcgttgagcctagttataatgatttaaaattcacagtccaaaaccgcagttagttttgcaccaacccaatatcttcatagattgaaatataaattaaaattgcatttgaagtagattccacggactttattaagaatgtagaaatgtggcctggcatggtggcttacaactgtaatcccagcactttgggaggcccaggcgggcagatcacttgagtccaattgttcaggaccagcctgggcaacatagtgagaccctgactctaataaaataattttttaaaaaaagattaaaacatgtaccttgaaaagcat

SEQ ID NO: 180775 - DNA, 1676 bp, Homo sapiens
  Payload ID: 15603
  Gene Symbol: SETMAR
  Gene Name: SET domain and mariner transposase fusion gene
  ENST ID: ENST00000413809
  CDS Start-End: 40-555
aggactgtcagggtagtgggcgttgcgtgaggcgggtaaatgttcgcggaagcggcaaagacgacacggccttgtgggatggcggagtttaaggagaagcctgaggccccgactgagcagctggatgtcgcgtgcggccaggaaaacttgccggtgggcgcgtggcccccgggggccgcgccggcgcccttccagtacactcctgatcatgtagttggacctggagcagacattgatcccactcaaataacctttcccggatgcatttgtgtcaaaactccctgcctccctggcacttgctcctgtctccgccatggagagaactatgatgataactcatgccttagagatataggatctggaggaaagtatgcagagcctgtttttgaatgcaatgtcctgtgccgatgcagtgaccactgcagaaacagagtggtccagaaaggtctacagttccacttccaagtgttcaagacgcataaaaaaggctggggacttcgtaccttggaatttataccgaaaggaagaaaagtcgaacatcagttgtggaaatgagaaggaacccagcatgtgtggctcagccccttctgtgttcccctcctgcaagcgattgacccttgagactatgaaaatgatgttagacaaaaagcaaattcgagcaattttcttattcgagttcaaaatgggtcgtaaagcagcagaaacaactcgcaacatcaacaatgcatttggcccaggaactgctaacgaacgtacagtgcagtggtggttcaagaagttttgcaaaggagatgagagccttgaagatgaggagcgtagtggccggccatcagaagttgacaacgaccagttgagagcaatcatcgaagctgatccccttacaactacacgagaagttgctgaagaactcaatgtcaaccattctacggtcgttcgacatttgaagcaaattggaaaggtgaaaaagctcgataagtgggtgcctcatgagctgactgaaaatcaaaaaaatcgtcgttttgaagtgtcatcttctcttattctacgcaaccacaacgaaccatttctcgatcggattgtgacgtgtgatgaaaagtggattttatatgacaaccggcgacgatcagctcagtggttggatcaagaagaagctccaaagcacttcccaaagccaatcttgcacccaaaaaaggtcatggtcactatttggtggtctgctgctggtctgatccactacagctttctgaatcccggtgaaaccattacatctgagaagtatgctcaggaaatcgatgagatgaaccaaaaactgcaacgcctgcagctggcattggtcaacagaaagggcccaattcttctccacgacaatgcccgaccgcatgttgcacaacccacacttcaaaagttgaatgaattgggctatgaagttttgcctcatccaccgtattcacctgacctcttgccaaccaactaccacgtctttaagcatctcaacaactttttgcagggaaaacgcttccacaaccagcaggatgcagaaaatgctttccaagagttcgtcgaatcccaaagcacggatttttacgctacaggaataaaccaacttatttctcgttggcaaaaatgtgttgattgtaatggttcctattttgattaataaaaatgcgttgagccta

SEQ ID NO: 180776 - DNA, 1359 bp, Homo sapiens
  Payload ID: 15603
  Gene Symbol: SETMAR
  Gene Name: SET domain and mariner transposase fusion gene
  ENST ID: ENST00000425046
  CDS Start-End: 35-238
tgtcagggtagtgggcgttgcgtgaggcgggtaaatgttcgcggaagcggcaaagacgacacggccttgtgggatggcggagtttaaggagaagcctgaggccccgactgagcagctggatgtcgcgtgcggccaggaaaacttgccggtgggcgcgtggcccccgggggccgcgccggcgcccttccagttctctgtactgccccgtagaaaagtcgaacatcagttgtggaaatgagaaggaacccagcatgtgtggctcagccccttctgtgttcccctcctgcaagcgattgacccttgagactatgaaaatgatgttagacaaaaagcaaattcgagcaattttcttattcgagttcaaaatgggtcgtaaagcagcagaaacaactcgcaacatcaacaatgcatttggcccaggaactgctaacgaacgtacagtgcagtggtggttcaagaagttttgcaaaggagatgagagccttgaagatgaggagcgtagtggccggccatcagaagttgacaacgaccagttgagagcaatcatcgaagctgatccccttacaactacacgagaagttgctgaagaactcaatgtcaaccattctacggtcgttcgacatttgaagcaaattggaaaggtgaaaaagctcgataagtgggtgcctcatgagctgactgaaaatcaaaaaaatcgtcgttttgaagtgtcatcttctcttattctacgcaaccacaacgaaccatttctcgatcggattgtgacgtgtgatgaaaagtggattttatatgacaaccggcgacgatcagctcagtggttggatcaagaagaagctccaaagcacttcccaaagccaatcttgcacccaaaaaaggtcatggtcactatttggtggtctgctgctggtctgatccactacagctttctgaatcccggtgaaaccattacatctgagaagtatgctcaggaaatcgatgagatgaaccaaaaactgcaacgcctgcagctggcattggtcaacagaaagggcccaattcttctccacgacaatgcccgaccgcatgttgcacaacccacacttcaaaagttgaatgaattgggctatgaagttttgcctcatccaccgtattcacctgacctcttgccaaccaactaccacgtctttaagcatctcaacaactttttgcagggaaaacgcttccacaaccagcaggatgcagaaaatgctttccaagagttcgtcgaatcccaaagcacggatttttacgctacaggaataaaccaacttatttctcgttggcaaaaatgtgttgattgtaatggttcctattttgattaataaaaatgcgttgagccta

SEQ ID NO: 180777 - DNA, 1671 bp, Homo sapiens
  Payload ID: 15603
  Gene Symbol: SETMAR
  Gene Name: SET domain and mariner transposase fusion gene
  Uniprot ID: Q53H47
  ENST ID: ENST00000430981
  CDS Start-End: 11-1108
aggcgggtaaatgttcgcggaagcggcaaagacgacacggccttgtgggatggcggagtttaaggagaagcctgaggccccgactgagcagctggatgtcgcgtgcggccaggaaaacttgccggtgggcgcgtggcccccgggggccgcgccggcgcccttccagtacactcctgatcatgtagttggacctggagcagacattgatcccactcaaataacctttcccggatgcatttgtgtcaaaactccctgcctccctggcacttgctcctgtctccgccatggagagaactatgatgataactcatgccttagagatataggatctggaggaaagtatgcagagcctgtttttgaatgcaatgtcctgtgccgatgcagtgaccactgcagaaacagagtggtccagaaaggtctacagttccacttccaagtgttcaagacgcataaaaaaggctggggacttcgtaccttggaatttataccgaaaggaaggtttgtctgtgaatatgctggtgaggttttaggattctctgaagttcagagaagaattcacttacaaacaaaatccgactccaattacattatagccatcagggaacatgtttataatgggcaggtaatggaaacatttgttgaccctacttatataggaaatattggaagattccttaatcattcttgtgagccaaaccttttgatgattcctgtccgaattgactcaatggtacctaagttggcactttttgcagccaaagatattgtgccagaagaagaactctcttatgattattcaggaagatatcttaatctaacagtcagtgaagacaaagaaaggctagatcatgggaaactaaggaaaccttgttactgtggtgccaaatcatgtactgctttcctgccttttgacagttctctgtactgccccgtagaaaagtcgaacatcagttgtggaaatgagaaggaacccagcatgtgtggctcagccccttctgtgttcccctcctgcaagcgattgacccttgaggtgagtctgttcagtgataagcagcttgcccctccctatagtggaagacagtggttggctagctttacctctgcctagttacataagtttaactcaggaatgtggcagagactgcaagttgtccatcagtatcctttcccctttctgtaatagaattctccatttaacaaaagtacatgactacccagaatactcactttcctagttagatttgtcttagtgactgttctagttaataggatataagcaaaaatgacaagtccttaaatggagatatcctgcccttcacctcctctttcttcctgctggctggaatgtatacatgatgactggaactggagcagtcatcctagaccccaggatgaccctgggaaaggaagccattgcatagaaaaatcaacaaggttaaaaggagtctaggtgtctggtactgtagaacatcctgtcagtcgtgatctgacacctttgtactttcaggtgagaaatagtctctcccttgcttaagtcactgttattgtaagttttctagcactaacatcgaacctaataatgatccaagaaacccttgtggctgcatacctaaaccctgcttgccaaccaattttaacagtaataaagctgactttttgatttctgtctga

SEQ ID NO: 180778 - DNA, 1657 bp, Homo sapiens
  Payload ID: 15603
  Gene Symbol: SETMAR
  Gene Name: SET domain and mariner transposase fusion gene
  Uniprot ID: Q53H47
  ENST ID: ENST00000425863
  CDS Start-End: 1-1638
atgttcgcggaagcggcaaagacgacacggccttgtgggatggcggagtttaaggagaagcctgaggccccgactgagcagctggatgtcgcgtgcggccaggaaaacttgccggtgggcgcgtggcccccgggggccgcgccggcgcccttccagtacactcctgatcatgtagttggacctggagcagacattgatcccactcaaataacctttcccggatgcatttgtgtcaaaactccctgcctccctggcacttgctcctgtctccgccatggagagaactatgatgataactcatgccttagagatataggatctggaggaaagtatgcagagcctgtttttgaatgcaatgtcctgtgccgatgcagtgaccactgcagaaacagagtggtccagaaaggtctacagttccacttccaagtgttcaagacgcataaaaaaggctggggacttcgtaccttggaatttataccgaaaggaagttctctgtactgccccgtagaaaagtcgaacatcagttgtggaaatgagaaggaacccagcatgtgtggctcagccccttctgtgttcccctcctgcaagcgattgacccttgagactatgaaaatgatgttagacaaaaagcaaattcgagcaattttcttattcgagttcaaaatgggtcgtaaagcagcagaaacaactcgcaacatcaacaatgcatttggcccaggaactgctaacgaacgtacagtgcagtggtggttcaagaagttttgcaaaggagatgagagccttgaagatgaggagcgtagtggccggccatcagaagttgacaacgaccagttgagagcaatcatcgaagctgatccccttacaactacacgagaagttgctgaagaactcaatgtcaaccattctacggtcgttcgacatttgaagcaaattggaaaggtgaaaaagctcgataagtgggtgcctcatgagctgactgaaaatcaaaaaaatcgtcgttttgaagtgtcatcttctcttattctacgcaaccacaacgaaccatttctcgatcggattgtgacgtgtgatgaaaagtggattttatatgacaaccggcgacgatcagctcagtggttggatcaagaagaagctccaaagcacttcccaaagccaatcttgcacccaaaaaaggtcatggtcactatttggtggtctgctgctggtctgatccactacagctttctgaatcccggtgaaaccattacatctgagaagtatgctcaggaaatcgatgagatgaaccaaaaactgcaacgcctgcagctggcattggtcaacagaaagggcccaattcttctccacgacaatgcccgaccgcatgttgcacaacccacacttcaaaagttgaatgaattgggctatgaagttttgcctcatccaccgtattcacctgacctcttgccaaccaactaccacgtctttaagcatctcaacaactttttgcagggaaaacgcttccacaaccagcaggatgcagaaaatgctttccaagagttcgtcgaatcccaaagcacggatttttacgctacaggaataaaccaacttatttctcgttggcaaaaatgtgttgattgtaatggttcctattttgattaataaaaatgcgttgagccta

SEQ ID NO: 180779 - DNA, 7365 bp, Homo sapiens
  Payload ID: 15604
  Gene Symbol: SETD7
  Gene Name: SET domain containing (lysine methyltransferase) 7
  Uniprot ID: Q8WTS6
  ENST ID: ENST00000274031
  CDS Start-End: 638-1738
gggaacacggacagtgcacgacggactttcaagttgctcccggcacaacgggaggtcgggagctcggagcccctacgggcggtccaagtgtccgcgagaagcccgcagcgcccaggaccgcgttgagcgctcggggcgcgccaagccgcacctaagcaaaagagaaacgctgacgggccggaggcgggttggctgggacgcggaatacgcgcggccccggagcgcctttcgttttaaggagccttacttctggaaagggacagggaactgtcaatcagcgagggagggagcgcaccggcgctgggtgatgtcagcggatcagctgctcgataacaaagagagggtattacaggagaaagttgcagcagcggcagcggccaaggcggcacaccggagcctccgaggcgaggggcaagtgggcgaagggaggggggacgacggctgctgccgcagcagctgaaggccaaggaattgaaagggctgtagggggaggcagtgcgagccagccccgactgctcctcctcttcctcctcctcctccaaactcgcgagccccagagctcgctcagccgccgggagcacccagagggacgggaggcagccgcgcagccccgagctgggcagtgtccccagccgccatggatagcgacgacgagatggtggaggaggcggtggaagggcacctggacgatgacggattaccgcacgggttctgcacagtcacctactcctccacagacagatttgaggggaactttgttcacggagaaaagaacggacgggggaagttcttcttctttgatggcagcaccctggaggggtattatgtggatgatgccttgcagggccagggagtttacacttacgaagatgggggagttctccagggcacgtatgtagacggagagctgaacggtccagcccaggaatatgacacagatgggagactgatcttcaaggggcagtataaagataacattcgtcatggagtgtgctggatatattacccagatggaggaagccttgtaggagaagtaaatgaagatggggagatgactggagagaagatagcctatgtgtaccctgatgagaggaccgcactttatgggaaatttattgatggagagatgatagaaggcaaactggctacccttatgtccactgaagaagggaggcctcactttgaactgatgcctggaaattcagtgtaccactttgataagtcgacttcatcttgcatttctaccaatgctcttcttccagatccttatgaatcagaaagggtttatgttgctgaatctcttatttccagtgctggagaaggacttttttcaaaggtagctgtgggacctaatactgttatgtctttttataatggagttcgaattacacaccaagaggttgacagcagggactgggcccttaatgggaacaccctctcccttgatgaagaaacggtcattgatgtgcctgagccctataaccacgtatccaagtactgtgcctccttgggacacaaggcaaatcactccttcactccaaactgcatctacgatatgtttgtccacccccgttttgggcccatcaaatgcatccgcaccctgagagcagtggaggccgatgaagagctcaccgttgcctatggctatgaccacagcccccccgggaagagtgggcctgaagcccctgagtggtaccaggtggagctgaaggccttccaggccacccagcaaaagtgaaaggcctggctttggggttcagagacctggaatagaaacttggatctatgcactacgtttatctgacaatgggacaaccagggactgctcatgctgtgacgtcacatcctctcaccatgcgttagcaacgactttctcgcatactaactaggtttgactgtattactcataccagatttaaaattagctagccttgcaacaacgtcctactgagaggtattgtcgagcatttgacataagacagcgtgatgttctttggtggttcaagtctaaatctgtaccacattcggagatgccaaatgattagactgaaacagggaaacggggtttttcagtcatttttagtcagtggtttttccatagtgcttttttcctatggccagtgcaaattgtgttagcacacttgcatatgtgccgtattaagggttgacaattactacatctttattctctaaatgtagtataatttgccttttaacctttgatctgtatcttgcaatagaatggctttggtttttttcttagtaaataggagcccacttctaaagtcatttcacccctcagccctattctctttcttagataccctttacaagagaaaacttccaaatggatttttgcatcaatagcagtgtgtaggtctctctggttctttctatatcatcattttattattatgtcctaatataaagtactggctcatagggccagggtattattatagaatattattctcgcatgtaaacaaagatatctttgctttaagatgtgagaagaaatgaatttactttgtttgcattaagttatggaagagttgtaatatatactttaagaaagaagagaagaaaactagtatctctaagcggtaactatggcaattttgcaatattttcagtagtgctagtaattttttcctccttgagtacacattaaatgtacataacatagcgcggtcaggcttgtggcacagtgcattgaattcaaaagtcaaacagcaaatttgaattctaacagaattcaaaaaaaaatttttttagtcagtactactaaggcagacacactgattactaggtacaaatcaaaccttgatgctaaaactcttcatcattgtaatttcaaagcacttacctgcttcaaaacattgtaaactaagactgaacacctgtatagtttaaaagcaacactatcaatagcatttcagccattttgccagccatgtgtaatcacaactgcagaaataaggagaaaacccctgtttttttagtttagctaattagatctgtaacatcactgggattgctctgaatgaatcctgagagttttgttttttataagcaccctcaccacatgccatagctttgtctcttttagacacctcgatgcagcggctggaaggactggagagcagctgttgtgctgatctgtagctgtcagctgtgattcctgtcacctgagtcagtttggtctggaaagcgaaggccttccaagctgtagcagatagtgagctccagctgatgagagaaggcttcagtggaagaagagtgaggacataggcagaaggaagtttgctatttcttgtcagttgcacattgctttatgaagactacaacaaaagtgcttaatcccaggctgctcatgactttcatttcaggtggcccttgggcacattgacagagttgcccttcccttctttgcaacaccaggcttcctagagcacccggttgcatgctttgcagctaggtggcagtggtttcagggagatccagttggatccctgcttgaaagcttaagccaatggttcacccatgagaggaagttgtcagtgcttccaggaagattgcccaccaaaggaactgaatagtttttagatttaaaggcaccaggatagggtcactcttactctgtagaaagagaccgttctatacactgtgacggatgggccagggcctctggacttgcattctgataggtgctttaatttaaatgtgcccaaagggagtgactgtcttcaggagaaagatggcttgcattaacctcgatcaagtgggttgtgcagccaggtcagggaatacggtcagggagaggatagtgctggtcatgcccccgatgcagctatgctctgaatgatttcattcctgagagtgatagcattctggtcctggctgcagtggggtacaatttacgtcctaagtgggggctactctaattatcccattcaaatggaatttttttcaacattggatagaaggaattgaagagttgtaagtagtgattagtctgctaatcagttcttcagatgagatattgaatggtaacactctgagcttaaaactcagcagtgtgtctgtgacctccacgcaaatcagaggaagcaatgcatccacgctgagcctcaccatgtcttcctcccaactctcttcatactctctgtgtcttccagctcttctttctctggccggctctctttcctcttctctctgcatatgtgagaacgcctgggcatcctgggtaacagcagccccagctgccctctcctgttccctgttccaagtcccctgcactgacctttcttgagtctctctggctctgtgcatgtctttgggactctgctcatctggcttttcctctgtgtgtgcctctctgtttgcttatgtctctggctctgtcttccccacccctcccctcacacacacacatactcccaaatgtaaggctctgtggcaggttggaatcggagtaaggcttgagattcactgagttctgtaggtagggaaagaagtcaagggagtggaggttctataaggaattaacagctgaggacggaagggtttgtttcccgtttgaacctaaacgcaagtggaaaagaatactcagaatgtatttttctactttacatctgctggggaaggaaatgtgtcaggaagccgctgcatctggtcatttcatcgcatcagaatcacagcagacgtggaagattccatgtggtggggaataaagaaataactttatgctctcctgaaaaacagcgggagcctatgtgtgtgtgcgacactgtaatctcaaggagattcactcagagctgtctcagtccaactcctgcatgaccagatcttcccttagcatcttttctgtgatgaaatattatcttgtgttagagttaggaataggaactaacctgtaggagcatgtccccaaatggacatttgaatggactaacaaaaacaactggaaagactgaatttccgacacaaaggaatgatgggatcaaaaagaaagcagtgaggagttcttgagtcttgtagtacctattcttattttaacttgcttcatccttgatctacctgagacactaagaaggaaattagttttccaagagctctttgaacctgtctaggactgtagttaaacctatttgccctatgggggttcttcacactcgaaaaactatttccttatcaccaacgacccacccagaaaggccaatgaggccaaatgtaacaatttttaacatttaaatataactattaaaattgcattaattgtgaacagtgaattaaagggttgtcttctccaggagacagtatgtggcacttttcgtaaatttcatttaatatataaaaatttaaatcactcactgcaacatgcatttaaaatcttccaagaaggtagaggtatcattttctgttttgctttgttttaaaacagttgcctcaagcttctgtcttaagagtagtgacttagaatccagatatcttttgttttagaaaaacaagcaaaactatgttgcaagactgacagttgtaatgtttatttgccacagatcaaaggttcacaaagtatatcaaatttacatctacttggggtaccttgatagattattattgtttttcttttatctttcccttcaggaatttggaaactcgttgtcactttttttaattttaaaaatactaaattgtaatagttttcttttgccaaatgtgtgcgtacatattcaaagcaatgaaactatttcaagccatacaaccacaggggtgggaacccttttcacaaattttaatgtgtttgtatgtaaatagatgtttgtatgaaatattttcatgatagaatgaatatatttaaatgaagttgaattattccagtgctacttaaacacattacaaaaattttggtgagaattatctgagtctattgagatgtaatgcagatcaattttgatttttaaaaatcaaaagcctacaataactctgactctcagcaacttcctcggcgttgttgcacctgacgtggagagagctcgtaggcttccccagtgcctcagccgcttcctggtggaagttaggtgctaatggaggtgtgttcaccttttagtgatatcactgcaggcctttgaggggcctgagagtgaatcagaggcattagagacaccggtgcagttatctggagcacaatttctttgcagggcagcagaatcagaagccagacttggccatgtgaacctcgaaactcggtttcccggccgccatcaaccgccacccttactgcctagtcacacacgtcagggaggctgccctcagtggagttggggttgagaccccagggtgggacttcacagttttgccagcaatctctaccttctgacttctgcctcgcagagaggaaggagaggggagcatctggcaaggggcccatttctcagcacagtacatttcctgtctcagctctggaagactatgcacccaagcaccaaacttccaaccagagagagagacgtcctccgataacaaaaatccttgcttcctctgtctgtgactttacacacagttgttcaaagttgttaaatgtcaagagtcaatcacatccctaggacatacctcccaactctcctgactcttatgttattgaaaaaacaaacaaacaaaaactcctttatgatgatattcaacttgagtggggttttttttccactttggtcctggatataatgaaatgatacatattaggataaattttcactgtgtatagtagcaatacgaacacacatgccaatgtatcaacatatctacttggttacattttggtttatgataattaaccttgattcatgtattgggaagctacagggactacgtaatacctgcttatcacataggaaaattatgtccatgattctgagctcccttcttcaaaagtttcctcctgggtgttctatgttctctctttatcctgaaatacatttattaggttgtgaggtatgttgaagaagtagaagccaggggtatgctttcagcatttattgcaaccaaaagttaaccccatcacggttaacgagcatctttggtctcttgtggaatttgaactaaaactatgagccttattcaatatctataattctatgatttttttaaattatgggaaattaatgaaagatgtttacatgaataatgtttgcccttactgtgttatgaatgagttttttgtagtgtgtctgggtgcatgatgcaagagagtaggaaaaatgtttctgaaacaaaacttgacaaatatttgtaatgaaagtaaatttaaagattgctataattgcgctatagaaacaatgcaagtattaaacaaaatatacaatcatc

SEQ ID NO: 180780 - DNA, 1127 bp, Homo sapiens
  Payload ID: 15604
  Gene Symbol: SETD7
  Gene Name: SET domain containing (lysine methyltransferase) 7
  ENST ID: ENST00000406354
  CDS Start-End: 225-434
agccgccgggagcacccagagggacgggaggcagccgcgcagccccgagctgggcagtgtccccagccgccatggatagcgacgacgagatggtggaggaggcggtggaaggttattaccccaagaaaaagccagtagaataactactgccttcattttcacccacctctgcaaaatcagctcaccagaatgattgggaagacaccaataagggcacctggacgatgacggattaccgcacgggttctgcacagtcacctactcctccacagacagatttgaggggaactttgttcacggagaaaagaacggacgggggaagttcttcttctttgatggcagcaccctggaggggtattatgtggatgatgccttgcagggccagggagtttacacttacgaagatgggggagttctccagggcacgtatgtagacggagagctgaacggtccagcccaggaatatgacacagatgggagactgatcttcaaggggcagtataaagataacattcgtcatggagtgtgctggatatattacccagtaagccgtgtgactgttcactctgctggaaagtaacatactgtgactcttcacaatgaagagtaaaatgtattctgtgttagaacttgggagctgtgaaacctgagagtcaccacagctgacaccaagagtttatgaggcatgccctctcactgttactcactattggcttagattgttggcccttgaatccgttattaattatttttcagcgttgttttggaaaggagtaattaatcatgattaaaacaaattgagacaaattggttttattgtatcactaataaaggcaaaatatattgcttttaattcttttggcacatagagggagatagtggaaattttcattgttgctattagttttatttcctgtttctcatatgtaaaaaccagtccagcaatttttaatttgggagagcttactgcactgttgttacttgattctacaattccactaactgctttttaaggtattttatggtttatattgtttaaattaaggtgattaaaattaacttacctttgagtatttgatagcattttatgatatttctggagtctattaaagtaaaaagatatggca

SEQ ID NO: 180781 - DNA, 1590 bp, Homo sapiens
  Payload ID: 15604
  Gene Symbol: SETD7
  Gene Name: SET domain containing (lysine methyltransferase) 7
  ENST ID: ENST00000404104
  CDS Start-End: 633-1040
cacggacagtgcacgacggactttcaagttgctcccggcacaacgggaggtcgggagctcggagcccctacgggcggtccaagtgtccgcgagaagcccgcagcgcccaggaccgcgttgagcgctcggggcgcgccaagccgcacctaagcaaaagagaaacgctgacgggccggaggcgggttggctgggacgcggaatacgcgcggccccggagcgcctttcgttttaaggagccttacttctggaaagggacagggaactgtcaatcagcgagggagggagcgcaccggcgctgggtgatgtcagcggatcagctgctcgataacaaagagagggtattacaggagaaagttgcagcagcggcagcggccaaggcggcacaccggagcctccgaggcgaggggcaagtgggcgaagggaggggggacgacggctgctgccgcagcagctgaaggccaaggaattgaaagggctgtagggggaggcagtgcgagccagccccgactgctcctcctcttcctcctcctcctccaaactcgcgagccccagagctcgctcagccgccgggagcacccagagggacgggaggcagccgcgcagccccgagctgggcagtgtccccagccgccatggatagcgacgacgagatggtggaggaggcggtggaagggcacctggacgatgacggattaccgcacgggttctgcacagtcacctactcctccacagacagatttgaggggaactttgttcacggagaaaagaacggacgggggaagttcttcttctttgatggcagcaccctggaggggtattatgtggatgatgccttgcagggccagggagtttacacttacgaagatgggggagttctccagggcacgtatgtagacggagagctgaacggtccagcccaggaatatgacacagatgggagactgatcttcaaggggcagtataaagataacattcgtcatggagtgtgctggatatattacccagtaagccgtgtgactgttcactctgctggaaagtaacatactgtgactcttcacaatgaagagtaaaatgtattctgtgttagaacttgggagctgtgaaacctgagagtcaccacagctgacaccaagagtttatgaggcatgccctctcactgttactcactattggcttagattgttggcccttgaatccgttattaattatttttcagcgttgttttggaaaggagtaattaatcatgattaaaacaaattgagacaaattggttttattgtatcactaataaaggcaaaatatattgcttttaattcttttggcacatagagggagatagtggaaattttcattgttgctattagttttatttcctgtttctcatatgtaaaaaccagtccagcaatttttaatttgggagagcttactgcactgttgttacttgattctacaattccactaactgctttttaaggtattttatggtttatattgtttaaattaaggtgattaaaattaacttacctttgagtatttgatagcattttatgatatttctggagtctattaaagtaaaaagatatggcagaa

SEQ ID NO: 180782 - DNA, 1602 bp, Homo sapiens
  Payload ID: 15604
  Gene Symbol: SETD7
  Gene Name: SET domain containing (lysine methyltransferase) 7
  ENST ID: ENST00000506866
  CDS Start-End: 102-1190
ctccaaactcgcgagccccagagctcgctcagccgccgggagcacccagagggacgggaggcagccgcgcagccccgagctgggcagtgtccccagccgccatggatagcgacgacgagatggtggaggaggcggtggaagggcacctggacgatgacggattaccgcacgggttctgcacagtcacctactcctccacagacagatttgaggggaactttgttcacggagaaaagaacggacgggggaagttcttcttctttgatggcagcaccctggaggggtattatgtggatgatgccttgcagggccagggagtttacacttacgaagatgggggagttctccagggcacgtatgtagacggagagctgaacggtccagcccaggaatatgacacagatgggagactgatcttcaaggggcagtataaagataacattcgtcatggagtgtgctggatatattacccagatggaggaagccttgtaggagaagtaaatgaagatggggagatgactggagagaagatagcctatgtgtaccctgatgagaggaccgcactttatgggaaatttattgatggagagatgatagaaggcaaactggctacccttatgtccactgaagaagggaggcctcactttgaactgatgcctggaaattcagtgtaccactttgataagtcgacttcatcttgcatttctaccaatgctcttcttccagatccttatgaatcagaaagggtttatgttgctgaatctcttatttccagtgctggagaaggacttttttcaaaggtagctgtgggacctaatactgttatgtctttttataatggagttcgaattacacaccaagaggttgacagcagggactgggcccttaatgggaacaccctctcccttgatgaagaaacggtcattgatgtgcctgagccctataaccacgtatccaagtactgtgcctccttgggacacaaggcaaatcactccttcactccaaactgcatctacgatattggccagaagaatcacctgggaacgtgtaaaagaagcagatttggggctccactcccaaagatcccacatctggatcaagcgccctgggtagaacacagaaaagctggcattcctctttatagtgcagcccaaggactgatgctcataatgatgttcgtgagtaattaagaaaagataaaagcgaatggaatgaactctgcctactgataatggcaattgtcagaacataggcttccctcaagaactcaaaatcgcactctgggagccattttaagatctgaaaagagatacctaataagttgtgccagagaaatcaataaataaagtcaccagaggggggaaaaagaccctcaaaccagcaggacttgattagataaaatatcttttaaaacaatcaggatatttggaattttcttcaggctaatatgggagataagggaagtgaagtgtgggtgtagataaaaccagactgaccacatgtggataaggatttcagctgggtgatgagtacgagttcatgatcttatatgtgtgtttttatatgtttttgaaatctccacaataaaaaattacaaaaaaa

SEQ ID NO: 180783 - DNA, 5281 bp, Homo sapiens
  Payload ID: 15604
  Gene Symbol: SETD7
  Gene Name: SET domain containing (lysine methyltransferase) 7
  ENST ID: ENST00000608958
  CDS Start-End: 308-448
atccgtcctagctcctggacgctggaccgctcctcaactccctgctcagggggagactagctcctcgtattatgttcagtctctacgtttctctacagaaagccctcccaagtcccacggcagctgggtcttcatctctccactgcacccagaatcacacgctgacccagataaagctcaatgcagtgaacactcttggtctggaggtccaacatcagggagttgccgggactggtttcagacacacggaggaggagacacacagagaaaaggaggcagtgatgtgaccacagaggcagagattgacatgatgcagccgcaagaggcagagttatgcaggcctcacgatgcaactgcttctggaaaatgcaactgcgtgcatggtgaatcttcagctgccagaacaatcacttctcctggagacagattcattatgaaaggactttaattctggtctgacagactgcttgacattggagtgaattctcaaggcttatcaaaatcatctcgtggaatgatgagttgacttgcacccactgaaacgggggcaaatctccttcaaaagatcatgccaaagactgtgtgggtaccggaaaggctgtgtggcagggaaaaggtttgctctaacctagaagcctgcaaggtcccctctgcacgcccaagcagcgggcccgagttcattatggccagcaaagccaactgacaccacaggaaacagagctcgtgggacaccccatgacacgaagttttcaacctcattgcttccccctgaagtcaagtttagtcacctgtgctgtgctggaccagccatgaaagtaatgagggaactggatcactccagggaagcccaggtggaataataggtgtcactcaaaagtacagctttcaacttaaaaaggaaggaaattctgatacatgctacgtggatgaacattgaaggcatgatgctaagtgaaataagccagtcacaaaacaacaaatattgtatgattccatttatatgcggtacttagactagtcacatttatagaaactgaaagtagaagggagggtggttgccaagggctaggggaaaaagggaatggagttagtgtgtaatggatgtatttcagttttgctagatgaaaaagttctggagattagttgaacaatgtgaatgtacttactactgagttgcagactgaaaaatggttagtatgggccaggcgcggtggctcacacctataatcccaacactttgggaggccaaggtgggcagatcacttgatgtcaggagttcaagaccagcctggccaacatggtgaaacccatctctactaaaaatacaaaaaaattagccacgcatggtggcgcatgcctgtaatcccagctacacaggaggctgaggcacgagaatcgcttgaacccaggaggcagaggttacagtgagccgagatcacgtcactgcactccagcctgggcaacagagatagactctgtctccaaaaaaaaaaaaaaaaaaaaagttaggatggtaaatttaatgttatgtatacttttccacaattgttaattaattttttaaagtgcagcttctgatggcacacgtatctctccctcttctttgtctccagaagatgagagggagcatgagacagcagataggatgcgtcatcttattgcatttatttctgtagaccatgcattgaggctgtctgaccttcaattattcattaaacaaatatttactgagttgagtacgtactacatgccaagcattgttctagaggctggagttacagcagtgaacagaaaaagatctccccagttccctagtcacagggatctcaccttctagcaggtggagaaaaacaataagtaaataagcaagtaagatatatggtatttatatggcaataagagctatggagaaaaataaagcaaagaaggaggaagaagaagagtgtttcagggttgtatttttaaataaggtggtcaggggagacctcactgagaggatggtatttgagtaagacttgaatgagattagggagttagctatttaggtatctgcaggaagagtgtttcagacaaaataaaaagtcagtgcaaaggccctgaggcagaaacatgaatggggtgtttaaggaaaagcaaaggggccattgtggctgaaaaggtaagcagcagcagagagacagtctaagaagaggttagaaacatcacagaagcagcccagatcatgaaggttgagacggagtctcgctctgtcacctaggctggagtgcagtggcacaatctcggctcactgcaacttctgcctcctgggttccagtgattcttctgctatacctcccgagtaactgggactacaggcacccaccaccatgcccagctaggttttattattattattagtagtagtagtagagacagcgtttcaccatgttggccaggctggtctcaaactcctaacctcaagtgatctgcccacctcagccttcaaaagtgctgggattacaggcgtgagccaccctgcctggccccattatttgtaagagtttgactcatactctgagacagtaactagaggaatgatatgatccaacttccatgttaaaaggatcaccaggggttggaggcgggggtgtcaagggcaggatcaggaagactagtaggactgcaatactccaggcaagagatgctgagagctcagcccaagcaggtagctatggaggtggtaagatgtgggcagattctgggtatattttgaagatagggccaacaggatttactgagagactggaggtaaggctccacagaaagagaaataagagaaacattaaagatgaccgtatcggtttcctggggctgctgtaacacatcaccacaaacttggcggcttaaaacaacagaaatttattctctcacagttctaaggccaggaagtctgagattaaggggttcttgcttccaggggctctagagcagcagtcctcatccttccggggccggttttgtggaagaccatgtttccacggacaggggcaggagtgccgggggagagaggcagcagggtggtgggtgtgtgtgtggatggtttcgggatgaaactgctccacctcagatcatcaaggattagttagattctcataagagcacgcaacctagatccctcacgtgtgtggttcacaatagggtttgcattcccatgagaatctaatggcactgctctgacaggaggtggagctcaggtggcaatgctcatggggccgctcacctcctgctgtgtggcccagttcccaacaggccatggaccagtaccatcgcagcccagaggttgcagacccctgctgtagaggatattctattccttgtctcttccagcttctggtggatccaggcgttccttggcttggggttacatgactctagtctctgccttctcctcttttctgtgtcacctgtcccttgtaaggacaactgtcattggatttaggacccacccagataatccaggatgattccaccatgaaatccttaacttcattaaatctgcaaagaccctttttctggcttacacaaaaatgcttctggttgttttaaaagataaaccagttttgtttaactttgtttactgcaggcactagaagtgcaattggccctcttgaaatttgggattatttaaaaataaaggctgggagcagtggcttatgcctgaaatcccagcactttgggaggccaaggcaagtgggtcacctgagatcaggagttcaagaccagccatggccaacatggcaaaacccagtctctactaaaaatacaaaaattagccagatgtggtggcagttgcctataatcccagctacttgggaagctgaggcaggagaattgcttgaacctgggaggcagaggttgcagtgagctgagatcgcaccattgcactccagcctgggtgacagtgagactccgtctcaaaaaaaaaagatcctttttccaaatcaggtcacattctcagggcctggcgttaggatgtggacatacctttttgtgagccatgattcaactcactacagtgactcttattttaatctgagcaactgtaaagatgaacttgccattaactgagatggagaagaatgccagtttgggagagaagtccaggagctcggtgctggacatgtcagggttgagatgcttgtctgacatccagtggagctgatgagtgggcagctgggtgaataagcctgaagcttgggacagaagtatgggttggagatggaaatacgaaggttcccagatgtggacagcatctaaagccacggacccatggtctcaaccaggggaggagtgtggacagaggagaaaaacatcagggactgagccctggggcacaccaggattcagaggacccagccaagagactgagaaggagcagccggggagagaggaggcaaaacagcagagtgtgaggtcctagaaggcaagggagggaactgctttaaggagaaaggagtgatcaactcacagtagcaaattttcagaactgggcattcaagtaaaagttgaaatttcctatgcagtttcctgtaacaagattgtgcacttttcatgtcactcccctcttatgatgtgggaaaggcagtgacatctgcttaaaatcatcactaatacccttatgttataatgaagcatattttcaaagcgtgtcgttaccatttttatcagcatagcttttccttggttccatgttctatgtctacaactcagaagggaaagaaaggcacatgtttcagccccacatggggtcaggagagactgttatgactgagtcctgagctgctgttgcctggagtcacaccattttcctaatttttagttcctgcggtaaaagtcttgtccttaacagcagcgggggctgtgtgaggaaaatcaatcagggaaactgttttaaaaggttttaaatgattaccagagcatagtataatcacttcaggaaccaagacaacaatttgacaagtgaaaaactccccaaattccactggcttgcctgaaagcctgttacaaaaaaacaaacatctgacaaatcaatcaatctagcttaaacatccaaacagagggctttgtcactgagtgagggagaagcagcatgagatgactgggtgggttttccaccaaatggacatccagaagagacaacttaaatcttgagctgtttgggaggtttttagtgaatgataatgaatggttaaattagagaactgagtgctaaatcctgaagaataaatatgttttgtggaaa

SEQ ID NO: 180784 - DNA, 492 bp, Homo sapiens
  Payload ID: 15604
  Gene Symbol: SETD7
  Gene Name: SET domain containing (lysine methyltransferase) 7
  ENST ID: ENST00000608795
  CDS Start-End: 211-492
atccgtcctagctcctggacgctggaccgctcctcaactccctgctcagggggagactagctcctcgtattatgttcagtctctacgtttctctacagaaagtctggaggtccaacatcagggagttgccgggactggtttcagacacacggaggaggagacacacagagaaaaggaggcagtgatgtgaccacagaggcagagattgacatgatgcagccgcaagggcacctggacgatgacggattaccgcacgggttctgcacagtcacctactcctccacagacagatttgaggggaactttgttcacggagaaaagaacggacgggggaagttcttcttctttgatggcagcaccctggaggggtattatgtggatgatgccttgcagggccagggagtttacacttacgaagatgggggagttctccagggcacgtatgtagacggagagctgaacggtccagcccaggaatatgacacagatggg

SEQ ID NO: 180785 - DNA, 3069 bp, Homo sapiens
  Payload ID: 15605
  Gene Symbol: SETD8
  Gene Name: SET domain containing (lysine methyltransferase) 8
  ENST ID: ENST00000330479
  CDS Start-End: 517-1485
agatccggtcggctcggagcccagggctccagccgggctactcacgctccggaggcggagcttcagcagcgggagggggaggaatctggggcctcccaatggcagctcgggtgtcttccatcgcagccattcaacgtctggcgacggtcaaatttaaacacccctcccacctcctccgccgggacctgtcgggaaagcgtttgcagttattgcggcggctggacacgccccgccgccgaagaggcgggagaagggcggggcctttctccgagttggcctatcactacgggcagcctgcggagaggcgggaggcggcgccaatcggggcgagcagctggagcccggcggagcagttggctgagttgttgcaacttttttcgaaagctgggtttcccgggagatcccaggcggtgacagagtggagccatggctagaggcaggaagatgtccaagccccgcgcggtggaggcggcggcggcggcggcggcggtggcagcgacggccccgggcccggagatggtggagcggaggggcccggggaggccccgcaccgacggggagaacgtatttaccgggcagtcaaagatctattcctacatgagcccgaacaaatgctctggaatgcgtttcccccttcaggaagagaactcagttacacatcacgaagtcaaatgccaggggaaaccattagccggaatctacaggaaacgagaagagaaaagaaatgctgggaacgcagtacggagcgccatgaagtccgaggaacagaagatcaaagacgccaggaaaggtcccctggtaccttttccaaaccaaaaatctgaagcagcagaacctccaaaaactccaccctcatcttgtgattccaccaatgcagccatcgccaagcaagccctgaaaaagcccatcaagggcaaacaggccccccgaaaaaaagctcaaggaaaaacgcaacagaatcgcaaacttacggatttctaccctgtccgaaggagctccaggaagagcaaagccgagctgcagtctgaagaaaggaaaagaatagatgaattgattgaaagtgggaaggaagaaggaatgaagattgacctcatcgatggcaaaggcaggggtgtgattgccaccaagcagttctcccggggtgactttgtggtggaataccacggggacctcatcgagatcaccgacgccaagaaacgggaggctctgtacgcacaggacccttccacgggctgctacatgtactattttcagtatctgagcaaaacctactgcgtggatgcaactagagagacaaatcgcctaggaagactgatcaatcacagcaaatgtgggaactgccaaaccaaactgcacgacatcgacggcgtacctcacctcatcctcatcgcctcccgagacatcgcggctggggaggagctcctgtatgactatggggaccgcagcaaggcttccattgaagcccacccgtggctgaagcattaaccggtgggccccgtgccctccccgccccactttcccttcttcaaaggacaaagtgccctcaaagggaattgaattttttttttacacacttaatcttagcggattacttcagatgtttttaaaaagtatattaagatgccttttcactgtagtatttaaatatctgttacaggtttccaaggtggacttgaacagatggccttatattaccaaaacttttatattctagttgtttttgtactttttttgcatacaagccgaacgtttgtgcttcccgtgcatgcagtcaaagactcagcacaggttttagaggaaatagtcaaacatgaactaggaagccaggtgagtctcctttctccagtggaagagccgggaccttccccctgcacccccgacatccagggacggggtgtgaggaagacgctgcctcccaatggcctggacgggatgtttccaagctcttgttcccctaacgtctcaacaggcgctcactgaagtgtatgaatattttttaaaaaggtttttgcagtaagctagtcttcccctctgctttctcgaaagcttactgagccccgggccccaagcacgggccgggcatagatttcctcttccacaagctgccgcttttctgggcaccttgaagcatcagggcgtgaaatcaaactagatgtgggcagggagagggttgcttacctgccctgctggggcagggtttcctgaaactgggttaattctttatagaaatgtgaacactgaatttattttaaaaaataataataaaaatttaaaaaaattaaaaataaaaaaaaccacagaaaacaactttacatgtatataggtcttgaagtgagtgaagtggctgcttttttttttttttttttttgcttttttttgctttttgtagaagagattgagaatggtactctaatcaaaaataaagttttgtagtgggaccagaaattacttacctgacatccacccccattccccctcatcctgctggggttgaaagttccagacctgctgtcgaggccttgtgtttgtcagacacccagtgtcctcctgcaaggacgcaactgtgagctgaggtgtgagcctaggagcacacagggcccggcagcccccaggaatcaaggatagggctaaggttttcaccttaactgtgaaggcaggaggaataggtgactgcttcctcccgcccttcacagaactgattctcacacactgtcccttcagtccagggggccggggctcaggagccatgacctggtgtctcctgcccaccctggtcccaggtaaatgtgaatggagacaggtatgagaggctgtcctcgtctttgattcccccccaaccccacctcgggcctcacgacggtgctacctaagaaagtcttccctcccaccccccgctagcctggtcagtggtcagcaaattggaagaggatccgatgggagtgtaaatgtgagacacaatgtcttgattatacctgtttgtggtttagctttgtatttaaacaaggaaataaacttgaaaattatttgtcatcataaaaatgaaacaaattaaaatatttattgccaggc

SEQ ID NO: 180786 - DNA, 3140 bp, Homo sapiens
  Payload ID: 15605
  Gene Symbol: SETD8
  Gene Name: SET domain containing (lysine methyltransferase) 8
  Uniprot ID: Q9NQR1
  ENST ID: ENST00000402868
  CDS Start-End: 427-1485
agatccggtcggctcggagcccagggctccagccgggctactcacgctccggaggcggagcttcagcagcgggagggggaggaatctggggcctcccaatggcagctcgggtgtcttccatcgcagccattcaacgtctggcgacggtcaaatttaaacacccctcccacctcctccgccgggacctgtcgggaaagcgtttgcagttattgcggcggctggacacgccccgccgccgaagaggcgggagaagggcggggcctttctccgagttggcctatcactacgggcagcctgcggagaggcgggaggcggcgccaatcggggcgagcagctggagcccggcggagcagttggctgagttgttgcaacttttttcgaaagctgggtttcccgggagatcccaggcggtgacagagtggagccatggctagaggcaggaagatgtccaagccccgcgcggtggaggcggcggcggcggcggcggcggtggcagcgacggccccgggcccggagatggtggagcggaggggcccggggaggccccgcaccgacggggagaacgtatttaccgggcagtcaaagatctattcctacatgagcccgaacaaatgctctggaatgcgtttcccccttcaggaagagaactcagttacacatcacgaagtcaaatgccaggggaaaccattagccggaatctacaggaaacgagaagagaaaagaaatgctgggaacgcagtacggagcgccatgaagtccgaggaacagaagatcaaagacgccaggaaaggtcccctggtaccttttccaaaccaaaaatctgaagcagcagaacctccaaaaactccaccctcatcttgtgattccaccaatgcagccatcgccaagcaagccctgaaaaagcccatcaagggcaaacaggccccccgaaaaaaagctcaaggaaaaacgcaacagaatcgcaaacttacggatttctaccctgtccgaaggagctccaggaagagcaaagccgagctgcagtctgaagaaaggaaaagaatagatgaattgattgaaagtgggaaggaagaaggaatgaagattgacctcatcgatggcaaaggcaggggtgtgattgccaccaagcagttctcccggggtgactttgtggtggaataccacggggacctcatcgagatcaccgacgccaagaaacgggaggctctgtacgcacaggacccttccacgggctgctacatgtactattttcagtatctgagcaaaacctactgcgtggatgcaactagagagacaaatcgcctaggaagactgatcaatcacagcaaatgtgggaactgccaaaccaaactgcacgacatcgacggcgtacctcacctcatcctcatcgcctcccgagacatcgcggctggggaggagctcctgtatgactatggggaccgcagcaaggcttccattgaagcccacccgtggctgaagcattaaccggtgggccccgtgccctccccgccccactttcccttcttcaaaggacaaagtgccctcaaagggaattgaattttttttttacacacttaatcttagcggattacttcagatgtttttaaaaagtatattaagatgccttttcactgtagtatttaaatatctgttacaggtttccaaggtggacttgaacagatggccttatattaccaaaacttttatattctagttgtttttgtactttttttgcatacaagccgaacgtttgtgcttcccgtgcatgcagtcaaagactcagcacaggttttagaggaaatagtcaaacatgaactaggaagccaggtgagtctcctttctccagtggaagagccgggaccttccccctgcacccccgacatccagggacggggtgtgaggaagacgctgcctcccaatggcctggacgggatgtttccaagctcttgttcccctaacgtctcaacaggcgctcactgaagtgtatgaatattttttaaaaaggtttttgcagtaagctagtcttcccctctgctttctcgaaagcttactgagccccgggccccaagcacgggccgggcatagatttcctcttccacaagctgccgcttttctgggcaccttgaagcatcagggcgtgaaatcaaactagatgtgggcagggagagggttgcttacctgccctgctggggcagggtttcctgaaactgggttaattctttatagaaatgtgaacactgaatttattttaaaaaataataataaaaatttaaaaaaattaaaaataaaaaaaaccacagaaaacaactttacatgtatataggtcttgaagtgagtgaagtggctgcttttttttttttttttttttgcttttttttgctttttgtagaagagattgagaatggtactctaatcaaaaataaagttttgtagtgggaccagaaattacttacctgacatccacccccattccccctcatcctgctggggttgaaagttccagacctgctgtcgaggccttgtgtttgtcagacacccagtgtcctcctgcaaggacgcaactgtgagctgaggtgtgagcctaggagcccaggacccctgaccccggccgctgctgccagcctcagaaaggcacccaggtgtgcaggggagcacacagggcccggcagcccccaggaatcaaggatagggctaaggttttcaccttaactgtgaaggcaggaggaataggtgactgcttcctcccgcccttcacagaactgattctcacacactgtcccttcagtccagggggccggggctcaggagccatgacctggtgtctcctgcccaccctggtcccaggtaaatgtgaatggagacaggtatgagaggctgtcctcgtctttgattcccccccaaccccacctcgggcctcacgacggtgctacctaagaaagtcttccctcccaccccccgctagcctggtcagtggtcagcaaattggaagaggatccgatgggagtgtaaatgtgagacacaatgtcttgattatacctgtttgtggtttagctttgtatttaaacaaggaaataaacttgaaaattatttgtcatcataaaaatgaaacaaattaaaatatttattgccaggcaaggcca

SEQ ID NO: 180787 - DNA, 1774 bp, Homo sapiens
  Payload ID: 15605
  Gene Symbol: SETD8
  Gene Name: SET domain containing (lysine methyltransferase) 8
  ENST ID: ENST00000437519
  CDS Start-End: 34-309
ccgggagatcccaggcggtgacagagtggagccatggctagaggagaacgtatttaccgggcagtcaaagatctattcctacatgagcccgaacaaatgctctggaatgcgtttcccccttcaggaagagaactcagttacacatcacgaagtcaaatgccaggggaaaccattagccggaatctacaggaaacgagaagagaaaagaaatgctgggaacgcagtacggagcgccatgaagtccgaggaacagaagatcaaagacgccaggaaaggtcccctggtaccttttccaaaccaaaaatctgaagcagcagaacctccaaaaactccaccctcatcttgtgattccaccaatgcagccatcgccaagcaagccctgaaaaagcccatcaagggcaaacaggccccccgaaaaaaagctcaaggaaaaacgcaacagaatcgcaaacttacggatttctaccctgtccgaaggagctccaggaagagcaaagccgagctgcagtctgaagaaaggaaaagaatagatgaattgattgaaagtgggaaggaagaaggaatgaagattgacctcatcgatggcaaaggcaggggtgtgattgccaccaagcagttctcccggggtgactttgtggtggaataccacggggacctcatcgagatcaccgacgccaagaaacgggaggctctgtacgcacaggacccttccacgggctgctacatgtactattttcagtatctgagcaaaacctactgcgtggatgcaactagagagacaaatcgcctaggaagactgatcaatcacagcaaatgtgggaactgccaaaccaaactgcacgacatcgacggcgtacctcacctcatcctcatcgcctcccgagacatcgcggctggggaggagctcctgtatgactatggggaccgcagcaaggcttccattgaagcccacccgtggctgaagcattaaccggtgggccccgtgccctccccgccccactttcccttcttcaaaggacaaagtgccctcaaagggaattgaattttttttttacacacttaatcttagcggattacttcagatgtttttaaaaagtatattaagatgccttttcactgtagtatttaaatatctgttacaggtttccaaggtggacttgaacagatggccttatattaccaaaacttttatattctagttgtttttgtactttttttgcatacaagccgaacgtttgtgcttcccgtgcatgcagtcaaagactcagcacaggttttagaggaaatagtcaaacatgaactaggaagccaggtgagtctcctttctccagtggaagagccgggaccttccccctgcacccccgacatccagggacggggtgtgaggaagacgctgcctcccaatggcctggacgggatgtttccaagctcttgttcccctaacgtctcaacaggcgctcactgaagtgtatgaatattttttaaaaaggtttttgcagtaagctagtcttcccctctgctttctcgaaagcttactgagccccgggccccaagcacgggccgggcatagatttcctcttccacaagctgccgcttttctgggcaccttgaagcatcagggcgtgaaatcaaactagatgtgggcagggagagggttgcttacctgccctgctggggcagggtttcctgaaactgggttaattctttatagaaatgtgaacactgaatttattttaaaaaataataataaaaatttaaaaaaattaaaaataaa

SEQ ID NO: 180788 - DNA, 901 bp, Homo sapiens
  Payload ID: 15605
  Gene Symbol: SETD8
  Gene Name: SET domain containing (lysine methyltransferase) 8
  ENST ID: ENST00000437502
  CDS Start-End: 5-901
ccgaatgcgctggctgtggctcctgctcttcccagattccccagtcaccctgagagaagtcctcccgtcgcagccctggaggctgcggggctgcagtgatttgagaggggagaacgtatttaccgggcagtcaaagatctattcctacatgagcccgaacaaatgctctggaatgcgtttcccccttcaggaagagaactcagttacacatcacgaagtcaaatgccaggggaaaccattagccggaatctacaggaaacgagaagagaaaagaaatgctgggaacgcagtacggagcgccatgaagtccgaggaacagaagatcaaagacgccaggaaaggtcccctggtaccttttccaaaccaaaaatctgaagcagcagaacctccaaaaactccaccctcatcttgtgattccaccaatgcagccatcgccaagcaagccctgaaaaagcccatcaagggcaaacaggccccccgaaaaaaagctcaaggaaaaacgcaacagaatcgcaaacttacggatttctaccctgtccgaaggagctccaggaagagcaaagccgagctgcagtctgaagaaaggaaaagaatagatgaattgattgaaagtgggaaggaagaaggaatgaagattgacctcatcgatggcaaaggcaggggtgtgattgccaccaagcagttctcccggggtgactttgtggtggaataccacggggacctcatcgagatcaccgacgccaagaaacgggaggctctgtacgcacaggacccttccacgggctgctacatgtactattttcagtatctgagcaaaacctactgcgtggatgcaactagagagacaaatcgcctaggaagactgatcaatcacagcaaatgtgggaactgccaaaccaaa

SEQ ID NO: 180789 - DNA, 6903 bp, Homo sapiens
  Payload ID: 15606
  Gene Symbol: SETD1A
  Gene Name: SET domain containing 1A
  Uniprot ID: O15047
  ENST ID: ENST00000262519
  CDS Start-End: 687-5810
atcctcagaattcctcgggtccctcgatactcggctgaaaattctcatcggactctgagaggagcgctgggctggaggcattttccccagggacagaagcgggctattctctcacttgggccagtaagaaaaatccaaaaaaagttgtcgactctgccagcagggattggctaacgggccgttattttcttgactccaccaaggcggatgaaggggaggctacggctgaggccgggaacagtggcgaatctgcagcctctcagaatttggcagtgcaaggaagggacggggaagagaagcaaagcggcgcgcatcctgtccagcgattcgccccgcccgcccggtgaatctgcgtctgcagaacgcgccactgaaggttccccagcgctggctggcctcctcccctccgccccgccccttttcctcagggactagtcgcagctttcgtcgccgccgattcgtcaaggtcccgggccgcagcatctagatcgtcgtggcgaagccgactctccgggggatgcggccaatctccaagctccctgggccgcaacttccgagcctcccagggcgccggccgaggcgaagccgctaccctcggccccgtgggtcccccggcagcgcctgtggcgaaagtgcgaatgcagaccctgtgcccgctgggcctcgcgcagtgtaaatgagcaaagatggatcaggaaggtgggggagatgggcagaaggccccgagcttccagtggcggaactacaagctcatcgtggatcctgccttggaccctgccctgcgcaggccttctcagaaggtgtaccgctatgatggagtccacttcagtgtcaacgactcaaagtatataccagtcgaagacctccaagacccccgttgccatgtcaggtccaaaaacagagacttttccctcccagtccctaagtttaagctggacgagttctatattggacagattccactgaaggaagtgacttttgcaaggctgaatgacaacgtgcgggagaccttcctgaaggatatgtgccgtaagtacggtgaggtggaagaggtagagatcctccttcacccccgtacgcgcaagcacctgggcctggcccgtgtgctcttcaccagcactcggggcgccaaggaaacggtcaaaaacctccaccttacctccgtcatgggcaacatcatccatgcccagcttgacatcaaaggacaacaacgaatgaaatactatgaactaattgtcaatggctcctacacccctcagactgtgcccactgggggcaaggccctgagtgagaagttccaaggctcgggtgcagccactgagacggccgaatcccgccgccgctcttcctctgacacagctgcctacccagcaggcaccactgcggtgggcactcctggcaacggcaccccctgctcccaggacacaagcttctccagcagccgacaagataccccatcttcctttggccagttcacacctcagtcctcccaaggaaccccctacacgtctcggggcagcaccccctactctcaggactctgcctactccagcagcaccacttcaacctccttcaagccccggcggtcagagaacagctaccaagatgccttttcccgccgccacttctctgcatcttcagcctccacaaccgcctccacggccatcgccgccaccactgcagccactgcctcatcctccgcctcttcctcctcattgtcctcgtcctcctcgtcatcctcttcctcctcgtcctctcagtttcgtagttctgatgcaaactacccagcgtattatgaaagctggaatcgctaccagcgccatacttcctacccaccacgccgggccacacgggaggaaccccctggagccccttttgctgaaaatacagctgagcgcttcccaccttcttacacctcctacctgccccccgagcccagccggcccaccgaccaggactaccggcctcctgcctcagaggctccacccccggagcctccagaacctggtggaggcgggggtggaggagggcccagccctgagagagaagaagttcggacttccccccgcccagcctcccctgcccgctctggctccccagccccggagaccaccaatgagagtgtgcccttcgcccagcacagcagcctggattcccgcatcgagatgctgctgaaggagcagcgctccaagttttccttcttggcctctgacacagaggaggaggaagagaacagcagcatggtccttggggccagagatacagggagtgaggtgccttctgggtcagggcatgggccctgcacaccccctccggccccagctaattttgaggatgtggcacctacagggagcggggagccaggggctacccgggagtctcccaaggcaaatggacagaaccaggcttctccatgctcttctggagacgacatggagatctccgacgacgaccggggtggctcaccccctccggccccgacgccccctcagcagcctccgccacctccccctcccccgccgcctcctcctccctacctggcgtcccttcctcttggttatcctccccaccaacctgcctacctcctcccacccagacctgatgggccgccgccccctgagtaccccccacctcctccaccacccccgcacatctatgactttgtgaactccttggagctcatggaccgacttggggctcagtggggagggatgcccatgtccttccagatgcagacccagatgttaactcggctccatcagctgcggcagggcaagggattgattgccgcctcagctggcccccccggtggggcctttggggaggccttcctcccgtttccacccccgcaggaggcagcctacggcttgccgtatgctctatatgcacaggggcaggagggcagaggggcatactcacgggaggcctaccacctgcccatgccaatggcagccgagcccctgccctcctcctcagtctcgggagaggaggcccggctgccacccagggaagaagcagagctggcagagggcaagaccctcccgacagcaggcaccgtgggccgtgtgctcgccatgctggtccaggagatgaagagcatcatgcagcgagacctcaaccgcaagatggtggagaacgtggccttcggagcctttgaccagtggtgggagagcaaggaggagaaggccaagccattccagaacgcggccaagcagcaagccaaggaggaggataaagagaagacgaagctgaaggagcctggcctgctgtccctcgtggactgggccaagagcgggggcactacgggcatcgaggctttcgcctttgggtcagggctgagaggggccctgcggctgccttcattcaaggtaaagcggaaagagccatcggaaatttccgaggccagtgaggaaaagaggcctcgtccctccactcctgctgaggaagatgaagacgaccctgaacaagagaaggaggctggagagccaggacgtccggggaccaagcccccgaagcgggacgaagagcgaggcaagacccagggcaagcaccgcaagtcctttgctctggacagcgaaggggaggaggcatcccaggagtcctcctcggagaaggatgaggaggatgacgaggaagatgaggaagatgaagatcgagaggaagctgtggataccacaaagaaggagacagaggtgtcggatggcgaggacgaggaaagcgattcgtcttccaaatgttctctgtatgctgactcagatggcgaaaatgacagcacatcagactccgagagcagcagctcttccagctcctcatcctcctcctcctcctcgtcctcatcctcctcgtcctcttcatcctctgagtcctcctctgaagatgaagaggaagaggagcggccagcagcccttccctcagcctccccgccccccagagaagtcccagtgcccacgccagcacctgtggaggtgccagtgccggaaagggttgcaggctccccagtcacacccctgcccgaacaggaggcgtctccagcaaggcctgcaggccccacggaggagtcaccccccagtgcgcctctgcgtcccccagaaccacctgctgggcccccggcccctgccccacgccccgatgagcgtccctcttctcccatccccctcctgcccccacccaagaaacgccggaaaactgtctccttctctgccatcgaggtggtgccagccccggagccccctccagccacaccgccgcaggccaagtttcccggcccagcctcccgcaaggctccccggggcgtggagcggaccatccgcaacctgcccctggaccacgcatctctggtcaagagttggcccgaggaggtgtcccgaggaggccggagccgggctggaggccgaggccgcctcaccgaggaagaggaggctgagccagggacagaggtggacctggcggtcctggccgacctggccctgacccctgcccggcgcgggctgcctgccctgcctgctgttgaagactcagaggccacagagacatcggacgaggccgagcgccctaggcccctgctcagccacatcctcctggagcacaactatgccctggccgtcaagcccacgccccctgcgccagccctgcggcccccggagccagtgcccgcacccgccgccctcttcagttccccagctgatgaggtcctggaggcccccgaggtggtggtggctgaggcggaggagcccaagccgcagcaactgcagcagcagcgggaggagggcgaagaggagggggaggaagagggggaggaagaggaggaggagtcctctgacagcagcagcagcagcgatggggagggcgccctccggaggcgcagcctccgctcccacgcccggcgccgccgccctccgcccccacccccgccgccaccgccccgcgcctacgagccacgcagtgagtttgaacagatgaccatcctgtatgacatttggaactcgggcctggactcagaggacatgagttacctgcggcttacgtacgagcggctgctgcagcagacaagcggggctgactggctcaacgacactcactgggtccatcacacaatcaccaacctgaccaccccaaaacgcaagcggcggccccaggatgggccccgggagcaccagacaggctcagcccgcagcgaaggctactaccccatcagcaagaaggagaaggacaagtacctggacgtgtgcccagtctcggcccggcagctggagggcgtggacactcaggggacgaaccgcgtgctgtccgagcgccggtccgagcagcggcggctgctgagcgccatcggtacctccgccatcatggacagtgacctgctgaaactcaaccagctcaagttccggaagaagaagctccgatttggccggagccggatccacgagtggggtctgtttgccatggaacccattgctgctgacgagatggtcatcgaatacgtgggtcagaacatccgtcagatggtggccgacatgcgggagaagcgctacgtgcaggagggcattggcagcagctacctgttccgggtggaccacgacaccatcatcgatgccaccaagtgtggcaacctggccagattcatcaaccactgctgcacgcctaactgctacgccaaggtcatcaccatcgagtcccagaagaagatcgtgatctactccaagcagcccattggcgtggacgaggagatcacctacgactacaagttcccactggaagacaacaagatcccgtgtctgtgtggcacagagagctgccggggctccctaaactgaggtggggcaggatgggtgcccacacccctatttattccccctggtgccctgagctcccagcacccccccagccttagtgggctcagcagggcccacatgcccccatctccaagcgtggggttgggggccccaagcccagcgagggagcctcagtccctggaggcagcttctgcctctcctgtcacccctgcccaccaccccctgattgtttttctttgcggagaagaagctgtaaatgttttgtagcagccagcagctgtttcctgtggaaacctggggtgccggcctgtacagattctgtcctggggggctacacagtcctcttgctttgtgttaatggggacttccccttacgccctgcgtgtacccctccccagtttaggggtctctggggcagtggccatgttctccccctgggggggctctgcacccccagtcctggggactccgtgcctggaaccctgcctcatctgttcctgccagaccctgagggtcacccttccaccctggtgtcactccccggctcagccaggccaggatggcggggtgggtcccttttgctgggctggactgtacatatgttaatagcgcaaacccgacgccacatttttataattgtgattaaactttattgtacaaaagtgtttggtcggtgtatttgggcaggagcgaggggttgggggtagagggcacggagggttgtgcaagttgaagagagggaaaagtgggtacctgaagtgtggggcaggtaaaggggccttcaggcaagagcccagacctgcagagacagtccgagactgtctcggaccccctgacaggctgcagcagccgcacccgcaccaggaataccccaccagtgcccgccagggtggtgccaaggtcaggcctccccttcctacaatcacagctgcagctggacctccggcctcctgggaagcccagcaggagggaaggcctgaggtcacactgtgggatgaggtcaccgctggctccacccacagccccagaccccttcagcccactctgcaagttcgagcttcatccccaccaagttctccgctggacccagatgccagtggagcacagagcggcc

SEQ ID NO: 180790 - DNA, 926 bp, Homo sapiens
  Payload ID: 15606
  Gene Symbol: SETD1A
  Gene Name: SET domain containing 1A
  ENST ID: ENST00000452917
  CDS Start-End: 186-926
caaggtcccgggccgcagcatctagatcgtcgtggcgaagccgactctccgggggatgcggccaatctccaagctccctgggccgcaacttccgagcctcccagggcgccggccgaggcgaagccgctaccctcggccccgtgggtcccccggcagcgcctgtggcgaaatgtaaatgagcaaagatggatcaggaaggtgggggagatgggcagaaggccccgagcttccagtggcggaactacaagctcatcgtggatcctgccttggaccctgccctgcgcaggccttctcagaaggtgtaccgctatgatggagtccacttcagtgtcaacgactcaaagtatataccagtcgaagacctccaagacccccgttgccatgtcaggtccaaaaacagagacttttccctcccagtccctaagtttaagctggacgagttctatattggacagattccactgaaggaagtgacttttgcaaggctgaatgacaacgtgcgggagaccttcctgaaggatatgtgccgtaagtacggtgaggtggaagaggtagagatcctccttcacccccgtacgcgcaagcacctgggcctggcccgtgtgctcttcaccagcactcggggcgccaaggaaacggtcaaaaacctccaccttacctccgtcatgggcaacatcatccatgcccagcttgacatcaaaggacaacaacgaatgaaatactatgaactaattgtcaatggctcctacacccctcagactgtgcccactgggggcaaggccctgagtgagaagttccaaggctcgggtgcagccactgagacggccgaatcccgccgccgctcttcctctgacacagctgcctacccagcaggcaccactgcggtgggcactcctggcaacggcaccccctgctcccaggacaca

SEQ ID NO: 180791 - DNA, 5772 bp, Homo sapiens
  Payload ID: 15607
  Gene Symbol: SETD1B
  Gene Name: SET domain containing 1B
  ENST ID: ENST00000267197
  CDS Start-End: 1-5772
atggagaacagtcaccccccccaccaccaccaccagcagcccccgccgcagcccggcccttcgggcgagaggaggaaccaccattggagaagttacaagttgatgattgacccggctctgaaaaaggggcatcataaactgtaccgctacgatgggcagcatttcagcctggcgatgtccagcaaccgcccggtggaaattgtcgaagatccccgggtcgtcgggatctggaccaaaaacaaggagctggagctgtcggtgcccaaattcaagatcgatgagttctacgtgggcccggtgcctccgaagcaggtgacatttgccaagctgaatgataacatccgtgaaaacttcctgagggacatgtgcaagaagtatggggaggtggaggaggtggagattttgtacaaccccaagaccaagaagcacctgggcatcgccaaggtggtctttgccacggtccggggagccaaggatgccgttcagcacttgcacagcacttccgtcatgggcaacattatccacgtggagctggacaccaaaggggaaacccgaatgcggttctatgaactgttggtcactggccgatacaccccccagaccctcccagtgggcgagctggacgctgtctctccaatcgtgaatgagaccctgcagctgtcagatgccctgaagcgcctcaaggatggaggcctgtctgcaggctgtggctccggctcctcctctgtcacccccaatagcggtgggacacccttctcccaggacacagcttattccagctgccgcctggacacacccaactcctatggacagggcaccccgctcacaccgcgcctgggcacccctttctcacaggactccagctactccagccgccagcccacaccctcatacctcttcagccaggaccctgcagtgaccttcaaggcccggcgccacgagagcaagttcacggacgcctacaaccgccgccacgaacatcattatgtacacaattctcccgcggtcactgcggtggccggggccacagccgctttccggggttcctcggacctcccgttcggagcagtcggcggcactgggggcagcagcggtcccccgttcaaggctcaaccacaggattcagccacatttgcccacactccaccacccgcccaagcaacccctgctcctggattcaagtctgctttctctccgtatcagaccccagtggcccacttccctccacccccggaagagcccaccgccacagccgcttttggggcccgcgacagtggggagttccggagggcaccggcgcccccacccctgccacctgctgagcctctggccaaggagaagccaggcacgccacccggcccgccgccccccgacaccaacagcatggagctgggcggccggcccaccttcggctggagtcctgagccctgtgacagccctggcacgcccacgctggagtcgtcccctgcagggccagagaaaccccacgacagcctggactcgcgcatcgagatgctgctgaaggagcagcgcaccaagctgctcttcctgagggagccggactcggacaccgagctgcagatggagggcagccccatctcctcctcctcctcccagctctccccactggccccctttggcaccaactcccagccaggcttccggggccccacgcccccctcgtcacgcccctccagcaccggcctggaggatatcagcccaacacccctcccagactccgacgaggacgaggagctcgacctgggccttgggcctcggcctccacctgagccaggccccccggaccctgctgggcttctgagccagacagctgaggtggccttggacctggttggagacagaaccccgacctcagagaagatggatgagggccagcagtcctcaggcgaggacatggagatctcggatgacgagatgccctcggcccccatcaccagcgctgactgccccaagcccatggtggtgaccccaggagcggcagccgtggcagccccttctgtgctagccccaaccctgccgctgcccccgccacctggcttccccccgctgccccccccaccaccaccacccccaccgcagcctggcttccccatgcccccaccgctgcccccaccgccgcccccaccccctccagcccaccctgctgtgacagtgcccccaccacccttgccagcgccgcctggagtcccgcccccacccatcctgccaccactgcccccctttccgccgggcctgttccctgtgatgcaggtggacatgagccacgtgctgggtggccagtggggcggcatgcccatgtccttccagatgcaaacgcaggtgctcagccggctgatgacgggccagggcgcctgcccctacccgcccttcatggccgctgcggccgccgctgcctcagctgggctccagtttgtcaacctgccgccctaccggggccccttctccctgagcaactccggcccaggccgcgggcagcactggccaccactgcccaagtttgacccgtcagtgcctccaccaggctacatgccacgccaggaggacccacacaaagccacggtggatggcgtcctgctggtggtcctcaaagaactcaaggccatcatgaagcgtgacctgaaccgcaagatggtggaagtggtggctttccgggcctttgacgagtggtgggacaagaaggagcggatggccaaggcctcgctgaccccggtgaagtcgggcgagcacaaggacgaggacaggccgaagcccaaggaccgcatcgcctcgtgcctgctggagtcatggggcaagggcgagggcctgggctacgagggcctgggcctgggcattgggctgcgtggggccattcgcctgccctccttcaaggtcaagaggaaggagccaccagacaccacctcatctggcgaccagaagcggctgcggccctcgacctctgtggatgaggaagatgaagagtccgagcgagagcgagaccgggatatggcagacaccccctgtgagctcgccaagcgggaccccaagggcgtgggtgtgcggcggcggccggcgcggcctctggagctggacagtggtggggaggaggacgagaaggagtcattggaggaggaacaggagagcaccgaggaggaagaggaggcggaggaggaggaggaggaggaagatgacgacgatgacgacagtgatgaccgggacgagtctgagaacgatgacgaggacacagccctgtcagaggcgagtgagaaggacgaaggggactcggatgaagaggagacagtgagcattgtaacctccaaggccgaagccacgtcgtccagtgagagttccgagtcttctgagtttgagtcaagctccgagtcctcgccctcatcctcggaggatgaggaggaggtagtggccagggaagaggaggaagaagaggaggaggaggagatggtggccgaggaaagcatggcttctgcaggccctgaggactttgagcaggacggggaggaagcggctctggccccgggggcacctgcagtggactcgttgggcatggaagaggaggtggacatcgagactgaggctgtggcccctgaggagcggccctccatgctggacgagccccccttgcctgtgggtgttgaagagccagcggactccagggagccgcctgaggaaccaggcctgagccaggaaggggccatgttgctgtctccagagccccctgccaaggaggtggaggctcgacccccattgtcccctgagcgagctccagaacatgacctggaagtggagccggagccccctatgatgctccccttgccgctgcaaccaccattgccgcccccacgaccaccccggccacccagcccaccgccggagcctgagaccacagatgcctcacacccatctgtccctccggagccccttgccgaggaccaccccccgcatactccaggcctctgtggcagcctggccaagtcgcagagcacagagacggtgccagccacaccaggcggggagcccccgctatcagggggcagcagtggcctgtccctgagctctccgcaagtgcccggcagccccttctcctacccagccccgtcccctagcttgagcagtgggggcctccctcggacacctggccgggacttcagcttcacacccaccttctccgagcccagcgggcccttgctcctgcccgtctgcccactccccactggccgacgcgatgaacgctccgggcccctggcctccccggtgctcctggagacgggcctgcccctccctctgccccttcccctgcccttgcccttggcattgcccgccgtcttgcgggcccaggctcgtgcgcccaccccgctgccacccctgctgcccgcccccctggcctcttgccctcccccaatgaagaggaagccgggccggccccggcgatccccaccatctatgctctccttggatgggcccttggtccgaccaccagcaggggccgcccttggaagggaactcctgctcctgccgggccagccacagacccccgtcttccccagcacccatgacccccggacggtgaccctggacttccggaacgcggggatcccagcccctccaccaccccttcccccccagccacccccacccccacctcccccacctgtagagcccaccaagctgccctttaaggagctagacaaccagtggccctccgaggccattcctccgggcccccgtgggcgcgatgaggtcactgaggaatacatggagttggccaagagccgggggccgtggcgccggccacctaagaagcgccatgaggacctggtgccacctgcgggctcgcccgaactctcgccaccccagcccctcttccggccccgctcggagtttgaggagatgaccatcctgtatgacatctggaacggtggcatcgatgaggaggacatccgcttcctgtgtgtcacctacgagcgactgctacagcaggacaatggcatggactggcttaacgacacgctctgggtctaccatccctccaccagcctctcttcagctaagaagaagaaacgggacgatggcatccgcgagcacgtgacgggctgtgcccgcagtgagggcttctacaccatcgacaagaaggacaagctcagatacctcaacagcagccgtgccagcaccgatgagccccccgcagacacccagggcatgagcatcccagcacagccccacgcctccacccgggcaggctcggagcggcgttcggagcagcgccgcctgctgtcctccttcactggcagctgtgacagtgacctgctcaagttcaaccagctcaagttccggaagaaaaagctcaagttctgcaagagccacattcacgactggggcttgttcgccatggagcccatcgcggctgacgagatggtcatcgagtacgtgggccagaatatccgtcaggtgatcgcagacatgcgggagaagcgttatgaggacgagggcatcgggagcagctacatgttccgggtggaccatgacaccatcatcgacgccaccaagtgcggcaacttcgcgcgcttcatcaaccacagctgcaaccccaactgctatgccaaggtgatcacggtggagtcacagaagaagatagtcatctactcgaagcagcacattaacgtcaatgaggagattacctatgactataagttccccatcgaggacgtcaagatcccctgcctctgtggctccgagaactgccgggggaccctcaactag

SEQ ID NO: 180792 - DNA, 8185 bp, Homo sapiens
  Payload ID: 15607
  Gene Symbol: SETD1B
  Gene Name: SET domain containing 1B
  Uniprot ID: Q9UPS6
  ENST ID: ENST00000542440
  CDS Start-End: 69-5840
gggggacaccatgtactggctggcggcgcagggaggccggcgcccggcggggatgttgggttaacggcatggagaacagtcaccccccccaccaccaccaccagcagcccccgccgcagcccggcccttcgggcgagaggaggaaccaccattggagaagttacaagttgatgattgacccggctctgaaaaaggggcatcataaactgtaccgctacgatgggcagcatttcagcctggcgatgtccagcaaccgcccggtggaaattgtcgaagatccccgggtcgtcgggatctggaccaaaaacaaggagctggagctgtcggtgcccaaattcaagatcgatgagttctacgtgggcccggtgcctccgaagcaggtgacatttgccaagctgaatgataacatccgtgaaaacttcctgagggacatgtgcaagaagtatggggaggtggaggaggtggagattttgtacaaccccaagaccaagaagcacctgggcatcgccaaggtggtctttgccacggtccggggagccaaggatgccgttcagcacttgcacagcacttccgtcatgggcaacattatccacgtggagctggacaccaaaggggaaacccgaatgcggttctatgaactgttggtcactggccgatacaccccccagaccctcccagtgggcgagctggacgctgtctctccaatcgtgaatgagaccctgcagctgtcagatgccctgaagcgcctcaaggatggaggcctgtctgcaggctgtggctccggctcctcctctgtcacccccaatagcggtgggacacccttctcccaggacacagcttattccagctgccgcctggacacacccaactcctatggacagggcaccccgctcacaccgcgcctgggcacccctttctcacaggactccagctactccagccgccagcccacaccctcatacctcttcagccaggaccctgcagtgaccttcaaggcccggcgccacgagagcaagttcacggacgcctacaaccgccgccacgaacatcattatgtacacaattctcccgcggtcactgcggtggccggggccacagccgctttccggggttcctcggacctcccgttcggagcagtcggcggcactgggggcagcagcggtcccccgttcaaggctcaaccacaggattcagccacatttgcccacactccaccacccgcccaagcaacccctgctcctggattcaagtctgctttctctccgtatcagaccccagtggcccacttccctccacccccggaagagcccaccgccacagccgcttttggggcccgcgacagtggggagttccggagggcaccggcgcccccacccctgccacctgctgagcctctggccaaggagaagccaggcacgccacccggcccgccgccccccgacaccaacagcatggagctgggcggccggcccaccttcggctggagtcctgagccctgtgacagccctggcacgcccacgctggagtcgtcccctgcagggccagagaaaccccacgacagcctggactcgcgcatcgagatgctgctgaaggagcagcgcaccaagctgctcttcctgagggagccggactcggacaccgagctgcagatggagggcagccccatctcctcctcctcctcccagctctccccactggccccctttggcaccaactcccagccaggcttccggggccccacgcccccctcgtcacgcccctccagcaccggcctggaggatatcagcccaacacccctcccagactccgacgaggacgaggagctcgacctgggccttgggcctcggcctccacctgagccaggccccccggaccctgctgggcttctgagccagacagctgaggtggccttggacctggttggagacagaaccccgacctcagagaagatggatgagggccagcagtcctcaggcgaggacatggagatctcggatgacgagatgccctcggcccccatcaccagcgctgactgccccaagcccatggtggtgaccccaggagcggcagccgtggcagccccttctgtgctagccccaaccctgccgctgcccccgccacctggcttccccccgctgccccccccaccaccaccacccccaccgcagcctggcttccccatgcccccaccgctgcccccaccgccgcccccaccccctccagcccaccctgctgtgacagtgcccccaccacccttgccagcgccgcctggagtcccgcccccacccatcctgccaccactgcccccctttccgccgggcctgttccctgtgatgcaggtggacatgagccacgtgctgggtggccagtggggcggcatgcccatgtccttccagatgcaaacgcaggtgctcagccggctgatgacgggccagggcgcctgcccctacccgcccttcatggccgctgcggccgccgctgcctcagctgggctccagtttgtcaacctgccgccctaccggggccccttctccctgagcaactccggcccaggccgcgggcagcactggccaccactgcccaagtttgacccgtcagtgcctccaccaggctacatgccacgccaggaggacccacacaaagccacggtggatggcgtcctgctggtggtcctcaaagaactcaaggccatcatgaagcgtgacctgaaccgcaagatggtggaagtggtggctttccgggcctttgacgagtggtgggacaagaaggagcggatggccaaggcctcgctgaccccggtgaagtcgggcgagcacaaggacgaggacaggccgaagcccaaggaccgcatcgcctcgtgcctgctggagtcatggggcaagggcgagggcctgggctacgagggcctgggcctgggcattgggctgcgtggggccattcgcctgccctccttcaaggtcaagaggaaggagccaccagacaccacctcatctggcgaccagaagcggctgcggccctcgacctctgtggatgaggaagatgaagagtccgagcgagagcgagaccgggatatggcagacaccccctgtgagctcgccaagcgggaccccaagggcgtgggtgtgcggcggcggccggcgcggcctctggagctggacagtggtggggaggaggacgagaaggagtcattgtcggaggaacaggagagcaccgaggaggaagaggaggcggaggaggaggaggaggaggaagatgacgacgatgacgacagtgatgaccgggacgagtctgagaacgatgacgaggacacagccctgtcagaggcgagtgagaaggacgaaggggactcggatgaagaggagacagtgagcattgtaacctccaaggccgaagccacgtcgtccagtgagagttccgagtcttctgagtttgagtcaagctccgagtcctcgccctcatcctcggaggatgaggaggaggtagtggccagggaagaggaggaagaagaggaggaggaggagatggtggccgaggaaagcatggcttctgcaggccctgaggactttgagcaggacggggaggaagcggctctggccccgggggcacctgcagtggactcgttgggcatggaagaggaggtggacatcgagactgaggctgtggcccctgaggagcggccctccatgctggacgagccccccttgcctgtgggtgttgaagagccagcggactccagggagccgcctgaggaaccaggcctgagccaggaaggggccatgttgctgtctccagagccccctgccaaggaggtggaggctcgacccccattgtcccctgagcgagctccagaacatgacctggaagtggagccggagccccctatgatgctccccttgccgctgcaaccaccattgccgcccccacgaccaccccggccacccagcccaccgccggagcctgagaccacagatgcctcacacccatctgtccctccggagccccttgccgaggaccaccccccgcatactccaggcctctgtggcagcctggccaagtcgcagagcacagagacggtgccagccacaccaggcggggagcccccgctatcagggggcagcagtggcctgtccctgagctctccgcaagtgcccggcagccccttctcctacccagccccgtcccctagcttgagcagtgggggcctccctcggacacctggccgggacttcagcttcacacccaccttctccgagcccagcgggcccttgctcctgcccgtctgcccactccccactggccgacgcgatgaacgctccgggcccctggcctccccggtgctcctggagacgggcctgcccctccctctgccccttcccctgcccttgcccttggcattgcccgccgtcttgcgggcccaggctcgtgcgcccaccccgctgccacccctgctgcccgcccccctggcctcttgccctcccccaatgaagaggaagccgggccggccccggcgatccccaccatctatgctctccttggatgggcccttggtccgaccaccagcaggggccgcccttggaagggaactcctgctcctgccgggccagccacagacccccgtcttccccagcacccatgacccccggacggtgaccctggacttccggaacgcggggatcccagcccctccaccaccccttcccccccagccacccccacccccacctcccccacctgtagagcccaccaagctgccctttaaggagctagacaaccagtggccctccgaggccattcctccgggcccccgtgggcgcgatgaggtcactgaggaatacatggagttggccaagagccgggggccgtggcgccggccacctaagaagcgccatgaggacctggtgccacctgcgggctcgcccgaactctcgccaccccagcccctcttccggccccgctcggagtttgaggagatgaccatcctgtatgacatctggaacggtggcatcgatgaggaggacatccgcttcctgtgtgtcacctacgagcgactgctacagcaggacaatggcatggactggcttaacgacacgctctgggtctaccatccctccaccagcctctcttcagctaagaagaagaaacgggacgatggcatccgcgagcacgtgacgggctgtgcccgcagtgagggcttctacaccatcgacaagaaggacaagctcagatacctcaacagcagccgtgccagcaccgatgagccccccgcagacacccagggcatgagcatcccagcacagccccacgcctccacccgggcaggctcggagcggcgttcggagcagcgccgcctgctgtcctccttcactggcagctgtgacagtgacctgctcaagttcaaccagctcaagttccggaagaaaaagctcaagttctgcaagagccacattcacgactggggcttgttcgccatggagcccatcgcggctgacgagatggtcatcgagtacgtgggccagaatatccgtcaggtgatcgcagacatgcgggagaagcgttatgaggacgagggcatcgggagcagctacatgttccgggtggaccatgacaccatcatcgacgccaccaagtgcggcaacttcgcgcgcttcatcaaccacagctgcaaccccaactgctatgccaaggtgatcacggtggagtcacagaagaagatagtcatctactcgaagcagcacattaacgtcaatgaggagattacctatgactataagttccccatcgaggacgtcaagatcccctgcctctgtggctccgagaactgccgggggaccctcaactaggccccggcaccagactcaaaggatgtcagccgtagccctgggactcccgagcgtggagcccctggccccggggcccggccccccgcgcccgcccccatttcaggtgctgtcctctacccagcggccattcagggcctggcgccccacactaccccctggagcccctggctccggcccctccgcgggaaagggcttctctgtcgttcagcccacgtctctctcattttaacaaacgcccctttcaggatttctgtttaactccagcatcagcttctctctctccgtctctcctcccctctctctcttctctgtctcttctctctcccaccatcaccctcggcctcttcctgtgaatgctgctacgttgttttgtcttctctatttttttcctcgttgtgagaaaagacatttaaccgttgaaatgtgaaggtggaatcagagaggggccccgcgggggtctgcagaggcctcagtgtggctgtgcgtggcccgtgtcctggaagccacccggacctggacgcagggccaggtgctgtgggaaggatggaggcccccacggccttgacctcagaacactacgccctgaaagcgcccctcactgcccgtgggcacagtgaggagaccccacacctttccccacccgagctgcagcctgttccttccccagaggcctggggcaccactgacccggtggaccctgatggagctaagctgtcccaggcaggggtctccgctctgggctttccctgccacctcacaccccagcaccccctaaaccttgggttcaatgtttactttctcattcggatgccagcaacgcgggagcctctcggaggccccagtgcaggtgaggggcgctgagaacgcgggcagccactctcttctgcccttgccttcgccctgggtgggacagggctcccaagggcaggcgggtcccccagtcccgccattacgggttgtcagaccgtctgcgtgtggcattttttggcttataagcttcacccactcacccccaacccacaccccacatccccctgccggcagcccctcaacctaagaaggccagagcatatttattttcggagggagcagattacttctcccagagaaaggaaaatcttggaaaagatttaaaaacacaaatctaagccttgacggtttttttttcccttttgacccccttcccatctcttcagaatttattcccatggcttttttttttcttgtgcgtgtataaaatcaaaaggaaggggaaaaaggtttttgaagttcagaaccaacttctgtatatagaggctgccgcaaaggactttctcttgggaacattgtttcttgtagaaacatgcgggaagacattttttgctcatttctttgtacttccaaaaaaaaaggaaaaaaaagacaaaagcaagtccccccgtaccccagaaagcagaggaggcgtgtaaataatttctggaaagtgactgttgtgacccggagtcctcatcaagatgagcgcgctccatgagggagctgctcccaccctgcggacgcaggcggccggagcctctggtatctcagcttgtgtcaagcttgttatcatgtaaattctgtacaaagaattgttatttttctcttttttgttgttggtggttttgttgtgtgttttttgttgttttttttttattcctttcccccaggccctctctatttgagactgtgcccgccggtttcaagatcaaggaaattggtggcaacaagacacagatggggtacctgggcacagcggcgaacttctcttccgtttgcggttttctgcctaattgtgcaactgaggaaataatttatttttcacatgaggaaatgcgtagcttgtagagacggctgattcaagttacatgtacagcctccaaagggctgtctccattctgtccccttcccataaaagaagtgggggtgttcgagaagaccagggaagggacccttgcctcacccctccccctggcctcaccttgctcccagccatcgtgcccagtgttaacctcggctggccttcactaaggggactagacctccctctccccaggagccccagccccagagtggtttgcaataatcaagatatgtgtcgagtcatttttctttcaactccctcatttttcattgaacaaatctctgcttttcaagagttgggggtttctgctattttttgctttctctccctccccctgcaaagatgagaaccaatgagttttagggatgtttgtgcgggtagactccatcatccatatgtaacttgttttgaagagaagtgtttccgttgtgtgtcttgatgtaaatatttgttcatatttttgtgaatt

SEQ ID NO: 180793 - DNA, 5969 bp, Homo sapiens
  Payload ID: 15607
  Gene Symbol: SETD1B
  Gene Name: SET domain containing 1B
  Uniprot ID: Q9UPS6
  ENST ID: ENST00000604567
  CDS Start-End: 69-5969
gggggacaccatgtactggctggcggcgcagggaggccggcgcccggcggggatgttgggttaacggcatggagaacagtcaccccccccaccaccaccaccagcagcccccgccgcagcccggcccttcgggcgagaggaggaaccaccattggagaagttacaagttgatgattgacccggctctgaaaaaggggcatcataaactgtaccgctacgatgggcagcatttcagcctggcgatgtccagcaaccgcccggtggaaattgtcgaagatccccgggtcgtcgggatctggaccaaaaacaaggagctggagctgtcggtgcccaaattcaagatcgatgagttctacgtgggcccggtgcctccgaagcaggtgacatttgccaagctgaatgataacatccgtgaaaacttcctgagggacatgtgcaagaagtatggggaggtggaggaggtggagattttgtacaaccccaagaccaagaagcacctgggcatcgccaaggtggtctttgccacggtccggggagccaaggatgccgttcagcacttgcacagcacttccgtcatgggcaacattatccacgtggagctggacaccaaaggggaaacccgaatgcggttctatgaactgttggtcactggccgatacaccccccagaccctcccagtgggcgagctggacgctgtctctccaatcgtgaatgagaccctgcagctgtcagatgccctgaagcgcctcaaggatggaggcctgtctgcaggctgtggctccggctcctcctctgtcacccccaatagcggtgggacacccttctcccaggacacagcttattccagctgccgcctggacacacccaactcctatggacagggcaccccgctcacaccgcgcctgggcacccctttctcacaggactccagctactccagccgccagcccacaccctcatacctcttcagccaggaccctgcagtgaccttcaaggcccggcgccacgagagcaagttcacggacgcctacaaccgccgccacgaacatcattatgtacacaattctcccgcggtcactgcggtggccggggccacagccgctttccggggttcctcggacctcccgttcggagcagtcggcggcactgggggcagcagcggtcccccgttcaaggctcaaccacaggattcagccacatttgcccacactccaccacccgcccaagcaacccctgctcctggattcaagtctgctttctctccgtatcagaccccagtggcccacttccctccacccccggaagagcccaccgccacagccgcttttggggcccgcgacagtggggagttccggagggcaccggcgcccccacccctgccacctgctgagcctctggccaaggagaagccaggcacgccacccggcccgccgccccccgacaccaacagcatggagctgggcggccggcccaccttcggctggagtcctgagccctgtgacagccctggcacgcccacgctggagtcgtcccctgcagggccagagaaaccccacgacagcctggactcgcgcatcgagatgctgctgaaggagcagcgcaccaagctgctcttcctgagggagccggactcggacaccgagctgcagatggagggcagccccatctcctcctcctcctcccagctctccccactggccccctttggcaccaactcccagccaggcttccggggccccacgcccccctcgtcacgcccctccagcaccggcctggaggatatcagcccaacacccctcccagactccgacgaggacgaggagctcgacctgggccttgggcctcggcctccacctgagccaggccccccggaccctgctgggcttctgagccagacagctgaggtggccttggacctggttggagacagaaccccgacctcagagaagatggatgagggccagcagtcctcaggcgaggacatggagatctcggatgacgagatgccctcggcccccatcaccagcgctgactgccccaagcccatggtggtgaccccaggagcggcagccgtggcagccccttctgtgctagccccaaccctgccgctgcccccgccacctggcttccccccgctgccccccccaccaccaccacccccaccgcagcctggcttccccatgcccccaccgctgcccccaccgccgcccccaccccctccagcccaccctgctgtgacagtgcccccaccacccttgccagcgccgcctggagtcccgcccccacccatcctgccaccactgcccccctttccgccgggcctgttccctgtgatgcaggtggacatgagccacgtgctgggtggccagtggggcggcatgcccatgtccttccagatgcaaacgcaggtgctcagccggctgatgacgggccagggcgcctgcccctacccgcccttcatggccgctgcggccgccgctgcctcagctgggctccagtttgtcaacctgccgccctaccggggccccttctccctgagcaactccggcccaggccgcgggcagcactggccaccactgcccaagtttgacccgtcagtgcctccaccaggctacatgccacgccaggaggacccacacaaagccacggtggatggcgtcctgctggtggtcctcaaagaactcaaggccatcatgaagcgtgacctgaaccgcaagatggtggaagtggtggctttccgggcctttgacgagtggtgggacaagaaggagcggatggccaaggcctcgctgaccccggtgaagtcgggcgagcacaaggacgaggacaggccgaagcccaaggaccgcatcgcctcgtgcctgctggagtcatggggcaagggcgagggcctgggctacgagggcctgggcctgggcattgggctgcgtggggccattcgcctgccctccttcaaggtcaagaggaaggagccaccagacaccacctcatctggcgaccagaagcggctgcggccctcgacctctgtggatgaggaagatgaagagtccgagcgagagcgagaccgggatatggcagacaccccctgtgagctcgccaagcgggaccccaagggcgtgggtgtgcggcggcggccggcgcggcctctggagctggacagtggtggggaggaggacgagaaggagtcattgtcggcgtcctcgtcctcatccgcgtcatcatcctcggggtcctcaaccacctcaccctcgtcctcggcctccgacaaggaggaggaacaggagagcaccgaggaggaagaggaggcggaggaggaggaggaggaggaagtccccaggagccagctctcctcctcctcaacctcatccacatcagataaggatgacgacgatgacgacagtgatgaccgggacgagtctgagaacgatgacgaggacacagccctgtcagaggcgagtgagaaggacgaaggggactcggatgaagaggagacagtgagcattgtaacctccaaggccgaagccacgtcgtccagtgagagttccgagtcttctgagtttgagtcaagctccgagtcctcgccctcatcctcggaggatgaggaggaggtagtggccagggaagaggaggaagaagaggaggaggaggagatggtggccgaggaaagcatggcttctgcaggccctgaggactttgagcaggacggggaggaagcggctctggccccgggggcacctgcagtggactcgttgggcatggaagaggaggtggacatcgagactgaggctgtggcccctgaggagcggccctccatgctggacgagccccccttgcctgtgggtgttgaagagccagcggactccagggagccgcctgaggaaccaggcctgagccaggaaggggccatgttgctgtctccagagccccctgccaaggaggtggaggctcgacccccattgtcccctgagcgagctccagaacatgacctggaagtggagccggagccccctatgatgctccccttgccgctgcaaccaccattgccgcccccacgaccaccccggccacccagcccaccgccggagcctgagaccacagatgcctcacacccatctgtccctccggagccccttgccgaggaccaccccccgcatactccaggcctctgtggcagcctggccaagtcgcagagcacagagacggtgccagccacaccaggcggggagcccccgctatcagggggcagcagtggcctgtccctgagctctccgcaagtgcccggcagccccttctcctacccagccccgtcccctagcttgagcagtgggggcctccctcggacacctggccgggacttcagcttcacacccaccttctccgagcccagcgggcccttgctcctgcccgtctgcccactccccactggccgacgcgatgaacgctccgggcccctggcctccccggtgctcctggagacgggcctgcccctccctctgccccttcccctgcccttgcccttggcattgcccgccgtcttgcgggcccaggctcgtgcgcccaccccgctgccacccctgctgcccgcccccctggcctcttgccctcccccaatgaagaggaagccgggccggccccggcgatccccaccatctatgctctccttggatgggcccttggtccgaccaccagcaggggccgcccttggaagggaactcctgctcctgccgggccagccacagacccccgtcttccccagcacccatgacccccggacggtgaccctggacttccggaacgcggggatcccagcccctccaccaccccttcccccccagccacccccacccccacctcccccacctgtagagcccaccaagctgccctttaaggagctagacaaccagtggccctccgaggccattcctccgggcccccgtgggcgcgatgaggtcactgaggaatacatggagttggccaagagccgggggccgtggcgccggccacctaagaagcgccatgaggacctggtgccacctgcgggctcgcccgaactctcgccaccccagcccctcttccggccccgctcggagtttgaggagatgaccatcctgtatgacatctggaacggtggcatcgatgaggaggacatccgcttcctgtgtgtcacctacgagcgactgctacagcaggacaatggcatggactggcttaacgacacgctctgggtctaccatccctccaccagcctctcttcagctaagaagaagaaacgggacgatggcatccgcgagcacgtgacgggctgtgcccgcagtgagggcttctacaccatcgacaagaaggacaagctcagatacctcaacagcagccgtgccagcaccgatgagccccccgcagacacccagggcatgagcatcccagcacagccccacgcctccacccgggcaggctcggagcggcgttcggagcagcgccgcctgctgtcctccttcactggcagctgtgacagtgacctgctcaagttcaaccagctcaagttccggaagaaaaagctcaagttctgcaagagccacattcacgactggggcttgttcgccatggagcccatcgcggctgacgagatggtcatcgagtacgtgggccagaatatccgtcaggtgatcgcagacatgcgggagaagcgttatgaggacgagggcatcgggagcagctacatgttccgggtggaccatgacaccatcatcgacgccaccaagtgcggcaacttcgcgcgcttcatcaaccacagctgcaaccccaactgctatgccaaggtgatcacggtggagtcacagaagaagatagtcatctactcgaagcagcacattaacgtcaatgaggagattacctatgactataagttccccatcgaggacgtcaagatcccctgcctctgtggctccgagaactgccgggggaccctcaactag

SEQ ID NO: 180794 - DNA, 5901 bp, Homo sapiens
  Payload ID: 15607
  Gene Symbol: SETD1B
  Gene Name: SET domain containing 1B
  Uniprot ID: Q9UPS6
  ENST ID: ENST00000619791
  CDS Start-End: 1-5901
atggagaacagtcaccccccccaccaccaccaccagcagcccccgccgcagcccggcccttcgggcgagaggaggaaccaccattggagaagttacaagttgatgattgacccggctctgaaaaaggggcatcataaactgtaccgctacgatgggcagcatttcagcctggcgatgtccagcaaccgcccggtggaaattgtcgaagatccccgggtcgtcgggatctggaccaaaaacaaggagctggagctgtcggtgcccaaattcaagatcgatgagttctacgtgggcccggtgcctccgaagcaggtgacatttgccaagctgaatgataacatccgtgaaaacttcctgagggacatgtgcaagaagtatggggaggtggaggaggtggagattttgtacaaccccaagaccaagaagcacctgggcatcgccaaggtggtctttgccacggtccggggagccaaggatgccgttcagcacttgcacagcacttccgtcatgggcaacattatccacgtggagctggacaccaaaggggaaacccgaatgcggttctatgaactgttggtcactggccgatacaccccccagaccctcccagtgggcgagctggacgctgtctctccaatcgtgaatgagaccctgcagctgtcagatgccctgaagcgcctcaaggatggaggcctgtctgcaggctgtggctccggctcctcctctgtcacccccaatagcggtgggacacccttctcccaggacacagcttattccagctgccgcctggacacacccaactcctatggacagggcaccccgctcacaccgcgcctgggcacccctttctcacaggactccagctactccagccgccagcccacaccctcatacctcttcagccaggaccctgcagtgaccttcaaggcccggcgccacgagagcaagttcacggacgcctacaaccgccgccacgaacatcattatgtacacaattctcccgcggtcactgcggtggccggggccacagccgctttccggggttcctcggacctcccgttcggagcagtcggcggcactgggggcagcagcggtcccccgttcaaggctcaaccacaggattcagccacatttgcccacactccaccacccgcccaagcaacccctgctcctggattcaagtctgctttctctccgtatcagaccccagtggcccacttccctccacccccggaagagcccaccgccacagccgcttttggggcccgcgacagtggggagttccggagggcaccggcgcccccacccctgccacctgctgagcctctggccaaggagaagccaggcacgccacccggcccgccgccccccgacaccaacagcatggagctgggcggccggcccaccttcggctggagtcctgagccctgtgacagccctggcacgcccacgctggagtcgtcccctgcagggccagagaaaccccacgacagcctggactcgcgcatcgagatgctgctgaaggagcagcgcaccaagctgctcttcctgagggagccggactcggacaccgagctgcagatggagggcagccccatctcctcctcctcctcccagctctccccactggccccctttggcaccaactcccagccaggcttccggggccccacgcccccctcgtcacgcccctccagcaccggcctggaggatatcagcccaacacccctcccagactccgacgaggacgaggagctcgacctgggccttgggcctcggcctccacctgagccaggccccccggaccctgctgggcttctgagccagacagctgaggtggccttggacctggttggagacagaaccccgacctcagagaagatggatgagggccagcagtcctcaggcgaggacatggagatctcggatgacgagatgccctcggcccccatcaccagcgctgactgccccaagcccatggtggtgaccccaggagcggcagccgtggcagccccttctgtgctagccccaaccctgccgctgcccccgccacctggcttccccccgctgccccccccaccaccaccacccccaccgcagcctggcttccccatgcccccaccgctgcccccaccgccgcccccaccccctccagcccaccctgctgtgacagtgcccccaccacccttgccagcgccgcctggagtcccgcccccacccatcctgccaccactgcccccctttccgccgggcctgttccctgtgatgcaggtggacatgagccacgtgctgggtggccagtggggcggcatgcccatgtccttccagatgcaaacgcaggtgctcagccggctgatgacgggccagggcgcctgcccctacccgcccttcatggccgctgcggccgccgctgcctcagctgggctccagtttgtcaacctgccgccctaccggggccccttctccctgagcaactccggcccaggccgcgggcagcactggccaccactgcccaagtttgacccgtcagtgcctccaccaggctacatgccacgccaggaggacccacacaaagccacggtggatggcgtcctgctggtggtcctcaaagaactcaaggccatcatgaagcgtgacctgaaccgcaagatggtggaagtggtggctttccgggcctttgacgagtggtgggacaagaaggagcggatggccaaggcctcgctgaccccggtgaagtcgggcgagcacaaggacgaggacaggccgaagcccaaggaccgcatcgcctcgtgcctgctggagtcatggggcaagggcgagggcctgggctacgagggcctgggcctgggcattgggctgcgtggggccattcgcctgccctccttcaaggtcaagaggaaggagccaccagacaccacctcatctggcgaccagaagcggctgcggccctcgacctctgtggatgaggaagatgaagagtccgagcgagagcgagaccgggatatggcagacaccccctgtgagctcgccaagcgggaccccaagggcgtgggtgtgcggcggcggccggcgcggcctctggagctggacagtggtggggaggaggacgagaaggagtcattgtcggcgtcctcgtcctcatccgcgtcatcatcctcggggtcctcaaccacctcaccctcgtcctcggcctccgacaaggaggaggaacaggagagcaccgaggaggaagaggaggcggaggaggaggaggaggaggaagtccccaggagccagctctcctcctcctcaacctcatccacatcagataaggatgacgacgatgacgacagtgatgaccgggacgagtctgagaacgatgacgaggacacagccctgtcagaggcgagtgagaaggacgaaggggactcggatgaagaggagacagtgagcattgtaacctccaaggccgaagccacgtcgtccagtgagagttccgagtcttctgagtttgagtcaagctccgagtcctcgccctcatcctcggaggatgaggaggaggtagtggccagggaagaggaggaagaagaggaggaggaggagatggtggccgaggaaagcatggcttctgcaggccctgaggactttgagcaggacggggaggaagcggctctggccccgggggcacctgcagtggactcgttgggcatggaagaggaggtggacatcgagactgaggctgtggcccctgaggagcggccctccatgctggacgagccccccttgcctgtgggtgttgaagagccagcggactccagggagccgcctgaggaaccaggcctgagccaggaaggggccatgttgctgtctccagagccccctgccaaggaggtggaggctcgacccccattgtcccctgagcgagctccagaacatgacctggaagtggagccggagccccctatgatgctccccttgccgctgcaaccaccattgccgcccccacgaccaccccggccacccagcccaccgccggagcctgagaccacagatgcctcacacccatctgtccctccggagccccttgccgaggaccaccccccgcatactccaggcctctgtggcagcctggccaagtcgcagagcacagagacggtgccagccacaccaggcggggagcccccgctatcagggggcagcagtggcctgtccctgagctctccgcaagtgcccggcagccccttctcctacccagccccgtcccctagcttgagcagtgggggcctccctcggacacctggccgggacttcagcttcacacccaccttctccgagcccagcgggcccttgctcctgcccgtctgcccactccccactggccgacgcgatgaacgctccgggcccctggcctccccggtgctcctggagacgggcctgcccctccctctgccccttcccctgcccttgcccttggcattgcccgccgtcttgcgggcccaggctcgtgcgcccaccccgctgccacccctgctgcccgcccccctggcctcttgccctcccccaatgaagaggaagccgggccggccccggcgatccccaccatctatgctctccttggatgggcccttggtccgaccaccagcaggggccgcccttggaagggaactcctgctcctgccgggccagccacagacccccgtcttccccagcacccatgacccccggacggtgaccctggacttccggaacgcggggatcccagcccctccaccaccccttcccccccagccacccccacccccacctcccccacctgtagagcccaccaagctgccctttaaggagctagacaaccagtggccctccgaggccattcctccgggcccccgtgggcgcgatgaggtcactgaggaatacatggagttggccaagagccgggggccgtggcgccggccacctaagaagcgccatgaggacctggtgccacctgcgggctcgcccgaactctcgccaccccagcccctcttccggccccgctcggagtttgaggagatgaccatcctgtatgacatctggaacggtggcatcgatgaggaggacatccgcttcctgtgtgtcacctacgagcgactgctacagcaggacaatggcatggactggcttaacgacacgctctgggtctaccatccctccaccagcctctcttcagctaagaagaagaaacgggacgatggcatccgcgagcacgtgacgggctgtgcccgcagtgagggcttctacaccatcgacaagaaggacaagctcagatacctcaacagcagccgtgccagcaccgatgagccccccgcagacacccagggcatgagcatcccagcacagccccacgcctccacccgggcaggctcggagcggcgttcggagcagcgccgcctgctgtcctccttcactggcagctgtgacagtgacctgctcaagttcaaccagctcaagttccggaagaaaaagctcaagttctgcaagagccacattcacgactggggcttgttcgccatggagcccatcgcggctgacgagatggtcatcgagtacgtgggccagaatatccgtcaggtgatcgcagacatgcgggagaagcgttatgaggacgagggcatcgggagcagctacatgttccgggtggaccatgacaccatcatcgacgccaccaagtgcggcaacttcgcgcgcttcatcaaccacagctgcaaccccaactgctatgccaaggtgatcacggtggagtcacagaagaagatagtcatctactcgaagcagcacattaacgtcaatgaggagattacctatgactataagttccccatcgaggacgtcaagatcccctgcctctgtggctccgagaactgccgggggaccctcaactag

SEQ ID NO: 180795 - DNA, 8172 bp, Homo sapiens
  Payload ID: 15608
  Gene Symbol: SETD2
  Gene Name: SET domain containing 2
  ENST ID: ENST00000330022
  CDS Start-End: 1-4097
aatcttccccaccaaagtcaagggtggaattgggcaaaattcattttaagaaacatctgcttcatgtaacatccaggccactgctggctactaccacagcagtagcatctccacctactcatgcagcaccattaccagcagtgatagcagaatcaacaactgtagactcaccgccctcatctccgcctccaccgcctccacctgcccaagccacaacactctcatcaccagcaccagtaacagagccagtggccttgccacatacaccaataacagttctaatggcagcaccagtacccttaccagtagatgtagcagttagatctctgaaagaaccaccaattataattgtaccagaatctttagaagcagatactaagcaggacactatatctaatagtttagaagaacacgtaactcaaatattgaatgagcaagcagatatttcctcaaaaaaagaagattcccatattgggaaggatgaagaaattccagatagttctaagattagtctgagctgtaaaaaaacaggttctaagaagaaatcctcacaatctgaaggcatctttcttggttcagaatctgatgaagattctgtacggacttcttcaagtcaaagatcacatgatttaaaattttcagcaagcattgaaaaggaaagagattttaaaaagagctcagcacctttaaaaagtgaggatctagggaaaccttcacgatctaaaacagacagagatgataaatattttagctattcaaaacttgaaagagatactcggtatgtatcttcccgatgtagatcagaaagagagcgacggcggagcagatctcactctaggtctgagagaggctctagaactaatttatcctattccaggtcagaacgatctcattattatgactctgatcgtcgctaccataggagctccccttatcgagagaggacgcgctattctcggccatacacagataacagagcacgagagagttctgactcagaagaagagtataagaagacatactcaaggcgtacctcatctcattcctcttcttacagagacctaaggacatcatcctattctaaatctgatcgggactgtaaaactgagacctcttacttagagatggaaagaagaggcaagtattcttcaaaactagaaagagaatctaaaaggacttcagaaaatgaagcaattaaaagatgttgttctccccctaatgaactgggattccgacgagggtcatcatattctaagcatgacagtagtgcttcccgttataaatctaccctttcaaaacctatacccaagtctgataaatttaaaaattctttctgttgtacagaattaaatgaagaaatcaaacagtctcattcttttagtttacagacaccttgttcaaaaggtagtgaattaagaatgattaataaaaatcctgaaagagaaaaggctgggtctccagctccatcaaatcgattaaatgattcacctactttaaaaaagctagatgaattgcctatttttaagtccgaatttataacacatgatagccatgatagtattaaggaattagactctttatctaaagtgaagaatgatcaattaagaagtttttgtcccatagaattaaatataaatggatctcctggggcagaatctgatttggcaacattttgcacttctaaaactgatgctgttttaatgacttctgatgatagtgtgactggatcggaattatcccctttggtcaaagcatgcatgctttcatcaaatggatttcagaatattagtaggtgcaaagaaaaagacttggatgatacctgcatgctgcataagaagtcagaaagcccatttagagaaacagaacctctggtgtcaccacaccaagataaactcatgtctatgccagttatgactgtggattattccaaaacagtagttaaagaaccagttgatacgagggtttcttgctgcaaaaccaaagattcagacatatactgtactttgaacgatagcaacccttctttgtgtaactctgaagctgaaaatattgagccttcagttatgaagatttcttcaaatagctttatgaatgtgcatttggaatcaaaaccagttatatgtgatagtagaaatttgacagatcactcaaaatttgcatgtgaagaatataagcagagcatcggtagcactagttcagcttctgttaatcattttgatgatttatatcaacctattgggagttcaggtattgcttcatctcttcagagtcttccaccaggaataaaggtggacagtctaactctcttgaaatgcggagagaacacatctccagttctggatgcagtgctaaagagtaaaaaaagttcagagtttttaaagcatgcagggaaagaaacaatagtagaagtaggtagtgaccttcctgattcaggaaagggatttgcttccagggagaacaggcgtaataatgggttatctgggaaatgtttgcaagaggctcaagaagaagggaattccatattgcctgaaagaagaggaagaccagaaatctctttagatgaaagaggagaaggaggacatgtgcatacttctgatgactcagaagttgtattttcttcttgtgatttgaatttaaccatggaagacagtgatggtgtaacttatgcattaaagtgtgacagtagtggtcatgccccagaaattgtgtctacagttcatgaagattattctggctcttctgaaagttcaaatgatgaaagtgattcagaagatacagattcggatgatagcagtattccaagaaaccgtctccagtctgttgtggttgtgccaaagaattctactttgcccatggaagaaacaagtccttgttcttctcggagcagtcaaagttatagacactattctgaccattgggaagatgagagattggagtcaaggagacatttgtatgaggaaaaatttgaaagtatagcaagtaaagcctgtcctcaaactgataagtttttccttcataaaggaacagagaagaatccggaaatttcttttacacagtccagtagaaaacaaatagataatcgcctgcctgaactttctcatcctcagagtgatggggttgatagtacaagtcatacagatgtgaaatctgaccctctgggtcacccaaattcagaggaaaccgtgaaagccaaaataccttctaggcagcaagaagagctgccaatttattcttctgattttgaagatgtcccaaataagtcttggcaacagaccactttccaaaacaggccagatagtagactgggaaaaacagaattgagtttttcttcctcttgtgagataccacatgtggatggcttgcactcatcagaagagctcagaaacttaggttgggacttctctcaagaaaagccttctaccacgtatcagcaacctgacagtagctatggagcttgtggtggacacaagtatcagcaaaatgcagaacagtatggtgggacacgtgattactggcaaggcaatggttactgggatccaagatcaggtagacctcctggaactggggttgtgtatgatcgaactcaaggacaagtaccagattccctaacagatgatcgtgaagaagaggagaattgggatcaacaggatggatcccatttttcagaccagtccgataaatttcttctatcccttcagaaagacaaggggtcagtgcaagcacctgaaataagcagcaattccattaaggacactttagctgtgaatgaaaagaaagatttttcaaaaaacttagaaaaaaatgatatcaaagatagagggcctcttaaaaaaaggaggcaggaaatagagagtgattctgaaagtgatggtgagcttcaggacagaaagaaagttagagtggaggtagagcagggagagacatcagtgcccccaggttcagcactggttgggccctcctgtgtcatggatgacttcagggacccacagcgatggaaggaatgtgccaagcaagggaaaatgccatgttactttgatcttattgaagaaaatgtttatttaacagaaagaatgaagtatctttgggtactgtattagtccgttttcatgctgctgataaagacatacccgagactgggaagaaaaagaggtttaattggacttgcagttccacatggctggggaggcctcagaattgcggcaggaggcaaaaggcacttcttacatggtggtggcaagagaaaaagaggaagaagcaaaagtgaaaacccttgataaacccatcagatcttgtgtgacttaatcaccatcacaagaataacacgagaaaggccggcccccatgattcagttacctcctcaagttgagtttgggtggggaaacagccaaaccatatcagaaagaagaataaatctcatcgagatattaagcgaatgcagtgtgagtgtacacctctttctaaagatgaaagagctcaaggtgaaatagcatgtggggaagattgtcttaatcgtcttctcatgattgaatgttcttctcggtgtccaaatggggattattgttccaatagacggtttcagagaaaacagcatgcagatgtggaagtcatactcacagaaaagaaaggctggggcttgagagctgccaaagaccttccttcataatagatgccactcaaaaaggaaattgctctcgtttcatgaatcacagctgtgaaccaaattgtgaaacccaaaaatggactgtgaacggacaactgagggttgggttttttaccaccaaactggttccttcaggctcagagttaacgtttgactatcagttccagagatatggaaaagaagcccagaaatgtttctgcggatcagccaattgccggggttacctgggaggagaaaacagagtcagcatcagagcagcaggagggaaaatgaagaaggaacgatctcgtaagaaggattcagtggatggagagctagaagctctgatggaaaatggtgagggtctctctgataaaaaccaggtgctcagcttatcccggctaatggttagaattgaaactttggagcagaaacttacctgtctggaactcatacagaacacacactcacagtcctgcctgaagtcctttctggaacgtcatgggctgtctttgttgtggatctggatggcagagctaggtgacggccgggaaagtaaccagaagcttcaggaagagattataaagactttggaacacttgcccattcctactaaaaatatgttggaggaaagcaaagtacttccaattattcaacgctggtctcagactaagactgctgtccctccgttgagtgaaggagatgggtattctagtgagaatacatcgcgtgctcatacaccactcaacacacctgatccttccaccaagctgagcacagaagctgacacagacactcccaagaaactaatgtttcgcagactgaaaattataagtgaaaatagcatggacagtgcaatctctgatgcaaccagtgagctagaaggcaaggatggcaaagaggatcttgatcaattagaaaatgtccctgtagaggaagaggaagaattgcagtcacaacagctactcccacaacagctgcctgaatgcaaagttgatagtgaaaccaacatagaagctagtaagctacctacatctgaaccagaagctgacgctgaaatagagcccaaagagagcaacggcacaaaactagaagaacctattaatgaagaaacaccatcccaagatgaagaggagggtgtgtctgatgtggagagtgaaaggagccaagaacagccagataaaacagtggatataagtgatttggccaccaaactcctggacagttggaaagacctaaaggaggtatatcgaattccaaagaaaagtcaaactgaaaaggaaaacacaacaactgaacgaggaagggatgctgttggcttcagagatcaaacacctgccccgaagactcctaataggtcaagagagagagacccagacaagcaaactcaaaataaagagaaaaggaaacgaagaagctccctctcaccaccctcttctgcctatgagcggggaacaaaaaggccagatgacagatatgatacaccaacttctaaaaagaaagtacgaattaaagaccgcaataaactttctacagaggaacgccggaagttgtttgagcaagaggtggctcaacgggaggctcagaaacaacagcaacagatgcagaacctgggaatgacatcaccactgccctatgactctcttggttataatgccccgcatcatccctttgctggttacccaccaggttatcccatgcaggcctatgtggatcccagcaaccctaatgctggaaaggtgctcctgcccacacccagcatggacccagtgtgttctcctgctccttatgatcatgctcagcccttggtgggacattctacagaacccctttctgcccctccaccagtaccagtggtgccacatgtggcagctcctgtggaagtttccagttcccagtatgtggcccagagtgatggtgtagtacaccaagactccagcgttgctgtcttgccagtgccggcccccggcccagttcagggacagaattatagtgtttgggattcaaaccaacagtctgtcagtgtacagcagcagtactctcctgcacagtctcaagcaaccatatattatcaaggacagacatgtccaacagtctatggtgtgacatcaccttattcacagacaactccaccaattgtacagagttatgcccagccaagtcttcagtatatccaggggcaacagattttcacagctcatccacaaggagtggtggtacagccagccgcagcagtgactacaatagttgcaccagggcagcctcagcccttgcagccatctgaaatggttgtgacaaataatctcttggatctgccgcccccctctcctcccaaaccaaaaaccattgtcttacctcccaactggaagacagctcgagatccagaagggaagatttattactaccatgtgatcacaaggcagactcagtgggatcctcctacttgggaaagcccaggagatgatgccagccttgagcatgaagctgagatggacctgggaactccaacatatgatgaaaaccccatgaaggcctcgaaaaagcccaagacagcagaagcagacacctccagtgaactagcaaagaaaagcaaagaagtattcagaaaagagatgtcccagttcatcgtccagtgcctgaacccttaccggaaacctgactgcaaagtgggaagaattaccacaactgaagactttaaacatctggctcgcaagctgactcacggtgttatgaataaggagctgaagtactgtaagaatcctgaggacctggagtgcaatgagaatgtgaaacacaaaaccaaggagtacattaagaagtacatgcagaagtttggggctgtttacaaacccaaagaggacactgaattagagtgactgttgggccagggtgggaggatgggtggtcaggtaagacagactctagggagaggaaatcctgtgggcctttctgtcccacccctgtcagcactgtgctactgatgatacatcaccctggggaattcaaccctgcagatgtcaactgaaggccacaaaaatgaactccatctacaagtgattacctagttgtgagctgttggcatgtggttagaagccatcagaggtgcaagggcttagaaaagaccctggccagacctgactccactcttaaacctgggtcttctccttggcggtgctgtcagcgcacagacccatgcgcatccccacccacaaccctttaccctgatgatctgtattatattttaatgtatatgtgaatatattgaaaataatttgttttttcctggtttttgtttggttttcgttttgcttttagcctctacatgctaggatcacaggaagactttgtaaggacagtttaagttctcctgcaaggtttaatttgttatcatgtaaatattctaaagcaggctgccttgtggttttggccagccttgtgctatgttgataagattgatttactgcttaaaatcactttactttatccaatttttactgaactttttatgtaaaaaaataaaatcaattaaagaa

SEQ ID NO: 180796 - DNA, 8142 bp, Homo sapiens
  Payload ID: 15608
  Gene Symbol: SETD2
  Gene Name: SET domain containing 2
  Uniprot ID: Q9BYW2
  ENST ID: ENST00000409792
  CDS Start-End: 44-7738
gctgcggggagggggctcgcgtcgccgtctccagccgctcccgatgaagcagctgcagccgcagccgcctccgaagatgggggatttctacgacccggagcacccgacccctgaagaagaagaaaatgaggcaaagattgaaaatgtgcagaaaacaggtttcatcaaaggaccaatgttcaaaggtgttgcttctagtcgatttttgcccaaaggcaccaaaacaaaagttaatttggaagaacagggacgacagaaggtgtcattcagcttcagccttacaaagaaaactttgcagaataggtttctcactgcacttggcaatgaaaagcaaagtgatactccaaaccctccagctgtacctcttcaggtagactcgactcctaaaatgaaaatggaaattggtgataccttatctactgcagaagaatcttccccaccaaagtcaagggtggaattgggcaaaattcattttaagaaacatctgcttcatgtaacatccaggccactgctggctactaccacagcagtagcatctccacctactcatgcagcaccattaccagcagtgatagcagaatcaacaactgtagactcaccgccctcatctccgcctccaccgcctccacctgcccaagccacaacactctcatcaccagcaccagtaacagagccagtggccttgccacatacaccaataacagttctaatggcagcaccagtacccttaccagtagatgtagcagttagatctctgaaagaaccaccaattataattgtaccagaatctttagaagcagatactaagcaggacactatatctaatagtttagaagaacacgtaactcaaatattgaatgagcaagcagatatttcctcaaaaaaagaagattcccatattgggaaggatgaagaaattccagatagttctaagattagtctgagctgtaaaaaaacaggttctaagaagaaatcctcacaatctgaaggcatctttcttggttcagaatctgatgaagattctgtacggacttcttcaagtcaaagatcacatgatttaaaattttcagcaagcattgaaaaggaaagagattttaaaaagagctcagcacctttaaaaagtgaggatctagggaaaccttcacgatctaaaacagacagagatgataaatattttagctattcaaaacttgaaagagatactcggtatgtatcttcccgatgtagatcagaaagagagcgacggcggagcagatctcactctaggtctgagagaggctctagaactaatttatcctattccaggtcagaacgatctcattattatgactctgatcgtcgctaccataggagctccccttatcgagagaggacgcgctattctcggccatacacagataacagagcacgagagagttctgactcagaagaagagtataagaagacatactcaaggcgtacctcatctcattcctcttcttacagagacctaaggacatcatcctattctaaatctgatcgggactgtaaaactgagacctcttacttagagatggaaagaagaggcaagtattcttcaaaactagaaagagaatctaaaaggacttcagaaaatgaagcaattaaaagatgttgttctccccctaatgaactgggattccgacgagggtcatcatattctaagcatgacagtagtgcttcccgttataaatctaccctttcaaaacctatacccaagtctgataaatttaaaaattctttctgttgtacagaattaaatgaagaaatcaaacagtctcattcttttagtttacagacaccttgttcaaaaggtagtgaattaagaatgattaataaaaatcctgaaagagaaaaggctgggtctccagctccatcaaatcgattaaatgattcacctactttaaaaaagctagatgaattgcctatttttaagtccgaatttataacacatgatagccatgatagtattaaggaattagactctttatctaaagtgaagaatgatcaattaagaagtttttgtcccatagaattaaatataaatggatctcctggggcagaatctgatttggcaacattttgcacttctaaaactgatgctgttttaatgacttctgatgatagtgtgactggatcggaattatcccctttggtcaaagcatgcatgctttcatcaaatggatttcagaatattagtaggtgcaaagaaaaagacttggatgatacctgcatgctgcataagaagtcagaaagcccatttagagaaacagaacctctggtgtcaccacaccaagataaactcatgtctatgccagttatgactgtggattattccaaaacagtagttaaagaaccagttgatacgagggtttcttgctgcaaaaccaaagattcagacatatactgtactttgaacgatagcaacccttctttgtgtaactctgaagctgaaaatattgagccttcagttatgaagatttcttcaaatagctttatgaatgtgcatttggaatcaaaaccagttatatgtgatagtagaaatttgacagatcactcaaaatttgcatgtgaagaatataagcagagcatcggtagcactagttcagcttctgttaatcattttgatgatttatatcaacctattgggagttcaggtattgcttcatctcttcagagtcttccaccaggaataaaggtggacagtctaactctcttgaaatgcggagagaacacatctccagttctggatgcagtgctaaagagtaaaaaaagttcagagtttttaaagcatgcagggaaagaaacaatagtagaagtaggtagtgaccttcctgattcaggaaagggatttgcttccagggagaacaggcgtaataatgggttatctgggaaatgtttgcaagaggctcaagaagaagggaattccatattgcctgaaagaagaggaagaccagaaatctctttagatgaaagaggagaaggaggacatgtgcatacttctgatgactcagaagttgtattttcttcttgtgatttgaatttaaccatggaagacagtgatggtgtaacttatgcattaaagtgtgacagtagtggtcatgccccagaaattgtgtctacagttcatgaagattattctggctcttctgaaagttcaaatgatgaaagtgattcagaagatacagattcggatgatagcagtattccaagaaaccgtctccagtctgttgtggttgtgccaaagaattctactttgcccatggaagaaacaagtccttgttcttctcggagcagtcaaagttatagacactattctgaccattgggaagatgagagattggagtcaaggagacatttgtatgaggaaaaatttgaaagtatagcaagtaaagcctgtcctcaaactgataagtttttccttcataaaggaacagagaagaatccggaaatttcttttacacagtccagtagaaaacaaatagataatcgcctgcctgaactttctcatcctcagagtgatggggttgatagtacaagtcatacagatgtgaaatctgaccctctgggtcacccaaattcagaggaaaccgtgaaagccaaaataccttctaggcagcaagaagagctgccaatttattcttctgattttgaagatgtcccaaataagtcttggcaacagaccactttccaaaacaggccagatagtagactgggaaaaacagaattgagtttttcttcctcttgtgagataccacatgtggatggcttgcactcatcagaagagctcagaaacttaggttgggacttctctcaagaaaagccttctaccacgtatcagcaacctgacagtagctatggagcttgtggtggacacaagtatcagcaaaatgcagaacagtatggtgggacacgtgattactggcaaggcaatggttactgggatccaagatcaggtagacctcctggaactggggttgtgtatgatcgaactcaaggacaagtaccagattccctaacagatgatcgtgaagaagaggagaattgggatcaacaggatggatcccatttttcagaccagtccgataaatttcttctatcccttcagaaagacaaggggtcagtgcaagcacctgaaataagcagcaattccattaaggacactttagctgtgaatgaaaagaaagatttttcaaaaaacttagaaaaaaatgatatcaaagatagagggcctcttaaaaaaaggaggcaggaaatagagagtgattctgaaagtgatggtgagcttcaggacagaaagaaagttagagtggaggtagagcagggagagacatcagtgcccccaggttcagcactggttgggccctcctgtgtcatggatgacttcagggacccacagcgatggaaggaatgtgccaagcaagggaaaatgccatgttactttgatcttattgaagaaaatgtttatttaacagaaagaaagaagaataaatctcatcgagatattaagcgaatgcagtgtgagtgtacacctctttctaaagatgaaagagctcaaggtgaaatagcatgtggggaagattgtcttaatcgtcttctcatgattgaatgttcttctcggtgtccaaatggggattattgttccaatagacggtttcagagaaaacagcatgcagatgtggaagtcatactcacagaaaagaaaggctggggcttgagagctgccaaagaccttccttcgaacacctttgtcctagaatattgtggagaggtactcgatcataaagagtttaaagctcgagtgaaggagtatgcacgaaacaaaaacatccattactatttcatggccctgaagaatgatgagataatagatgccactcaaaaaggaaattgctctcgtttcatgaatcacagctgtgaaccaaattgtgaaacccaaaaatggactgtgaacggacaactgagggttgggttttttaccaccaaactggttccttcaggctcagagttaacgtttgactatcagttccagagatatggaaaagaagcccagaaatgtttctgcggatcagccaattgccggggttacctgggaggagaaaacagagtcagcatcagagcagcaggagggaaaatgaagaaggaacgatctcgtaagaaggattcagtggatggagagctagaagctctgatggaaaatggtgagggtctctctgataaaaaccaggtgctcagcttatcccggctaatggttagaattgaaactttggagcagaaacttacctgtctggaactcatacagaacacacactcacagtcctgcctgaagtcctttctggaacgtcatgggctgtctttgttgtggatctggatggcagagctaggtgacggccgggaaagtaaccagaagcttcaggaagagattataaagactttggaacacttgcccattcctactaaaaatatgttggaggaaagcaaagtacttccaattattcaacgctggtctcagactaagactgctgtccctccgttgagtgaaggagatgggtattctagtgagaatacatcgcgtgctcatacaccactcaacacacctgatccttccaccaagctgagcacagaagctgacacagacactcccaagaaactaatgtttcgcagactgaaaattataagtgaaaatagcatggacagtgcaatctctgatgcaaccagtgagctagaaggcaaggatggcaaagaggatcttgatcaattagaaaatgtccctgtagaggaagaggaagaattgcagtcacaacagctactcccacaacagctgcctgaatgcaaagttgatagtgaaaccaacatagaagctagtaagctacctacatctgaaccagaagctgacgctgaaatagagcccaaagagagcaacggcacaaaactagaagaacctattaatgaagaaacaccatcccaagatgaagaggagggtgtgtctgatgtggagagtgaaaggagccaagaacagccagataaaacagtggatataagtgatttggccaccaaactcctggacagttggaaagacctaaaggaggtatatcgaattccaaagaaaagtcaaactgaaaaggaaaacacaacaactgaacgaggaagggatgctgttggcttcagagatcaaacacctgccccgaagactcctaataggtcaagagagagagacccagacaagcaaactcaaaataaagagaaaaggaaacgaagaagctccctctcaccaccctcttctgcctatgagcggggaacaaaaaggccagatgacagatatgatacaccaacttctaaaaagaaagtacgaattaaagaccgcaataaactttctacagaggaacgccggaagttgtttgagcaagaggtggctcaacgggaggctcagaaacaacagcaacagatgcagaacctgggaatgacatcaccactgccctatgactctcttggttataatgccccgcatcatccctttgctggttacccaccaggttatcccatgcaggcctatgtggatcccagcaaccctaatgctggaaaggtgctcctgcccacacccagcatggacccagtgtgttctcctgctccttatgatcatgctcagcccttggtgggacattctacagaacccctttctgcccctccaccagtaccagtggtgccacatgtggcagctcctgtggaagtttccagttcccagtatgtggcccagagtgatggtgtagtacaccaagactccagcgttgctgtcttgccagtgccggcccccggcccagttcagggacagaattatagtgtttgggattcaaaccaacagtctgtcagtgtacagcagcagtactctcctgcacagtctcaagcaaccatatattatcaaggacagacatgtccaacagtctatggtgtgacatcaccttattcacagacaactccaccaattgtacagagttatgcccagccaagtcttcagtatatccaggggcaacagattttcacagctcatccacaaggagtggtggtacagccagccgcagcagtgactacaatagttgcaccagggcagcctcagcccttgcagccatctgaaatggttgtgacaaataatctcttggatctgccgcccccctctcctcccaaaccaaaaaccattgtcttacctcccaactggaagacagctcgagatccagaagggaagatttattactaccatgtgatcacaaggcagactcagtgggatcctcctacttgggaaagcccaggagatgatgccagccttgagcatgaagctgagatggacctgggaactccaacatatgatgaaaaccccatgaaggcctcgaaaaagcccaagacagcagaagcagacacctccagtgaactagcaaagaaaagcaaagaagtattcagaaaagagatgtcccagttcatcgtccagtgcctgaacccttaccggaaacctgactgcaaagtgggaagaattaccacaactgaagactttaaacatctggctcgcaagctgactcacggtgttatgaataaggagctgaagtactgtaagaatcctgaggacctggagtgcaatgagaatgtgaaacacaaaaccaaggagtacattaagaagtacatgcagaagtttggggctgtttacaaacccaaagaggacactgaattagagtgactgttgggccagggtgggaggatgggtggtcaggtaagacagactctagggagaggaaatcctgtgggcctttctgtcccacccctgtcagcactgtgctactgatgatacatcaccctggggaattcaaccctgcagatgtcaactgaaggccacaaaaatgaactccatctacaagtgattacctagttgtgagctgttggcatgtggttagaagccatcagaggtgcaagggcttagaaaagaccctggccagacctgactccactcttaaacctgggtcttctccttggcggtgctgtcagcgcacagacccatgcgcatccccacccacaaccctttaccctgatgatctgtattatattttaatgtatatgtgaatatattgaaaataatttgttttt

SEQ ID NO: 180797 - DNA, 7555 bp, Homo sapiens
  Payload ID: 15608
  Gene Symbol: SETD2
  Gene Name: SET domain containing 2
  ENST ID: ENST00000431180
  CDS Start-End: 1-3871
ttcccatattgggaaggatgaagaaattccagatagttctaagattagtctgagctgtaaaaaaacaggttctaagaagaaatcctcacaatctgaaggcatctttcttggttcagaatctgatgaagattctgtacggacttcttcaagtcaaagatcacatgatttaaaattttcagcaagcattgaaaaggaaagagattttaaaaagagctcagcacctttaaaaagtgaggatctagggaaaccttcacgatctaaaacagacagagatgataaatattttagctattcaaaacttgaaagagatactcggtatgtatcttcccgatgtagatcagaaagagagcgacggcggagcagatctcactctaggtctgagagaggctctagaactaatttatcctattccaggtcagaacgatctcattattatgactctgatcgtcgctaccataggagctccccttatcgagagaggacgcgctattctcggccatacacagataacagagcacgagagagttctgactcagaagaagagtataagaagacatactcaaggcgtacctcatctcattcctcttcttacagagacctaaggacatcatcctattctaaatctgatcgggactgtaaaactgagacctcttacttagagatggaaagaagaggcaagtattcttcaaaactagaaagagaatctaaaaggacttcagaaaatgaagcaattaaaagatgttgttctccccctaatgaactgggattccgacgagggtcatcatattctaagcatgacagtagtgcttcccgttataaatctaccctttcaaaacctatacccaagtctgataaatttaaaaattctttctgttgtacagaattaaatgaagaaatcaaacagtctcattcttttagtttacagacaccttgttcaaaaggtagtgaattaagaatgattaataaaaatcctgaaagagaaaaggctgggtctccagctccatcaaatcgattaaatgattcacctactttaaaaaagctagatgaattgcctatttttaagtccgaatttataacacatgatagccatgatagtattaaggaattagactctttatctaaagtgaagaatgatcaattaagaagtttttgtcccatagaattaaatataaatggatctcctggggcagaatctgatttggcaacattttgcacttctaaaactgatgctgttttaatgacttctgatgatagtgtgactggatcggaattatcccctttggtcaaagcatgcatgctttcatcaaatggatttcagaatattagtaggtgcaaagaaaaagacttggatgatacctgcatgctgcataagaagtcagaaagcccatttagagaaacagaacctctggtgtcaccacaccaagataaactcatgtctatgccagttatgactgtggattattccaaaacagtagttaaagaaccagttgatacgagggtttcttgctgcaaaaccaaagattcagacatatactgtactttgaacgatagcaacccttctttgtgtaactctgaagctgaaaatattgagccttcagttatgaagatttcttcaaatagctttatgaatgtgcatttggaatcaaaaccagttatatgtgatagtagaaatttgacagatcactcaaaatttgcatgtgaagaatataagcagagcatcggtagcactagttcagcttctgttaatcattttgatgatttatatcaacctattgggagttcaggtattgcttcatctcttcagagtcttccaccaggaataaaggtggacagtctaactctcttgaaatgcggagagaacacatctccagttctggatgcagtgctaaagagtaaaaaaagttcagagtttttaaagcatgcagggaaagaaacaatagtagaagtaggtagtgaccttcctgattcaggaaagggatttgcttccagggagaacaggcgtaataatgggttatctgggaaatgtttgcaagaggctcaagaagaagggaattccatattgcctgaaagaagaggaagaccagaaatctctttagatgaaagaggagaaggaggacatgtgcatacttctgatgactcagaagttgtattttcttcttgtgatttgaatttaaccatggaagacagtgatggtgtaacttatgcattaaagtgtgacagtagtggtcatgccccagaaattgtgtctacagttcatgaagattattctggctcttctgaaagttcaaatgatgaaagtgattcagaagatacagattcggatgatagcagtattccaagaaaccgtctccagtctgttgtggttgtgccaaagaattctactttgcccatggaagaaacaagtccttgttcttctcggagcagtcaaagttatagacactattctgaccattgggaagatgagagattggagtcaaggagacatttgtatgaggaaaaatttgaaagtatagcaagtaaagcctgtcctcaaactgataagtttttccttcataaaggaacagagaagaatccggaaatttcttttacacagtccagtagaaaacaaatagataatcgcctgcctgaactttctcatcctcagagtgatggggttgatagtacaagtcatacagatgtgaaatctgaccctctgggtcacccaaattcagaggaaaccgtgaaagccaaaataccttctaggcagcaagaagagctgccaatttattcttctgattttgaagatgtcccaaataagtcttggcaacagaccactttccaaaacaggccagatagtagactgggaaaaacagaattgagtttttcttcctcttgtgagataccacatgtggatggcttgcactcatcagaagagctcagaaacttaggttgggacttctctcaagaaaagccttctaccacgtatcagcaacctgacagtagctatggagcttgtggtggacacaagtatcagcaaaatgcagaacagtatggtgggacacgtgattactggcaaggcaatggttactgggatccaagatcaggtagacctcctggaactggggttgtgtatgatcgaactcaaggacaagtaccagattccctaacagatgatcgtgaagaagaggagaattgggatcaacaggatggatcccatttttcagaccagtccgataaatttcttctatcccttcagaaagacaaggggtcagtgcaagcacctgaaataagcagcaattccattaaggacactttagctgtgaatgaaaagaaagatttttcaaaaaacttagaaaaaaatgatatcaaagatagagggcctcttaaaaaaaggaggcaggaaatagagagtgattctgaaagtgatggtgagcttcaggacagaaagaaagttagagtggaggtagagcagggagagacatcagtgcccccaggttcagcactggttgggccctcctgtgtcatggatgacttcagggacccacagcgatggaaggaatgtgccaagcaagggaaaatgccatgttactttgatcttattgaagaaaatgtttatttaacagaaagaaagaagaataaatctcatcgagatattaagcgaatgcagtgtgagtgtacacctctttctaaagatgaaagagctcaaggtgaaatagcatgtggggaagattgtcttaatcgtcttctcatgattgaatgttcttctcggtgtccaaatggggattattgttccaatagacggtttcagagaaaacagcatgcagatgtggaagtcatactcacagaaaagaaaggctggggcttgagagctgccaaagaccttccttcataatagatgccactcaaaaaggaaattgctctcgtttcatgaatcacagctgtgaaccaaattgtgaaacccaaaaatggactgtgaacggacaactgagggttgggttttttaccaccaaactggttccttcaggctcagagttaacgtttgactatcagttccagagatatggaaaagaagcccagaaatgtttctgcggatcagccaattgccggggttacctgggaggagaaaacagagtcagcatcagagcagcaggagggaaaatgaagaaggaacgatctcgtaagaaggattcagtggatggagagctagaagctctgatggaaaatggtgagggtctctctgataaaaaccaggtgctcagcttatcccggctaatggttagaattgaaactttggagcagaaacttacctgtctggaactcatacagaacacacactcacagtcctgcctgaagtcctttctggaacgtcatgggctgtctttgttgtggatctggatggcagagctaggtgacggccgggaaagtaaccagaagcttcaggaagagattataaagactttggaacacttgcccattcctactaaaaatatgttggaggaaagcaaagtacttccaattattcaacgctggtctcagactaagactgctgtccctccgttgagtgaaggagatgggtattctagtgagaatacatcgcgtgctcatacaccactcaacacacctgatccttccaccaagctgagcacagaagctgacacagacactcccaagaaactaatgtttcgcagactgaaaattataagtgaaaatagcatggacagtgcaatctctgatgcaaccagtgagctagaaggcaaggatggcaaagaggatcttgatcaattagaaaatgtccctgtagaggaagaggaagaattgcagtcacaacagctactcccacaacagctgcctgaatgcaaagttgatagtgaaaccaacatagaagctagtaagctacctacatctgaaccagaagctgacgctgaaatagagcccaaagagagcaacggcacaaaactagaagaacctattaatgaagaaacaccatcccaagatgaagaggagggtgtgtctgatgtggagagtgaaaggagccaagaacagccagataaaacagtggatataagtgatttggccaccaaactcctggacagttggaaagacctaaagcttctcagggcagcaaggagcttgttaacatcaccagctgaccatgtgtctccttttctcaactccatttccaacttcgtgctgaagaaaaacgagaacctagcgtgcattctgtgaagaaacaggaagatggttgggaagttggatgatgcatgaaaaatataataggaggtatatcgaattccaaagaaaagtcaaactgaaaaggaaaacacaacaactgaacgaggaagggatgctgttggcttcagagatcaaacacctgccccgaagactcctaataggtcaagagagagagacccagacaagcaaactcaaaataaagagaaaaggaaacgaagaagctccctctcaccaccctcttctgcctatgagcggggaacaaaaaggccagatgacagatatgatacaccaacttctaaaaagaaagtacgaattaaagaccgcaataaactttctacagaggaacgccggaagttgtttgagcaagaggtggctcaacgggaggctcagaaacaacagcaacagatgcagaacctgggaatgacatcaccactgccctatgactctcttggttataatgccccgcatcatccctttgctggttacccaccaggttatcccatgcaggcctatgtggatcccagcaaccctaatgctggaaaggtgctcctgcccacacccagcatggacccagtgtgttctcctgctccttatgatcatgctcagcccttggtgggacattctacagaacccctttctgcccctccaccagtaccagtggtgccacatgtggcagctcctgtggaagtttccagttcccagtatgtggcccagagtgatggtgtagtacaccaagactccagcgttgctgtcttgccagtgccggcccccggcccagttcagggacagaattatagtgtttgggattcaaaccaacagtctgtcagtgtacagcagcagtactctcctgcacagtctcaagcaaccatatattatcaaggacagacatgtccaacagtctatggtgtgacatcaccttattcacagacaactccaccaattgtacagagttatgcccagccaagtcttcagtatatccaggggcaacagattttcacagctcatccacaaggagtggtggtacagccagccgcagcagtgactacaatagttgcaccagggcagcctcagcccttgcagccatctgaaatggttgtgacaaataatctcttggatctgccgcccccctctcctcccaaaccaaaaaccattgtcttacctcccaactggaagacagctcgagatccagaagggaagatttattactaccatgtgatcacaaggcagactcagtgggatcctcctacttgggaaagcccaggagatgatgccagccttgagcatgaagctgagatggacctgggaactccaacatatgatgaaaaccccatgaaggcctcgaaaaagcccaagacagcagaagcagacacctccagtgaactagcaaagaaaagcaaagaagtattcagaaaagagatgtcccagttcatcgtccagtgcctgaacccttaccggaaacctgactgcaaagtgggaagaattaccacaactgaagactttaaacatctggctcgcaagctgactcacggtgttatgaataaggagctgaagtactgtaagaatcctgaggacctggagtgcaatgagaatgtgaaacacaaaaccaaggagtacattaagaagtacatgcagaagtttggggctgtttacaaacccaaagaggacactgaattagagtgactgttgggccagggtgggaggatgggtggtcaggtaagacagactctagggagaggaaatcctgtgggcctttctgtcccacccctgtcagcactgtgctactgatgatacatcaccctggggaattcaaccctgcagatgtcaactgaaggccacaaaaatgaactccatctacaagtgattacctagttgtgagctgttggcatgtggttagaagccatcagaggtgcaagggcttagaaaagaccctggccagacctgactccactcttaaacctgggtcttctccttggcggtgctgtcagcgcacagacccatgcgcatccccacccacaaccctttaccctgatgatctgtattatattttaatgtatatgtgaatatattgaaaataatttgttttttcctggtttttgtttggttttcgttttgcttttagcctctacatgctaggatcacaggaagactttgtaaggacagtttaagttctcctgcaaggtttaatttgttatcatgtaaatattctaaagcaggctgccttgtggttttggccagccttgtgctatgttgataagattgatttactgcttaaaatcactttactttatccaatttttactgaactttttatgtaaaaaaataaaatcaattaaagaacttggca

SEQ ID NO: 180798 - DNA, 7075 bp, Homo sapiens
  Payload ID: 15608
  Gene Symbol: SETD2
  Gene Name: SET domain containing 2
  ENST ID: ENST00000445387
  CDS Start-End: 1-5026
acgatctaaaacagacagagatgataaatattttagctattcaaaacttgaaagagatactcggtatgtatcttcccgatgtagatcagaaagagagcgacggcggagcagatctcactctaggtctgagagaggctctagaactaatttatcctattccaggtcagaacgatctcattattatgactctgatcgtcgctaccataggagctccccttatcgagagaggacgcgctattctcggccatacacagataacagagcacgagagagttctgactcagaagaagagtataagaagacatactcaaggcgtacctcatctcattcctcttcttacagagacctaaggacatcatcctattctaaatctgatcgggactgtaaaactgagacctcttacttagagatggaaagaagaggcaagtattcttcaaaactagaaagagaatctaaaaggacttcagaaaatgaagcaattaaaagatgttgttctccccctaatgaactgggattccgacgagggtcatcatattctaagcatgacagtagtgcttcccgttataaatctaccctttcaaaacctatacccaagtctgataaatttaaaaattctttctgttgtacagaattaaatgaagaaatcaaacagtctcattcttttagtttacagacaccttgttcaaaaggtagtgaattaagaatgattaataaaaatcctgaaagagaaaaggctgggtctccagctccatcaaatcgattaaatgattcacctactttaaaaaagctagatgaattgcctatttttaagtccgaatttataacacatgatagccatgatagtattaaggaattagactctttatctaaagtgaagaatgatcaattaagaagtttttgtcccatagaattaaatataaatggatctcctggggcagaatctgatttggcaacattttgcacttctaaaactgatgctgttttaatgacttctgatgatagtgtgactggatcggaattatcccctttggtcaaagcatgcatgctttcatcaaatggatttcagaatattagtaggtgcaaagaaaaagacttggatgatacctgcatgctgcataagaagtcagaaagcccatttagagaaacagaacctctggtgtcaccacaccaagataaactcatgtctatgccagttatgactgtggattattccaaaacagtagttaaagaaccagttgatacgagggtttcttgctgcaaaaccaaagattcagacatatactgtactttgaacgatagcaacccttctttgtgtaactctgaagctgaaaatattgagccttcagttatgaagatttcttcaaatagctttatgaatgtgcatttggaatcaaaaccagttatatgtgatagtagaaatttgacagatcactcaaaatttgcatgtgaagaatataagcagagcatcggtagcactagttcagcttctgttaatcattttgatgatttatatcaacctattgggagttcaggtattgcttcatctcttcagagtcttccaccaggaataaaggtggacagtctaactctcttgaaatgcggagagaacacatctccagttctggatgcagtgctaaagagtaaaaaaagttcagagtttttaaagcatgcagggaaagaaacaatagtagaagtaggtagtgaccttcctgattcaggaaagggatttgcttccagggagaacaggcgtaataatgggttatctgggaaatgtttgcaagaggctcaagaagaagggaattccatattgcctgaaagaagaggaagaccagaaatctctttagatgaaagaggagaaggaggacatgtgcatacttctgatgactcagaagttgtattttcttcttgtgatttgaatttaaccatggaagacagtgatggtgtaacttatgcattaaagtgtgacagtagtggtcatgccccagaaattgtgtctacagttcatgaagattattctggctcttctgaaagttcaaatgatgaaagtgattcagaagatacagattcggatgatagcagtattccaagaaaccgtctccagtctgttgtggttgtgccaaagaattctactttgcccatggaagaaacaagtccttgttcttctcggagcagtcaaagttatagacactattctgaccattgggaagatgagagattggagtcaaggagacatttgtatgaggaaaaatttgaaagtatagcaagtaaagcctgtcctcaaactgataagtttttccttcataaaggaacagagaagaatccggaaatttcttttacacagtccagtagaaaacaaatagataatcgcctgcctgaactttctcatcctcagagtgatggggttgatagtacaagtcatacagatgtgaaatctgaccctctgggtcacccaaattcagaggaaaccgtgaaagccaaaataccttctaggcagcaagaagagctgccaatttattcttctgattttgaagatgtcccaaataagtcttggcaacagaccactttccaaaacaggccagatagtagactgggaaaaacagaattgagtttttcttcctcttgtgagataccacatgtggatggcttgcactcatcagaagagctcagaaacttaggttgggacttctctcaagaaaagccttctaccacgtatcagcaacctgacagtagctatggagcttgtggtggacacaagtatcagcaaaatgcagaacagtatggtgggacacgtgattactggcaaggcaatggttactgggatccaagatcaggtagacctcctggaactggggttgtgtatgatcgaactcaaggacaagtaccagattccctaacagatgatcgtgaagaagaggagaattgggatcaacaggatggatcccatttttcagaccagtccgataaatttcttctatcccttcagaaagacaaggggtcagtgcaagcacctgaaataagcagcaattccattaaggacactttagctgtgaatgaaaagaaagatttttcaaaaaacttagaaaaaaatgatatcaaagatagagggcctcttaaaaaaaggaggcaggaaatagagagtgattctgaaagtgatggtgagcttcaggacagaaagaaagttagagtggaggtagagcagggagagacatcagtgcccccaggttcagcactggttgggccctcctgtgtcatggatgacttcagggacccacagcgatggaaggaatgtgccaagcaagggaaaatgccatgttactttgatcttattgaagaaaatgtttatttaacagaaagaaagaagaataaatctcatcgagatattaagcgaatgcagtgtgagtgtacacctctttctaaagatgaaagagctcaaggtgaaatagcatgtggggaagattgtcttaatcgtcttctcatgattgaatgttcttctcggtgtccaaatggggattattgttccaatagacggtttcagagaaaacagcatgcagatgtggaagtcatactcacagaaaagaaaggctggggcttgagagctgccaaagaccttccttcgaacacctttgtcctagaatattgtggagaggtactcgatcataaagagtttaaagctcgagtgaaggagtatgcacgaaacaaaaacatccattactatttcatggccctgaagaatgatgagataatagatgccactcaaaaaggaaattgctctcgtttcatgaatcacagctgtgaaccaaattgtgaaacccaaaaatggactgtgaacggacaactgagggttgggttttttaccaccaaactggttccttcaggctcagagttaacgtttgactatcagttccagagatatggaaaagaagcccagaaatgtttctgcggatcagccaattgccggggttacctgggaggagaaaacagagtcagcatcagagcagcaggagggaaaatgaagaaggaacgatctcgtaagaaggattcagtggatggagagctagaagctctgatggaaaatggtgagggtctctctgataaaaaccaggtgctcagcttatcccggctaatggttagaattgaaactttggagcagaaacttacctgtctggaactcatacagaacacacactcacagtcctgcctgaagtcctttctggaacgtcatgggctgtctttgttgtggatctggatggcagagctaggtgacggccgggaaagtaaccagaagcttcaggaagagattataaagactttggaacacttgcccattcctactaaaaatatgttggaggaaagcaaagtacttccaattattcaacgctggtctcagactaagactgctgtccctccgttgagtgaaggagatgggtattctagtgagaatacatcgcgtgctcatacaccactcaacacacctgatccttccaccaagctgagcacagaagctgacacagacactcccaagaaactaatgtttcgcagactgaaaattataagtgaaaatagcatggacagtgcaatctctgatgcaaccagtgagctagaaggcaaggatggcaaagaggatcttgatcaattagaaaatgtccctgtagaggaagaggaagaattgcagtcacaacagctactcccacaacagctgcctgaatgcaaagttgatagtgaaaccaacatagaagctagtaagctacctacatctgaaccagaagctgacgctgaaatagagcccaaagagagcaacggcacaaaactagaagaacctattaatgaagaaacaccatcccaagatgaagaggagggtgtgtctgatgtggagagtgaaaggagccaagaacagccagataaaacagtggatataagtgatttggccaccaaactcctggacagttggaaagacctaaaggaggtatatcgaattccaaagaaaagtcaaactgaaaaggaaaacacaagaaatcagcctgaataaatggaatgacttgtctgcctcacatattctaaggtgcagagtcagaatatgaactgttgcaactgaacgaggaagggatgctgttggcttcagagatcaaacacctgccccgaagactcctaataggtcaagagagagagacccagacaagcaaactcaaaataaagagaaaaggaaacgaagaagctccctctcaccaccctcttctgcctatgagcggggaacaaaaaggccagatgacagatatgatacaccaacttctaaaaagaaagtacgaattaaagaccgcaataaactttctacagaggaacgccggaagttgtttgagcaagaggtggctcaacgggaggctcagaaacaacagcaacagatgcagaacctgggaatgacatcaccactgccctatgactctcttggttataatgccccgcatcatccctttgctggttacccaccaggttatcccatgcaggcctatgtggatcccagcaaccctaatgctggaaaggtgctcctgcccacacccagcatggacccagtgtgttctcctgctccttatgatcatgctcagcccttggtgggacattctacagaacccctttctgcccctccaccagtaccagtggtgccacatgtggcagctcctgtggaagtttccagttcccagtatgtggcccagagtgatggtgtagtacaccaagactccagcgttgctgtcttgccagtgccggcccccggcccagttcagggacagaattatagtgtttgggattcaaaccaacagtctgtcagtgtacagcagcagtactctcctgcacagtctcaagcaaccatatattatcaaggacagacatgtccaacagtctatggtgtgacatcaccttattcacagacaactccaccaattgtacagagttatgcccagccaagtcttcagtatatccaggggcaacagattttcacagctcatccacaaggagtggtggtacagccagccgcagcagtgactacaatagttgcaccagggcagcctcagcccttgcagccatctgaaatggttgtgacaaataatctcttggatctgccgcccccctctcctcccaaaccaaaaaccattgtcttacctcccaactggaagacagctcgagatccagaagggaagatttattactaccatgtgatcacaaggcagactcagtgggatcctcctacttgggaaagcccaggagatgatgccagccttgagcatgaagctgagatggacctgggaactccaacatatgatgaaaaccccatgaaggcctcgaaaaagcccaagacagcagaagcagacacctccagtgaactagcaaagaaaagcaaagaagtattcagaaaagagatgtcccagttcatcgtccagtgcctgaacccttaccggaaacctgactgcaaagtgggaagaattaccacaactgaagactttaaacatctggctcgcaagctgactcacggtgttatgaataaggagctgaagtactgtaagaatcctgaggacctggagtgcaatgagaatgtgaaacacaaaaccaaggagtacattaagaagtacatgcagaagtttggggctgtttacaaacccaaagaggacactgaattagagtgactgttgggccagggtgggaggatgggtggtcaggtaagacagactctagggagaggaaatcctgtgggcctttctgtcccacccctgtcagcactgtgctactgatgatacatcaccctggggaattcaaccctgcagatgtcaactgaaggccacaaaaatgaactccatctacaagtgattacctagttgtgagctgttggcatgtggttagaagccatcagaggtgcaagggcttagaaaagaccctggccagacctgactccactcttaaacctgggtcttctccttggcggtgctgtcagcgcacagacccatgcgcatccccacccacaaccctttaccctgatgatctgtattatattttaatgtatatgtgaatatattgaaaataatttgttttt

SEQ ID NO: 180799 - DNA, 4231 bp, Homo sapiens
  Payload ID: 15608
  Gene Symbol: SETD2
  Gene Name: SET domain containing 2
  ENST ID: ENST00000412450
  CDS Start-End: 211-4231
ggttaccgccgtgtccgcaccgacccggccatcccggggctcggcggtcctctcgggctcctcgtggctcgtccgggccccgctgctagccaaagggcagagtcggaggagctgccggtgccgggcccggcaagagggcgccggtgaggagaagaagaaaatgaggcaaagattgaaaatgtgcagaaaacaggtttcatcaaaggaccaatgttcaaaggtgttgcttctagtcgatttttgcccaaaggcaccaaaacaaaagttaatttggaagaacagggacgacagaaggtgtcattcagcttcagccttacaaagaaaactttgcagaataggtttctcactgcacttggcaatgaaaagcaaagtgatactccaaaccctccagctgtacctcttcaggtagactcgactcctaaaatgaaaatggaaattggtgataccttatctactgcagaagaatcttccccaccaaagtcaagggtggaattgggcaaaattcattttaagaaacatctgcttcatgtaacatccaggccactgctggctactaccacagcagtagcatctccacctactcatgcagcaccattaccagcagtgatagcagaatcaacaactgtagactcaccgccctcatctccgcctccaccgcctccacctgcccaagccacaacactctcatcaccagcaccagtaacagagccagtggccttgccacatacaccaataacagttctaatggcagcaccagtacccttaccagtagatgtagcagttagatctctgaaagaaccaccaattataattgtaccagaatctttagaagcagatactaagcaggacactatatctaatagtttagaagaacacgtaactcaaatattgaatgagcaagcagatatttcctcaaaaaaagaagattcccatattgggaaggatgaagaaattccagatagttctaagattagtctgagctgtaaaaaaacaggttctaagaagaaatcctcacaatctgaaggcatctttcttggttcagaatctgatgaagattctgtacggacttcttcaagtcaaagatcacatgatttaaaattttcagcaagcattgaaaaggaaagagattttaaaaagagctcagcacctttaaaaagtgaggatctagggaaaccttcacgatctaaaacagacagagatgataaatattttagctattcaaaacttgaaagagatactcggtatgtatcttcccgatgtagatcagaaagagagcgacggcggagcagatctcactctaggtctgagagaggctctagaactaatttatcctattccaggtcagaacgatctcattattatgactctgatcgtcgctaccataggagctccccttatcgagagaggacgcgctattctcggccatacacagataacagagcacgagagagttctgactcagaagaagagtataagaagacatactcaaggcgtacctcatctcattcctcttcttacagagacctaaggacatcatcctattctaaatctgatcgggactgtaaaactgagacctcttacttagagatggaaagaagaggcaagtattcttcaaaactagaaagagaatctaaaaggacttcagaaaatgaagcaattaaaagatgttgttctccccctaatgaactgggattccgacgagggtcatcatattctaagcatgacagtagtgcttcccgttataaatctaccctttcaaaacctatacccaagtctgataaatttaaaaattctttctgttgtacagaattaaatgaagaaatcaaacagtctcattcttttagtttacagacaccttgttcaaaaggtagtgaattaagaatgattaataaaaatcctgaaagagaaaaggctgggtctccagctccatcaaatcgattaaatgattcacctactttaaaaaagctagatgaattgcctatttttaagtccgaatttataacacatgatagccatgatagtattaaggaattagactctttatctaaagtgaagaatgatcaattaagaagtttttgtcccatagaattaaatataaatggatctcctggggcagaatctgatttggcaacattttgcacttctaaaactgatgctgttttaatgacttctgatgatagtgtgactggatcggaattatcccctttggtcaaagcatgcatgctttcatcaaatggatttcagaatattagtaggtgcaaagaaaaagacttggatgatacctgcatgctgcataagaagtcagaaagcccatttagagaaacagaacctctggtgtcaccacaccaagataaactcatgtctatgccagttatgactgtggattattccaaaacagtagttaaagaaccagttgatacgagggtttcttgctgcaaaaccaaagattcagacatatactgtactttgaacgatagcaacccttctttgtgtaactctgaagctgaaaatattgagccttcagttatgaagatttcttcaaatagctttatgaatgtgcatttggaatcaaaaccagttatatgtgatagtagaaatttgacagatcactcaaaatttgcatgtgaagaatataagcagagcatcggtagcactagttcagcttctgttaatcattttgatgatttatatcaacctattgggagttcaggtattgcttcatctcttcagagtcttccaccaggaataaaggtggacagtctaactctcttgaaatgcggagagaacacatctccagttctggatgcagtgctaaagagtaaaaaaagttcagagtttttaaagcatgcagggaaagaaacaatagtagaagtaggtagtgaccttcctgattcaggaaagggatttgcttccagggagaacaggcgtaataatgggttatctgggaaatgtttgcaagaggctcaagaagaagggaattccatattgcctgaaagaagaggaagaccagaaatctctttagatgaaagaggagaaggaggacatgtgcatacttctgatgactcagaagttgtattttcttcttgtgatttgaatttaaccatggaagacagtgatggtgtaacttatgcattaaagtgtgacagtagtggtcatgccccagaaattgtgtctacagttcatgaagattattctggctcttctgaaagttcaaatgatgaaagtgattcagaagatacagattcggatgatagcagtattccaagaaaccgtctccagtctgttgtggttgtgccaaagaattctactttgcccatggaagaaacaagtccttgttcttctcggagcagtcaaagttatagacactattctgaccattgggaagatgagagattggagtcaaggagacatttgtatgaggaaaaatttgaaagtatagcaagtaaagcctgtcctcaaactgataagtttttccttcataaaggaacagagaagaatccggaaatttcttttacacagtccagtagaaaacaaatagataatcgcctgcctgaactttctcatcctcagagtgatggggttgatagtacaagtcatacagatgtgaaatctgaccctctgggtcacccaaattcagaggaaaccgtgaaagccaaaataccttctaggcagcaagaagagctgccaatttattcttctgattttgaagatgtcccaaataagtcttggcaacagaccactttccaaaacaggccagatagtagactgggaaaaacagaattgagtttttcttcctcttgtgagataccacatgtggatggcttgcactcatcagaagagctcagaaacttaggttgggacttctctcaagaaaagccttctaccacgtatcagcaacctgacagtagctatggagcttgtggtggacacaagtatcagcaaaatgcagaacagtatggtgggacacgtgattactggcaaggcaatggttactgggatccaagatcaggtagacctcctggaactggggttgtgtatgatcgaactcaaggacaagtaccagattccctaacagatgatcgtgaagaagaggagaattgggatcaacaggatggatcccatttttcagaccagtccgataaatttcttctatcccttcagaaagacaaggggtcagtgcaagcacctgaaataagcagcaattccattaaggacactttagctgtgaatg

SEQ ID NO: 180800 - DNA, 2878 bp, Homo sapiens
  Payload ID: 15609
  Gene Symbol: SETD3
  Gene Name: SET domain containing 3
  Uniprot ID: Q86TU7
  ENST ID: ENST00000331768
  CDS Start-End: 161-1945
cgcggtcgcggggccgtctcaggctgccgtcccgcccctcccgtccggccgccgccgccgccaccgccgccaccgcctgggggttggttgaggcggacggcggggtccgggccggagtacgtcgttcccgctgcgctaggggaagcgggcagtcagaaaaatgggtaagaagagtcgagtaaaaactcagaaatctggcactggtgctacagcaactgtgtcaccaaaggaaatcttgaacctgaccagtgagctgctgcagaaatgcagcagtccggcgcctggcccaggaaaagagtgggaagagtatgtgcagatccggactctggttgagaaaatacggaaaaagcaaaaaggtctgtccgttacttttgatggaaaaagagaagattactttcctgatctaatgaaatgggcctctgaaaatggggcttctgtcgagggttttgaaatggttaacttcaaagaagagggctttggtttgagagcaacaagagatatcaaggcagaagaattgtttttatgggttccacgaaaattgctaatgactgttgaatctgctaaaaattcagtgttggggcccttatattctcaagaccgaatccttcaagccatgggaaacatcgcactggcctttcatttgctgtgtgagcgagccagccctaactccttctggcagccctatattcaaaccctccccagtgaatatgacactcctctctactttgaagaagatgaagttcggtatcttcagtccacacaagctatacatgatgtcttcagccagtataaaaacacagctcgacagtacgcctacttctataaagtcatccagacccatcctcatgccaacaaactacccttgaaggattctttcacttacgaggactacaggtgggcagtctcttctgttatgacgaggcaaaaccaaattcccacagaggatggttcccgcgtgaccctggctctgattcctttatgggatatgtgtaaccacaccaacggcctgatcactactggttacaacctggaagatgaccgctgtgagtgtgtggctctgcaggattttcgggctggagagcagatttacattttttatggcactcgatccaacgcagagtttgtgatccacagtggttttttctttgacaataactcacacgacagagtgaaaataaagcttggagtgagtaaaagtgacagactctacgccatgaaggccgaggtcttggctcgtgccggcatccccacttccagtgtttttgcattgcattttaccgagccgcccatctctgctcagcttttggcttttctccgagtattctgtatgactgaagaagaactgaaagaacacttgctgggagacagcgctattgatagaatcttcaccttggggaactcggaatttcctgttagctgggacaacgaggtcaaactttggacatttcttgaagatagagcctcacttcttttaaaaacatataaaacaactattgaggaagataaatccgtcttgaaaaaccacgatctttctgttcgtgcaaaaatggccatcaaattgcgcttaggtgagaaagagattttggaaaaagcagtaaagagtgcagctgtcaaccgggaatactatcgccaacagatggaggaaaaggctccgcttcccaaatatgaagagagtaaccttgggctgttggagagcagcgtgggggactcgaggctccccctggtcttgagaaacctcgaggaggaggctggagtgcaggatgccttgaacatcagagaggcaatcagcaaagcaaaggccacagaaaacgggcttgtaaacggtgaaaactctatccctaatgggaccaggtccgaaaatgaaagtctcaatcaagaaagtaaaagagcagttgaagacgccaaaggatcttcttcagacagcactgctggagttaaggagtagctcgaggtgaagctggatgggggatccagtggagcaggagttgacggacagtccgttcacatcgctgtgtttccttgttaacatttttctttctgcagagaggaagatatgtttttgctgctttatataaaaatggtttttttaagttattttaaaaatctagcttccctttttgattaagattgccatcttgcttttaggcaaaacaaaccaattaacaaacaaccacaagaaagggagaagaggtgcctgtgggagattttgcagacctattgtgggtataggtattttcttcctggggaagaattcagttcccgtctcagctgtacttttgtgggcctgtcatcttgatgaccagaatgaaagcttgctctgcctcctgccagccagaattggtggcgggacttggggatacagcgtgaaggtggggaagttgcacagcagaaaacagaattgaagttgggaaactctagagtctgggcaaaatgtttggttttttctcttaaaaaaaataacaccccattaccaaaagaaaaggtaaggtggcaaccttatttttaatagtttgaaatgatgataatcctaattatataaaaatatatatataaacacacatatatatagtgatttctaaagatttgtttacttttgtgttttgttttactgtactaagaacttgtcctttctccttgaatcaaagtaggacatgcatcatcctcctaattttaaatgttggctctgattttaaagtggtgcatttgattccagccttggtaatggagagtttgcaaacacacagcggcccacagcttcacgtggtggtgtgcagtgtgaggcagctccttggctttcctggttttcacaacaagctagagattttcaaagctacacttttgagtaaaaacccttattaaaagaaaaacatgattaata

SEQ ID NO: 180801 - DNA, 1330 bp, Homo sapiens
  Payload ID: 15609
  Gene Symbol: SETD3
  Gene Name: SET domain containing 3
  Uniprot ID: Q86TU7
  ENST ID: ENST00000329331
  CDS Start-End: 70-960
ggcggacggcggggtccgggccggagtacgtcgttcccgctgcgctaggggaagcgggcagtcagaaaaatgggtaagaagagtcgagtaaaaactcagaaatctggcactggtgctacagcaactgtgtcaccaaaggaaatcttgaacctgaccagtgagctgctgcagaaatgcagcagtccggcgcctggcccaggaaaagagtgggaagagtatgtgcagatccggactctggttgagaaaatacggaaaaagcaaaaaggtctgtccgttacttttgatggaaaaagagaagattactttcctgatctaatgaaatgggcctctgaaaatggggcttctgtcgagggttttgaaatggttaacttcaaagaagagggctttggtttgagagcaacaagagatatcaaggcagaagaattgtttttatgggttccacgaaaattgctaatgactgttgaatctgctaaaaattcagtgttggggcccttatattctcaagaccgaatccttcaagccatgggaaacatcgcactggcctttcatttgctgtgtgagcgagccagccctaactccttctggcagccctatattcaaaccctccccagtgaatatgacactcctctctactttgaagaagatgaagttcggtatcttcagtccacacaagctatacatgatgtcttcagccagtataaaaacacagctcgacagtacgcctacttctataaagtcatccagacccatcctcatgccaacaaactacccttgaaggattctttcacttacgaggactacaggtgggcagtctcttctgttatgacgaggcaaaaccaaattcccacagaggatggttcccgcgtgaccctggctctgattcctttatgggatatgtgtaaccacaccaacggcctgacaccagaagattccttcgctcttgctgtcgcctctgcctaagaccctccattccttaggcacttacgggactcactcatagacctcctccagcgtggctgccctgagcaccctatgtggaatgactacgcctccagctcatccgccctcctgccctgtcctgttacatttccctctattgtccagatccgcttgtttctgcctttttaaaaaattattgttggttcacccccccgcctcccattagaatggaagatccatgaacgcagggtgattttgggggagggtctgttttgctcattgctatatcgctgtggtttttaatgaattcatgaccggtaaataaatgactgtaaaagccccatgcctaggaaaaaagatcagaaagaaataaaccaaaatgttaacgtga

SEQ ID NO: 180802 - DNA, 2191 bp, Homo sapiens
  Payload ID: 15609
  Gene Symbol: SETD3
  Gene Name: SET domain containing 3
  ENST ID: ENST00000357563
  CDS Start-End: 119-364
gtccggccgccgccgccgccaccgccgccaccgcctgggggttggttgaggcggacggcggggtccgggccggagtacgtcgttcccgctgcgctaggggaagcgggcagtcagaaaaatgggtaagaagagtcgagtaaaaactcagaaatctggcactggtgctacagcaactgtgtcaccaaaggaaatcttgaacctgaccagtgagctgctgcagaaatgcagcagtccggcgcctggcccaggaaaagagtgggaagagtatgtgcagatccggactctggttgagaaaatacggaaaaagcaaaaaggcagaagaattgtttttatgggttccacgaaaattgctaatgactgttgaatctgctaaaaattcagtgttggggcccttatattctcaagaccgaatccttcaagccatgggaaacatcgcactggcctttcatttgctgtgtgagcgagccagccctaactccttctggcagccctatattcaaaccctccccagtgaatatgacactcctctctactttgaagaagatgaagttcggtatcttcagtccacacaagctatacatgatgtcttcagccagtataaaaacacagctcgacagtacgcctacttctataaagtcatccagacccatcctcatgccaacaaactacccttgaaggattctttcacttacgaggactacaggtgggcagtctcttctgttatgacgaggcaaaaccaaattcccacagaggatggttcccgcgtgaccctggctctgattcctttatgggatatgtgtaaccacaccaacggcctggtaacgacctcttcccctgtgttgtgttgaatctgggaggctgttgttgctaagctttgggagggggctgttattccacctacccatcgtactccccccgttgcctccctccaaaaggaacaaacaaaaccgaaccggccactcctccccaccgcccacagatagaagctggtatttttcttttactgcattgactaatactgaaaactgggagcttgaatcttataccattttcaaaagccacagtgaactacatgtgtttgctaagccataattccagcctcaacattcattttcttatcttattgtaccacagactaaaccaaagtttctttttacttattctctttaaaatgctcatttattggggaaaaaaaatcatatttctcattttcccttttgtgtcttcttttctttgctgacactctgtttccagttctgtacctttgattctttcttgtccccggtcccttcccctgatgggctgacgaatccctggccatgtttatgaacctgtgtttgttacttgctttccctggtgctgtggggcgggaggagggggctcatgccttgggctcctcgcccttgactgcaggagtcagctggcatcatcatacctgggaagcctggggaggaggaagttgtattattatggtcccccacagctgggaagaggtggaggcaggctctgtttctccacattcttcggattccgggcagcagcataggtgaagcgctctgtgctctgtgagagggttgtctgataaagatttcctgatattagtaggcagaaataagatacatttcagatcattttgaaatatcatactttatactagtatactgtttgattaggttttatgttcatcttttctctgtcagctttccttgttattagcagtattataaatagaataaagaaatgccgtgaatgattatttcacattgaattccctggaatggccagaacacacgtagtgtgcgccagacactgaagacagaatatcctagtgctaatttgggaaggtctagcaacaagtatgttcttgaatcttaaaagtatttaaattgtggcaagaaagaatagttccatttttataattacattttggccttaatttagatatggttaatttaattagtaatgaatactaaaacataatagcatgttttataacttattttcattaatgaatataattttacattttttgttttgtttttcttcagagttattttaaattgacggtaagcttgaaatttaagaaatcttcaaatagcttttaatatctgactgtagtgtttttcttcttctttttttgaatgagatcatttgttcccaaactcaattgattattagagttctttttaat

SEQ ID NO: 180803 - DNA, 1754 bp, Homo sapiens
  Payload ID: 15609
  Gene Symbol: SETD3
  Gene Name: SET domain containing 3
  ENST ID: ENST00000446066
  CDS Start-End: 83-328
gggggttggttgaggcggacggcggggtccgggccggagtacgtcgttcccgctgcgctaggggaagcgggcagtcagaaaaatgggtaagaagagtcgagtaaaaactcagaaatctggcactggtgctacagcaactgtgtcaccaaaggaaatcttgaacctgaccagtgagctgctgcagaaatgcagcagtccggcgcctggcccaggaaaagagtgggaagagtatgtgcagatccggactctggttgagaaaatacggaaaaagcaaaaaggcagaagaattgtttttatgggttccacgaaaattgctaatgactgttgaatctgctaaaaattcagtgttggggcccttatattctcaagaccgaatccttcaagccatgggaaacatcgcactggcctttcatttgctgtgtgagcgagccagccctaactccttctggcagccctatattcaaaccctccccagtgaatatgacactcctctctactttgaagaagatgaagttcggtatcttcagtccacacaagctatacatgatgtcttcagccagtataaaaacacagctcgacagtacgcctacttctataaagtcatccagatcactactggttacaacctggaagatgaccgctgtgagtgtgtggctctgcaggattttcgggctggagagcagatttacattttttatggcactcgatccaacgcagagtttgtgatccacagtggttttttctttgacaataactcacacgacagagtgaaaataaagcttggagtgagtaaaagtgacagactctacgccatgaaggccgaggtcttggctcgtgccggcatccccacttccagtgtttttgcattgcattttaccgagccgcccatctctgctcagcttttggcttttctccgagtattctgtatgactgaagaagaactgaaagaacacttgctgggagacagcgctattgatagaatcttcaccttggggaactcggaatttcctgttagctgggacaacgaggtcaaactttggacatttcttgaagatagagcctcacttcttttaaaaacatataaaacaactattgaggaagataaatccgtcttgaaaaaccacgatctttctgttcgtgcaaaaatggccatcaaattgcgcttaggtgagaaagagattttggaaaaagcagtaaagagtgcagctgtcaaccgggaatactatcgccaacagatggaggaaaaggctccgcttcccaaatatgaagagagtaaccttgggctgttggagagcagcgtgggggactcgaggctccccctggtcttgagaaacctcgaggaggaggctggagtgcaggatgccttgaacatcagagaggcaatcagcaaagcaaaggccacagaaaacgggcttgtaaacggtgaaaactctatccctaatgggaccaggtccgaaaatgaaagtctcaatcaagaaagtaaaagagcagttgaagacgccaaaggatcttcttcagacagcactgctggagttaaggagtagctcgaggtgaagctggatgggggatccagtggagcaggagttgacggacagtccgttcacatcgctgtgtttccttgttaacatttttctttctgcagagaggaagatatgtttttgctgctttatataaaaatggtttttttaagttattttaaaaatctagcttccctttttgattaagattgccatcttgcttttaggcaaaacaaa

SEQ ID NO: 180804 - DNA, 973 bp, Homo sapiens
  Payload ID: 15609
  Gene Symbol: SETD3
  Gene Name: SET domain containing 3
  ENST ID: ENST00000453764
  CDS Start-End: 142-387
caggctgccgtcccgcccctcccgtccggccgccgccgccgccaccgccgccaccgcctgggggttggttgaggcggacggcggggtccgggccggagtacgtcgttcccgctgcgctaggggaagcgggcagtcagaaaaatgggtaagaagagtcgagtaaaaactcagaaatctggcactggtgctacagcaactgtgtcaccaaaggaaatcttgaacctgaccagtgagctgctgcagaaatgcagcagtccggcgcctggcccaggaaaagagtgggaagagtatgtgcagatccggactctggttgagaaaatacggaaaaagcaaaaaggcagaagaattgtttttatgggttccacgaaaattgctaatgactgttgaatctgctaaaaattcagtgttggggcccttatattctcaagaccgaatccttcaagccatgggaaacatcgcactggcctttcatttgctgtgtgagcgagccagccctaactccttctggcagccctatattcaaaccctccccagtgaatatgacactcctctctactttgaagaagatgaagttcggtatcttcagtccacacaagctatacatgatgtcttcagccagtataaaaacacagctcgacagtacgcctacttctataaagtcatccagacccatcctcatgccaacaaactacccttgaaggattctttcacttacgaggactacaggtgggcagtctcttctgttatgacgaggcaaaaccaaattcccacagaggatggttcccgcgtgaccctggctctgattcctttatgggatatgtgtaaccacaccaacggcctgatcactactggttacaacctggaagatgaccgctgtgagtgtgtggctctgcaggattttcgggctggagagcagatttacattttttatggcactcgatccaacgcagagtttgtgatccacagtggtttt

SEQ ID NO: 180805 - DNA, 2592 bp, Homo sapiens
  Payload ID: 15609
  Gene Symbol: SETD3
  Gene Name: SET domain containing 3
  ENST ID: ENST00000436070
  CDS Start-End: 72-950
gaggcggacggcggggtccgggccggagtacgtcgttcccgctgcgctaggggaagcgggcagtcagaaaaatgggtaagaagagtcgagtaaaaactcagaaatctggcactggtgctacagcaactgtgtcaccaaaggaaatcttgaacctgaccagtgagctgctgcagaaatgcagcagtccggcgcctggcccaggaaaagagtgggaagagtatgtgcagatccggactctggttgagaaaatacggaaaaagcaaaaaggtctgtccgttacttttgatggaaaaagagaagattactttcctgatctaatgaaatgggcctctgaaaatggggcttctgtcgagggttttgaaatggttaacttcaaagaagagggctttggtttgagagcaacaagagatatcaaggcagaagaattgtttttatgggttccacgaaaattgctaatgactgttgaatctgctaaaaattcagtgttggggcccttatattctcaagaccgaatccttcaagccatgggaaacatcgcactggcctttcatttgctgtgtgagcgagccagccctaactccttctggcagccctatattcaaaccctccccagtgaatatgacactcctctctactttgaagaagatgaagttcggtatcttcagtccacacaagctatacatgatgtcttcagccagtataaaaacacagctcgacagtacgcctacttctataaagtcatccagacccatcctcatgccaacaaactacccttgaaggattctttcacttacgaggactacaggtgggcagtctcttctgttatgacgaggcaaaaccaaattcccacagaggatggttcccgcgtgaccctggctctgattcctttatgggatatgtgtaaccacaccaacggcctggtaacgacctcttcccctgtgttgtgttgaatctgggaggctgttgttgctaagctttgggagggggctgttattccacctacccatcgtactccccccgttgcctccctccaaaaggaacaaacaaaaccgaaccggccactcctccccaccgcccacagatagaagctggtatttttcttttactgcattgactaatactgaaaactgggagcttgaatcttataccattttcaaaagccacagtgaactacatgtgtttgctaagccataattccagcctcaacattcattttcttatcttattgtaccacagactaaaccaaagtttctttttacttattctctttaaaatgctcatttattggggaaaaaaaatcatatttctcattttcccttttgtgtcttcttttctttgctgacactctgtttccagttctgtacctttgattctttcttgtccccggtcccttcccctgatgggctgacgaatccctggccatgtttatgaacctgtgtttgttacttgctttccctggtgctgtggggcgggaggagggggctcatgccttgggctcctcgcccttgactgcaggagtcagctggcatcatcatacctgggaagcctggggaggaggaagttgtattattatggtcccccacagctgggaagaggtggaggcaggctctgtttctccacattcttcggattccgggcagcagcataggtgaagcgctctgtgctctgtgagagggttgtctgataaagatttcctgatattagtaggcagaaataagatacatttcagatcattttgaaatatcatactttatactagtatactgtttgattaggttttatgttcatcttttctctgtcagctttccttgttattagcagtattataaatagaataaagaaatgccgtgaatgattatttcacattgaattccctggaatggccagaacacacgtagtgtgcgccagacactgaagacagaatatcctagtgctaatttgggaaggtctagcaacaagtatgttcttgaatcttaaaagtatttaaattgtggcaagaaagaatagttccatttttataattacattttggccttaatttagatatggttaatttaattagtaatgaatactaaaacataatagcatgttttataacttattttcattaatgaatataattttacattttttgttttgtttttcttcagagttattttaaattgacggtaagcttgaaatttaagaaatcttcaaatagcttttaatatctgactgtagtgtttttcttcttctttttttgaatgagatcatttgttcccaaactcaattgattattagagttctttttaataaaattaaagcaataatgcttggctttactctaaacaaacaaaaagaattaacccaggaacctctgtagcaaggtgagcagtgccctacccccagccccacagtccacctgatggtgttgaggccgccaccaggccaccgtggtccctagcgaagcttccatccattggcacctcacacactcatctgcacattggtttttgtttagcttccatgtaaatgggataaaacaattcctttttccctaccaagtgttaaaaaaaaaagaggtttatctcaaaataaagaaattgatgacaa

SEQ ID NO: 180806 - DNA, 1281 bp, Homo sapiens
  Payload ID: 15609
  Gene Symbol: SETD3
  Gene Name: SET domain containing 3
  ENST ID: ENST00000630307
  CDS Start-End: 171-416
agcgttgggccgcggtcgcggggccgtctcaggctgccgtcccgcccctcccgtccggccgccgccgccgccaccgccgccaccgcctgggggttggttgaggcggacggcggggtccgggccggagtacgtcgttcccgctgcgctaggggaagcgggcagtcagaaaaatgggtaagaagagtcgagtaaaaactcagaaatctggcactggtgctacagcaactgtgtcaccaaaggaaatcttgaacctgaccagtgagctgctgcagaaatgcagcagtccggcgcctggcccaggaaaagagtgggaagagtatgtgcagatccggactctggttgagaaaatacggaaaaagcaaaaaggcagaagaattgtttttatgggttccacgaaaattgctaatgactgttgaatctgctaaaaattcagtgttggggcccttatattctcaagaccgaatccttcaagccatgggaaacatcgcactggcctttcatttgctgtgtgagcgagccagccctaactccttctggcagccctatattcaaaccctccccagtgaatatgacactcctctctactttgaagaagatgaagttcggtatcttcagtccacacaagctatacatgatgtcttcagccagtataaaaacacagctcgacagtacgcctacttctataaagtcatccagacccatcctcatgccaacaaactacccttgaaggattctttcacttacgaggactacaggtgggcagtctcttctgttatgacgaggcaaaaccaaattcccacagaggatggttcccgcgtgaccctggctctgattcctttatgggatatgtgtaaccacaccaacggcctgacaccagaagattccttcgctcttgctgtcgcctctgcctaagaccctccattccttaggcacttacgggactcactcatagacctcctccagcgtggctgccctgagcaccctatgtggaatgactacgcctccagctcatccgccctcctgccctgtcctgttacatttccctctattgtccagatccgcttgtttctgcctttttaaaaaattattgttggttcacccccccgcctcccattagaatggaagatccatgaacgcagggtgattttgggggagggtctgttttgctcattgctatatcgctgtggtttttaatgaattcatgaccggtaaataaatgactgtaaaagccccatgcctaggaaaaaagatcagaaagaaataaaccaaaatgttaacgtg

SEQ ID NO: 180807 - DNA, 3015 bp, Homo sapiens
  Payload ID: 15610
  Gene Symbol: SETD4
  Gene Name: SET domain containing 4
  Uniprot ID: Q9NVD3
  ENST ID: ENST00000332131
  CDS Start-End: 241-1563
gcccgcggcggaaggggcggacccgggagactgaggacttggattgcttaaggacaccaggcaggcgcgacagccttcagcctctccctctgcagttttggccggttcctttaacttgccttcatctggggctgtttggtatttccacgtgccttgggcccgcccactgcagcctccatcttggaagcggccgccggcgcctagaactgtatttcagaaaaaagaaactacagttttagcatgcagaaaggaaaagggagaacaagccggatcagaagacgaaaactctgcggaagttctgaatcaagaggagtgaatgagagccacaagtctgaatttatagagctgaggaagtggctgaaagctaggaagtttcaagattcaaacttagcgcctgcttgttttccaggtacaggaagagggctgatgagtcaaacatccctgcaggagggacagatgattatttcgttgcctgagagttgcctgctcaccacggacacagtgattcgaagctacttaggggcatacattactaagtggaagcctcctccatctcctctgctggcgctgtgcacctttttagtttcagaaaagcatgctgggcaccgatctctttggaagccttacctggagattttacccaaggcgtatacctgccctgtttgtttggagccggaagtggtgaaccttcttcccaaatctttaaaagcaaaggctgaagagcagagagcccacgtgcaggagttctttgcttcctccagagactttttctcttctctgcagcctctgtttgcggaggctgttgacagcatcttcagctacagtgccctgctgtgggcttggtgcaccgtcaacaccagagccgtgtacctgaggcccaggcagcgggaatgcctttctgcagagccggacacctgtgcactcgctccgtacctggacctgctgaatcatagcccacatgtccaggtaaaagcagcgtttaatgaagaaactcattcttacgaaattagaacgacttcacgttggagaaagcatgaagaggtattcatctgttacggccctcacgataatcaacggctgttcctggaatacggatttgtttctgtccataatcctcatgcttgtgtttatgtctcaagagaaatacttgttaaatatcttccatcaacagataaacagatggacaaaaagatttctattttaaaggatcatggctatatagaaaatttgacatttggatgggatggaccatcttggaggctactcacagcccttaagttgttatgtctggaagctgagaaatttacatgctggaaaaaagtacttcttggggaggtaatttcagatacgaatgagaagacaagtttggacatagcccagaaaatatgctattatttcatagaagagactaatgctgtgcttcaaaaggtgtctcatatgaaggatgaaaaagaggccctgataaaccaactaactttggtggaatccttgtggacggaagagctaaagattctcagggcatctgccgagaccctgcacagtttgcaaacagcttttacctgatttcaccgaagcgcatttggtcacctcctctgaaacaaaagttaattttgaagagcatcatcatgggctggggtggtggctgcccccaggacatgcaggatttctgcagggggcagcacaggttctgggattgtgaggctgtgagtgaaggtggacaagctgtctggatggcaggtctaatgctcttccgaataaagtgctgaactgtgaggagagaggcggactgtgaggcagccaggagccagctgcgtccgtgtgtggtctgtcaccacggggcctgcttcttatctgacacagcagctatcagagtctagtggttgtgcttttaagatgctctgataccattgggttaaggggcagattggcggtgggtgtggggcagtgtgaggtagtcctggatccccgccagggtggcccagacgccagcccttccctgtgtggctgcactgaggtgggtgttgaagagccccctaggggacacacagcttccaggaggagggaatgtcctctaagcatgctcctggcctctcaaggtggcgcttgtctaattattcacttgggaagaatgactagctcagccagcggctctttctgctttgttctggcgactttcctgggcaggcctttccacctggggagctggctcatcctgcacagctgggccgtggtgggcctgtctgcttgattctggggttcagtgtaggtcagctgatggcgaaccatggtggtggtttggcttctgttcttattcttgagttttgataccacgcagaccttgggtggggagagcttcctgcacagctctcagcggcctgtggccttggaactgcctgcgtaagtaacggaggggctgctggtcctgttcaggcccgtgctggggacgccgcttagacaatgttgcccagagtcctgtttaccctcccagggttcattcttcccaagaactcaaattcctttctcattggagcctagtgaaaccaaatgaacgggacctgctggcctcaggaggcaggcagagtttaaaataaaactttctcatgatttcttgaacatctttccctgtttgtatatacactttgtgtttatttttcagtagctgcagtatattttttttcaatattcagtataatgcagtgtatttcatcatatgctgtatggagagtgggcagacttctgtggagggcccgatagtaaccatttgaagctttctggacctgtggtcttagtcccagcgattctgcagagcggccatcggcagcatgtcaaccatttgcatggctgggctccagggaaactactgacaacgacaggtggtgggccatagtttcctgacccctgtgctatgccagaatttctttttcctcttccctatgagtggacctaaatatgttaattccttttcacctttcaaaacggacagccccttgaacattaaaaacttcgcagacccta

SEQ ID NO: 180808 - DNA, 1212 bp, Homo sapiens
  Payload ID: 15610
  Gene Symbol: SETD4
  Gene Name: SET domain containing 4
  ENST ID: ENST00000399201
  CDS Start-End: 288-1139
gacagagggcttcaggcacgcggctgctgctgccactgctgctctgagacaaggtggatgagtctgctgccggatcaagaaaaagaactgtatttcagaaaaaagaaactacagttttagcatgcagaaaggaaaagggagaacaagccggatcagaagacgaaaactctgcggaagttctgaatcaagaggagagatggggtctttctgtgttgggcaggctgggctcaaactcctggcctcaagcagtcctcccgccttggcctcccaaatgctgggaatacagaatgaatgagagccacaagtctgaatttatagagctgaggaagtggctgaaagctaggaagtttcaagattcaaacttagcgcctgcttgttttccaggtacaggaagagggctgatgagtcaaacatccctgcaggagggacagatgattatttcgttgcctgagagttgcctgctcaccacggacacagtgattcgaagctacttaggggcatacattactaagtggaagcctcctccatctcctctgctggcgctgtgcacctttttagtttcagaaaagcatgctgggcaccgatctctttggaagccttacctggagattttacccaaggcgtatacctgccctgtttgtttggagccggaagtggtgaaccttcttcccaaatctttaaaagcaaaggctgaagagcagagagcccacgtgcaggagttctttgcttcctccagagactttttctcttctctgcagcctctgtttgcggaggctgttgacagcatcttcagctacagtgccctgctgtgggcttggtgcaccgtcaacaccagagccgtgtacctgaggcccaggcagcgggaatgcctttctgcagagccggacacctgtgcactcgctccgtacctggacctgctgaatcatagcccacatgtccaggtaaaagcagcgtttaatgaagaaactcattcttacgaaattagaacgacttcacgttggagaaagcatgaagaggtattcatctgttacggccctcacgataatcaacggctgttcctggaatacggatttgtttctgtccataatcctcatgcttgtgtttatgtctcaagaggttggaatcaactttgttcttaacattaacactatataatttttttccccatttggagatgtgtattttcagttttaataaaaatatcaaaacctt

SEQ ID NO: 180809 - DNA, 1208 bp, Homo sapiens
  Payload ID: 15610
  Gene Symbol: SETD4
  Gene Name: SET domain containing 4
  ENST ID: ENST00000399205
  CDS Start-End: 284-1135
gttgcccgggtaacgggagcagagtcggcgggattgagcatttccacagaaattacagttttgtcctttttgaaaaaatagaactgtatttcagaaaaaagaaactacagttttagcatgcagaaaggaaaagggagaacaagccggatcagaagacgaaaactctgcggaagttctgaatcaagaggagagatggggtctttctgtgttgggcaggctgggctcaaactcctggcctcaagcagtcctcccgccttggcctcccaaatgctgggaatacagaatgaatgagagccacaagtctgaatttatagagctgaggaagtggctgaaagctaggaagtttcaagattcaaacttagcgcctgcttgttttccaggtacaggaagagggctgatgagtcaaacatccctgcaggagggacagatgattatttcgttgcctgagagttgcctgctcaccacggacacagtgattcgaagctacttaggggcatacattactaagtggaagcctcctccatctcctctgctggcgctgtgcacctttttagtttcagaaaagcatgctgggcaccgatctctttggaagccttacctggagattttacccaaggcgtatacctgccctgtttgtttggagccggaagtggtgaaccttcttcccaaatctttaaaagcaaaggctgaagagcagagagcccacgtgcaggagttctttgcttcctccagagactttttctcttctctgcagcctctgtttgcggaggctgttgacagcatcttcagctacagtgccctgctgtgggcttggtgcaccgtcaacaccagagccgtgtacctgaggcccaggcagcgggaatgcctttctgcagagccggacacctgtgcactcgctccgtacctggacctgctgaatcatagcccacatgtccaggtaaaagcagcgtttaatgaagaaactcattcttacgaaattagaacgacttcacgttggagaaagcatgaagaggtattcatctgttacggccctcacgataatcaacggctgttcctggaatacggatttgtttctgtccataatcctcatgcttgtgtttatgtctcaagaggttggaatcaactttgttcttaacattaacactatataatttttttccccatttggagatgtgtattttcagttttaataaaaatatcaaaacctt

SEQ ID NO: 180810 - DNA, 1160 bp, Homo sapiens
  Payload ID: 15610
  Gene Symbol: SETD4
  Gene Name: SET domain containing 4
  Uniprot ID: Q9NVD3
  ENST ID: ENST00000399207
  CDS Start-End: 176-1099
gaactgagtttaggtcgcaggtcccctccagggcaggcattatcgtgtgcgctgcagtaacctctcatcttgtggagtcctacacttagcgcatgttgctccggcgcgctgcgtaaagctgaggagcctgaggcccgagaactgtatttcagaaaaaagaaactacagttttagcatgcagaaaggaaaagggagaacaagccggatcagaagacgaaaactctgcggaagttctgaatcaagaggagtgaatgagagccacaagtctgaatttatagagctgaggaagtggctgaaagctaggaagtttcaagattcaaacttagcgcctgcttgttttccaggtacaggaagagggctgatgagtcaaacatccctgcaggagggacagatgattatttcgttgcctgagagttgcctgctcaccacggacacagtgattcgaagctacttaggggcatacattactaagtggaagcctcctccatctcctctgctggcgctgtgcacctttttagtttcagaaaagcatgctgggcaccgatctctttggaagccttacctggagattttacccaaggcgtatacctgccctgtttgtttggagccggaagtggtgaaccttcttcccaaatctttaaaagcaaaggctgaagagcagagagcccacgtgcaggagttctttgcttcctccagagactttttctcttctctgcagcctctgtttgcggaggctgttgacagcatcttcagctacagtgccctgctgtgggcttggtgcaccgtcaacaccagagccgtgtacctgaggcccaggcagcgggaatgcctttctgcagagccggacacctgtgcactcgctccgtacctggacctgctgaatcatagcccacatgtccaggtaaaagcagcgtttaatgaagaaactcattcttacgaaattagaacgacttcacgttggagaaagcatgaagaggtattcatctgttacggccctcacgataatcaacggctgttcctggaatacggatttgtttctgtccataatcctcatgcttgtgtttatgtctcaagaggttggaatcaactttgttcttaacattaacactatataatttttttccccatttggagatgtgtattttcagttttaataaaaa

SEQ ID NO: 180811 - DNA, 1165 bp, Homo sapiens
  Payload ID: 15610
  Gene Symbol: SETD4
  Gene Name: SET domain containing 4
  Uniprot ID: Q9NVD3
  ENST ID: ENST00000399208
  CDS Start-End: 169-1092
gcggccgccggcgcctaggtgagctagtaggacttccgggtcgggcctccagttgcccgggtaacgggagcagagtcggcgggattgagcatttccacagaaattacagttttgtcctttttgaaaaaatagaactgtatttcagaaaaaagaaactacagttttagcatgcagaaaggaaaagggagaacaagccggatcagaagacgaaaactctgcggaagttctgaatcaagaggagtgaatgagagccacaagtctgaatttatagagctgaggaagtggctgaaagctaggaagtttcaagattcaaacttagcgcctgcttgttttccaggtacaggaagagggctgatgagtcaaacatccctgcaggagggacagatgattatttcgttgcctgagagttgcctgctcaccacggacacagtgattcgaagctacttaggggcatacattactaagtggaagcctcctccatctcctctgctggcgctgtgcacctttttagtttcagaaaagcatgctgggcaccgatctctttggaagccttacctggagattttacccaaggcgtatacctgccctgtttgtttggagccggaagtggtgaaccttcttcccaaatctttaaaagcaaaggctgaagagcagagagcccacgtgcaggagttctttgcttcctccagagactttttctcttctctgcagcctctgtttgcggaggctgttgacagcatcttcagctacagtgccctgctgtgggcttggtgcaccgtcaacaccagagccgtgtacctgaggcccaggcagcgggaatgcctttctgcagagccggacacctgtgcactcgctccgtacctggacctgctgaatcatagcccacatgtccaggtaaaagcagcgtttaatgaagaaactcattcttacgaaattagaacgacttcacgttggagaaagcatgaagaggtattcatctgttacggccctcacgataatcaacggctgttcctggaatacggatttgtttctgtccataatcctcatgcttgtgtttatgtctcaagaggttggaatcaactttgttcttaacattaacactatataatttttttccccatttggagatgtgtattttcagttttaataaaaatatcaaaacctt

SEQ ID NO: 180812 - DNA, 3258 bp, Homo sapiens
  Payload ID: 15610
  Gene Symbol: SETD4
  Gene Name: SET domain containing 4
  Uniprot ID: Q9NVD3
  ENST ID: ENST00000399212
  CDS Start-End: 432-1682
gggagactgaggacttggattgcttaaggacaccaggcaggcgcgacagccttcagcctctccctctgcagttttggccggttcctttaacttgccttcatctggggctgtttggtatttccacgtgccttgggcccgcccactgcagcctccatcttggaagcggccgccggcgcctagattgagcatttccacagaaattacagttttgtcctttttgaaaaaatagaactgtatttcagaaaaaagaaactacagttttagcatgcagaaaggaaaagggagaacaagccggatcagaagacgaaaactctgcggaagttctgaatcaagaggagagatggggtctttctgtgttgggcaggctgggctcaaactcctggcctcaagcagtcctcccgccttggcctcccaaatgctgggaatacagaatgaatgagagccacaagtctgaatttatagagctgaggaagtggctgaaagctaggaagtttcaagattcaaacttagcgcctgcttgttttccaggtacaggaagagggctgatgagtcaaacatccctgcaggagggacagatgattatttcgttgcctgagagttgcctgctcaccacggacacagtgattcgaagctacttaggggcatacattactaagtggaagcctcctccatctcctctgctggcgctgtgcacctttttagtttcagaaaagcatgctgggcaccgatctctttggaagccttacctggagattttacccaaggcgtatacctgccctgtttgtttggagccggaagtggtgaaccttcttcccaaatctttaaaagcaaaggctgaagagcagagagcccacgtgcaggagttctttgcttcctccagagactttttctcttctctgcagcctctgtttgcggaggctgttgacagcatcttcagctacagtgccctgctgtgggcttggtgcaccgtcaacaccagagccgtgtacctgaggcccaggcagcgggaatgcctttctgcagagccggacacctgtgcactcgctccgtacctggacctgctgaatcatagcccacatgtccaggtaaaagcagcgtttaatgaagaaactcattcttacgaaattagaacgacttcacgttggagaaagcatgaagaggtattcatctgttacggccctcacgataatcaacggctgttcctggaatacggatttgtttctgtccataatcctcatgcttgtgtttatgtctcaagagaaatacttgttaaatatcttccatcaacagataaacagatggacaaaaagatttctattttaaaggatcatggctatatagaaaatttgacatttggatgggatggaccatcttggaggctactcacagcccttaagttgttatgtctggaagctgagaaatttacatgctggaaaaaagtacttcttggggaggtaatttcagatacgaatgagaagacaagtttggacatagcccagaaaatatgctattatttcatagaagagactaatgctgtgcttcaaaaggtgtctcatatgaaggatgaaaaagaggccctgataaaccaactaactttggtggaatccttgtggacggaagagctaaagattctcagggcatctgccgagaccctgcacagtttgcaaacagcttttacctgatttcaccgaagcgcatttggtcacctcctctggtgggtgttagtcacacattttagactaaggtttgatggactaaatttatatagtttagagtcgatgagttgtgtctactcaacaattaggaacttaatccttttccttttgcttttcctacagaaacaaaagttaattttgaagagcatcatcatgggctggggtggtggctgcccccaggacatgcaggatttctgcagggggcagcacaggttctgggattgtgaggctgtgagtgaaggtggacaagctgtctggatggcaggtctaatgctcttccgaataaagtgctgaactgtgaggagagaggcggactgtgaggcagccaggagccagctgcgtccgtgtgtggtctgtcaccacggggcctgcttcttatctgacacagcagctatcagagtctagtggttgtgcttttaagatgctctgataccattgggttaaggggcagattggcggtgggtgtggggcagtgtgaggtagtcctggatccccgccagggtggcccagacgccagcccttccctgtgtggctgcactgaggtgggtgttgaagagccccctaggggacacacagcttccaggaggagggaatgtcctctaagcatgctcctggcctctcaaggtggcgcttgtctaattattcacttgggaagaatgactagctcagccagcggctctttctgctttgttctggcgactttcctgggcaggcctttccacctggggagctggctcatcctgcacagctgggccgtggtgggcctgtctgcttgattctggggttcagtgtaggtcagctgatggcgaaccatggtggtggtttggcttctgttcttattcttgagttttgataccacgcagaccttgggtggggagagcttcctgcacagctctcagcggcctgtggccttggaactgcctgcgtaagtaacggaggggctgctggtcctgttcaggcccgtgctggggacgccgcttagacaatgttgcccagagtcctgtttaccctcccagggttcattcttcccaagaactcaaattcctttctcattggagcctagtgaaaccaaatgaacgggacctgctggcctcaggaggcaggcagagtttaaaataaaactttctcatgatttcttgaacatctttccctgtttgtatatacactttgtgtttatttttcagtagctgcagtatattttttttcaatattcagtataatgcagtgtatttcatcatatgctgtatggagagtgggcagacttctgtggagggcccgatagtaaccatttgaagctttctggacctgtggtcttagtcccagcgattctgcagagcggccatcggcagcatgtcaaccatttgcatggctgggctccagggaaactactgacaacgacaggtggtgggccatagtttcctgacccctgtgctatgccagaatttctttttcctcttccctatgagtggacctaaatatgttaattccttttcacctttcaaaacggacagccccttgaacattaaaaacttcgcagacccta

SEQ ID NO: 180813 - DNA, 4272 bp, Homo sapiens
  Payload ID: 15610
  Gene Symbol: SETD4
  Gene Name: SET domain containing 4
  Uniprot ID: Q9NVD3
  ENST ID: ENST00000399215
  CDS Start-End: 1374-2696
ttcatcagcgtaaaaagaactgagtttaggtcgcaggtcccctccagggcaggcattatcgtgtgcgctgcagtaacctctcatcttgtggagtcctacacttagcgcatgttgctccggcgcgctgcgtaaagctgaggagcctgaggcccgaggtccgatgctcgcctggctggcctatggctgcgggagcggtgtgtgtcggaccgtaggacggcctcacggctagagtttgaggactatgggggcggggacggtgcctgtgtctgtggcggtcaccgggcttcacgtggtcctcagcagggtgatggtggacagctcgcgcgagggcccgggagtcttggggacacttcccggcgcggtctgtggactgagcgctgggacccgcaccgaaccagccgccgttcgcctctggagctggacatgccgactttcgttaggtcaaataatgaaccttatactgcggaagtgcggtattaatattgcctggagttcttgtctcttgctcatttctgccctcgtatgttttagaagtagatttattttttatttttatttttttaatttattttttgtgacagagtctcgctctgtcgcccaggttggagtgcagtggcgtgatctcgtctagctgcagcttccgcctcctgagatcaagcgattctcctgcctcagcctccccagtagctggtattacaggtgcctgccaccacgcccggctgatttttgtatttttagtagagacggggtttcaccatgttggccaggctggtcttgaactcctgacctcagcccgcctcgggctcccaaagtgctggttttacaggcgtgagccactgtacccagccattattttatttttatttatgtatttatttttttatttttttgagacggagcctcgctctgtcgcccaggctggagtgcagtagcgcgatctcggctcactgcaacctccgcctcccaggttcaagcgattctcctgcctcagcctcccaagtagctgggattacaggcgtgtgccaccacgcctagctattttttgtatttttagtagattaagctgtagtcactaggtctgcaagataaaactgttttagagggactgatataatgggaattctgttactgtagggatcatgatttagctcacagtataaacgtttcatgtacaaaagcacttgagagaaacagtttaccaaaacatacatttgtatacttaaaggtacaaagaacagtgattatcatataactggaaagtaaatcaaagaaatgttttttattttagattgagcatttccacagaaattacagttttgtcctttttgaaaaaatagaactgtatttcagaaaaaagaaactacagttttagcatgcagaaaggaaaagggagaacaagccggatcagaagacgaaaactctgcggaagttctgaatcaagaggagtgaatgagagccacaagtctgaatttatagagctgaggaagtggctgaaagctaggaagtttcaagattcaaacttagcgcctgcttgttttccaggtacaggaagagggctgatgagtcaaacatccctgcaggagggacagatgattatttcgttgcctgagagttgcctgctcaccacggacacagtgattcgaagctacttaggggcatacattactaagtggaagcctcctccatctcctctgctggcgctgtgcacctttttagtttcagaaaagcatgctgggcaccgatctctttggaagccttacctggagattttacccaaggcgtatacctgccctgtttgtttggagccggaagtggtgaaccttcttcccaaatctttaaaagcaaaggctgaagagcagagagcccacgtgcaggagttctttgcttcctccagagactttttctcttctctgcagcctctgtttgcggaggctgttgacagcatcttcagctacagtgccctgctgtgggcttggtgcaccgtcaacaccagagccgtgtacctgaggcccaggcagcgggaatgcctttctgcagagccggacacctgtgcactcgctccgtacctggacctgctgaatcatagcccacatgtccaggtaaaagcagcgtttaatgaagaaactcattcttacgaaattagaacgacttcacgttggagaaagcatgaagaggtattcatctgttacggccctcacgataatcaacggctgttcctggaatacggatttgtttctgtccataatcctcatgcttgtgtttatgtctcaagagaaatacttgttaaatatcttccatcaacagataaacagatggacaaaaagatttctattttaaaggatcatggctatatagaaaatttgacatttggatgggatggaccatcttggaggctactcacagcccttaagttgttatgtctggaagctgagaaatttacatgctggaaaaaagtacttcttggggaggtaatttcagatacgaatgagaagacaagtttggacatagcccagaaaatatgctattatttcatagaagagactaatgctgtgcttcaaaaggtgtctcatatgaaggatgaaaaagaggccctgataaaccaactaactttggtggaatccttgtggacggaagagctaaagattctcagggcatctgccgagaccctgcacagtttgcaaacagcttttacctgatttcaccgaagcgcatttggtcacctcctctggtgggtgttagtcacacattttagactaaggtttgatggactaaatttatatagtttagagtcgatgagttgtgtctactcaacaattaggaacttaatccttttccttttgcttttcctacagaaacaaaagttaattttgaagagcatcatcatgggctggggtggtggctgcccccaggacatgcaggatttctgcagggggcagcacaggttctgggattgtgaggctgtgagtgaaggtggacaagctgtctggatggcaggtctaatgctcttccgaataaagtgctgaactgtgaggagagaggcggactgtgaggcagccaggagccagctgcgtccgtgtgtggtctgtcaccacggggcctgcttcttatctgacacagcagctatcagagtctagtggttgtgcttttaagatgctctgataccattgggttaaggggcagattggcggtgggtgtggggcagtgtgaggtagtcctggatccccgccagggtggcccagacgccagcccttccctgtgtggctgcactgaggtgggtgttgaagagccccctaggggacacacagcttccaggaggagggaatgtcctctaagcatgctcctggcctctcaaggtggcgcttgtctaattattcacttgggaagaatgactagctcagccagcggctctttctgctttgttctggcgactttcctgggcaggcctttccacctggggagctggctcatcctgcacagctgggccgtggtgggcctgtctgcttgattctggggttcagtgtaggtcagctgatggcgaaccatggtggtggtttggcttctgttcttattcttgagttttgataccacgcagaccttgggtggggagagcttcctgcacagctctcagcggcctgtggccttggaactgcctgcgtaagtaacggaggggctgctggtcctgttcaggcccgtgctggggacgccgcttagacaatgttgcccagagtcctgtttaccctcccagggttcattcttcccaagaactcaaattcctttctcattggagcctagtgaaaccaaatgaacgggacctgctggcctcaggaggcaggcagagtttaaaataaaactttctcatgatttcttgaacatctttccctgtttgtatatacactttgtgtttatttttcagtagctgcagtatattttttttcaatattcagtataatgcagtgtatttcatcatatgctgtatggagagtgggcagacttctgtggagggcccgatagtaaccatttgaagctttctggacctgtggtcttagtcccagcgattctgcagagcggccatcggcagcatgtcaaccatttgcatggctgggctccagggaaactactgacaacgacaggtggtgggccatagtttcctgacccctgtgctatgccagaatttctttttcctcttccctatgagtggacctaaatatgttaattccttttcacctttcaaaacggacagccccttgaacattaaaaacttcgcagacccta

SEQ ID NO: 180814 - DNA, 707 bp, Homo sapiens
  Payload ID: 15610
  Gene Symbol: SETD4
  Gene Name: SET domain containing 4
  ENST ID: ENST00000443703
  CDS Start-End: 507-707
ctgagtttaggtcgcaggtcccctccagggcaggcattatcgtgtgcgctgcagtaacctctcatcttgtggagtcctacacttagcgcatgttgctccggcgcgctgcgtaaagctgaggagcctgaggcccgaggtccgatgctcgcctggctggcctatggctgcgggagcggtgtgtgtcggaccgtaggacggcctcacggctagagtttgaggactatgggggcggggacggtgcctgtgtctgtggcggtcaccgggcttcacgtggtcctcagcagggtgatggtggacagctcgcgcgagggcccgggagtcttggggacacttcccggcgcggtctgtggactgagcgctgggacccgcaccgaaccagccgccgttcgcctctggagctggacatgccgactttcgttagattgagcatttccacagaaattacagttttgtcctttttgaaaaaatagaactgtatttcagaaaaaagaaactacagttttagcatgcagaaaggaaaagggagaacaagccggatcagaagacgaaaactctgcggaagttctgaatcaagaggagtgaatgagagccacaagtctgaatttatagagctgaggaagtggctgaaagctaggaagtttcaagattcaaacttagcgcctgcttgttttccaggtacaggaagagggctgatgagtcaaacatcc

SEQ ID NO: 180815 - DNA, 431 bp, Homo sapiens
  Payload ID: 15610
  Gene Symbol: SETD4
  Gene Name: SET domain containing 4
  ENST ID: ENST00000442559
  CDS Start-End: 222-431
cgggagcagagtcggcgggaactgtatttcagaaaaaagaaactacagttttagcatgcagaaaggaaaagggagaacaagccggatcagaagacgaaaactctgcggaagttctgaatcaagaggagagatggggtctttctgtgttgggcaggctgggctcaaactcctggcctcaagcagtcctcccgccttggcctcccaaatgctgggaatacagaatgaatgagagccacaagtctgaatttatagagctgaggaagtggctgaaagctaggaagtttcaagattcaaacttagcgcctgcttgttttccaggtacaggaagagggctgatgagtcaaacatccctgcaggagggacagatgattatttcgttgcctgagagttgcctgctcaccacggacacagtgattcgaagctacttaggg

SEQ ID NO: 180816 - DNA, 745 bp, Homo sapiens
  Payload ID: 15610
  Gene Symbol: SETD4
  Gene Name: SET domain containing 4
  ENST ID: ENST00000429161
  CDS Start-End: 69-745
gttgcccgggtaacgggagcagagtcggcgggaactgtatttcagaaaaaagaaactacagttttagcatgcagaaaggaaaagggagaacaagccggatcagaagacgaaaactctgcggaagttctgaatcaagaggagtgaatgagagccacaagtctgaatttatagagctgaggaagtggctgaaagctaggaagtttcaagattcaaacttagcgcctgcttgttttccaggtacaggaagagggctgatgagtcaaacatccctgcaggagggacagatgattatttcgttgcctgagagttgcctgctcaccacggacacagtgattcgaagctacttaggggcatacattactaagtggaagcctcctccatctcctctgctggcgctgtgcacctttttagtttcagaaaagcatgctgggcaccgatctctttggaagccttacctggagattttacccaaggcgtatacctgccctgtttgtttggagccggaagtggtgaaccttcttcccaaatctttaaaagcaaaggctgaagagcagagagcccacgtgcaggagttctttgcttcctccagagactttttctcttctctgcagcctctgtttgcggaggctgttgacagcatcttcagctacagtgccctgctgtgggcttggtgcaccgtcaacaccagagccgtgtacctgaggcccaggcagcgggaatgcctttctgcagagccggacacctg

SEQ ID NO: 180817 - DNA, 796 bp, Homo sapiens
  Payload ID: 15610
  Gene Symbol: SETD4
  Gene Name: SET domain containing 4
  ENST ID: ENST00000424303
  CDS Start-End: 103-796
cggccgccggcgcctagattgagcatttccacagaaattacagttttgtcctttttgaaaaaatagaactgtatttcagaaaaaagaaactacagttttagcatgcagaaaggaaaagggagaacaagccggatcagaagacgaaaactctgcggaagttctgaatcaagaggagtgaatgagagccacaagtctgaatttatagagctgaggaagtggctgaaagctaggaagtttcaagattcaaacttagcgcctgcttgttttccaggtacaggaagagggctgatgagtcaaacatccctgcaggagggacagatgattatttcgttgcctgagagttgcctgctcaccacggacacagtgattcgaagctacttaggggcatacattactaagtggaagcctcctccatctcctctgctggcgctgtgcacctttttagtttcagaaaagcatgctgggcaccgatctctttggaagccttacctggagattttacccaaggcgtatacctgccctgtttgtttggagccggaagtggtgaaccttcttcccaaatctttaaaagcaaaggctgaagagcagagagcccacgtgcaggagttctttgcttcctccagagactttttctcttctctgcagcctctgtttgcggaggctgttgacagcatcttcagctacagtgccctgctgtgggcttggtgcaccgtcaacaccagagccgtgtacctgaggcccaggcagcgggaatgcctttctgcagagccggacacctgtgcactcgctccgtacc

SEQ ID NO: 180818 - DNA, 754 bp, Homo sapiens
  Payload ID: 15610
  Gene Symbol: SETD4
  Gene Name: SET domain containing 4
  ENST ID: ENST00000446166
  CDS Start-End: 383-754
gggagactgaggacttggattgcttaaggacaccaggcaggcgcgacagccttcagcctctccctctgcagttttggccggttcctttaacttgccttcatctggggctgtttggtatttccacgtgccttgggcccgcccactgcagcctccatcttggaagcggccgccggcgcctagaactgtatttcagaaaaaagaaactacagttttagcatgcagaaaggaaaagggagaacaagccggatcagaagacgaaaactctgcggaagttctgaatcaagaggagagatggggtctttctgtgttgggcaggctgggctcaaactcctggcctcaagcagtcctcccgccttggcctcccaaatgctgggaatacagaatgaatgagagccacaagtctgaatttatagagctgaggaagtggctgaaagctaggaagtttcaagattcaaacttagcgcctgcttgttttccaggtacaggaagagggctgatgagtcaaacatccctgcaggagggacagatgattatttcgttgcctgagagttgcctgctcaccacggacacagtgattcgaagctacttaggggcatacattactaagtggaagcctcctccatctcctctgctggcgctgtgcacctttttagtttcagaaaagcatgctgggcaccgatctctttggaagccttacctggagattttacccaaggcgtatacctgccctgtttgtttggagccggaagtggtg

SEQ ID NO: 180819 - DNA, 4786 bp, Homo sapiens
  Payload ID: 15611
  Gene Symbol: SETD5
  Gene Name: SET domain containing 5
  Uniprot ID: Q9C0A6
  ENST ID: ENST00000302463
  CDS Start-End: 365-4399
ggcagtaccagggattagggtctgggctggaaaaatcctggtgttttgaatatgttcaggtccagttcagactcttgatcccacagccacttcttgagtgagccctgaatctgtggaggctagtccagcagttaatgagaagagcgtgtattccactcataattatgggaccactcagaggcatgggtgtcgaggactgccttatgctacgatcatccctcgttctgacctgaatggcctgccgtcgcctgtagaggaacgctgtggagacagcccgaactctgaaggagaaactgtacctacctggtgtccttgtggtctttctcaggatggcttccttctcaactgtgacaagtgcaggggaatgagcagggggaaggttattagacttcatcggcggaagcaggacaacatatcaggtggggatagcagtgcaacagaaagctgggatgaggagctttctccttccactgtgttgtatacagcaacacagcacacacctacaagcatcaccttaactgttagaagaaccaaacccaagaagcggaaaaagagtccagaaaagggtcgtgcagcaccaaagacgaagaaaatcaaggcatttcgagagggatcccggaagtccttgcggatgaagaattctccctctgaagcacagaatttagatgagaatacaactgagggctgggaaaatcggataagactatggactgaccagtatgaagaagctttcactaatcagtacagtgcagatgtacagaacgcgcttgaacaacacctacattctagcaaggaatttgtgggcaaacctactattttagacactattaataagactgaattggcctgtaataacacagttattggttcccaaatgcagttacagctgggaagagtcactcgtgttcaaaagcaccggaagatcctgagggctgcaagagatttggctttggacactcttataatagagtatcgtgggaaagtcatgttacgacagcaatttgaggtcaatgggcatttcttcaaaaaaccatacccctttgtgctcttctactcaaaattcaatggtgtagagatgtgtgtggatgcccgtactttcggtaatgatgctcggttcatcagaagatcatgtacaccaaatgcagaggtgcgacacatgattgcagatgggatgattcacctgtgcatctatgctgtgtctgccatcaccaaggatgctgaggtcaccatagcatttgattatgagtatagtaactgtaattataaagtggactgtgcctgtcacaagggaaaccggaattgtcctatacaaaaaaggaatcctaatgctacagaactgccactcctaccacctcctccaagcctacccaccattggagcagagactagacgtagaaaagcacgacggaaagagctagagatggagcagcagaatgaggcttcagaggagaataatgaccagcaatcacaagaagttccagaaaaagtaactgtatccagtgatcatgaggaagtagacaatccagaagaaaaaccagaagaagagaaagaagaggttatagatgaccaggagaacctagctcatagcaggaggaccagggaagatagaaaggtagaagccatcatgcatgcttttgaaaacttagagaaaagaaagaagcggcgggatcagcccttggaacagagcaactctgatgtagagattactacaaccacctcagagactcctgttggtgaagagacaaaaactgaagcccctgaatctgaagttagcaactctgtttcaaatgttaccatcccaagcaccccacagagtgttggtgtgaatacccggaggtcttcccaagcaggggatattgctgcagaaaaactagtccccaagccacctccagcaaagccttctaggccccggccgaagagtcgaatttctcggtacaggaccagttcagcccaaagactaaagcgtcagaagcaggccaatgcacagcaggcagaattgtcacaagctgccttggaagagggaggaagtaacagtttagtaactcctactgaagctggaagtctagacagttcaggagaaaacaggccattaacagggtctgacccaactgtggtgtcaattactggatcccatgtcaaccgtgctgcatctaaataccccaaaaccaaaaagtatctagttacagaatggttgaatgacaaagcagagaagcaagagtgccctgttgagtgccctttacgtatcacaacggatccaactgtactggcaacgaccctaaacatgttaccaggtcttatccattccccgttaatttgcaccacccccaaacactacattcgctttggctcaccctttatccctgagagacgtcgaaggccccttctgcctgatggcacattcagctcctgtaagaagcgctggataaaacaagccttagaagaagggatgactcaaacatcatctgtaccccaagagactagaactcagcacctataccaaagcaatgagaatagtagctcttctagtatctgcaaagacaatgcagacttgttgagcccattaaagaaatggaagtctcgctatctgatggagcagaatgtcaccaagttacttcggcctctgtctccagtcacaccaccccctcccaattcaggctcaaagagtccccagctggccacacctggctcatctcacccaggagaagaggagtgtcgaaatggatacagcctcatgttttcaccagtcacatctcttactactgctagtcgctgcaacactcctctacagtttgagctttgtcaccgaaaagacctggatttggcaaaagtaggataccttgactccaacactaacagctgtgctgatagaccttccctactcaactcaggtcattctgacctggctcctcatccctccctcggacccacttctgagactggtttcccaagcagaagtggagatggacatcagaccctcgtgagaaactcagaccaggcatttcggacagagttcaacttgatgtatgcctactcccctttgaatgctatgcctcgagcagatggactgtatcgaggatctcctctagtgggggataggaagcctttacatttggatgggggatattgttcccctgcagaaggattttccagcagatatgaacatggcttaatgaaagacctctctcgtggatccttgtcacctggtggtgaaagggcctgtgaaggagtcccatctgccccccagaacccaccacagaggaaaaaagtatccctgctggagtaccgaaaacggaaacaagaagctaaggaaaattctgctggtgggggaggtgactctgcacagagcaaaagcaagtctgcaggagctgggcaaggcagcagtaactccgtttccgacactggtgcccatggtgtgcagggatcctcagcccgaactccatcttcccctcacaaaaaattctccccatctcattcctctatgtcccatttggaggcggtaagcccatcagattccagaggcacttcttcatctcactgcagacctcaagagaatatcagcagtaggtggatggttcccacatcagtagaacgactccgagaaggagggagcatccccaaggtcctccgaagcagcgtgagggtggcccaaaagggagagccctctcccacatgggagagtaacatcacagagaaagactcagaccctgcagatggagaaggcccagagacattaagctcagcactctctaaaggagcaacagtttacagcccttccagatacagctaccagctcctgcagtgtgatagtcctcggacagaatcacaaagcctccttcagcagagttcctcccccttcagaggacatcctacacagtctccaggatacagttatcgaactactgcactgagacctggaaaccccccctctcacggttcttcagaatcatccctctcttccacgtcctattccagccccgcccaccctgtgtccacagactcgttggccccatttacggggacaccagggtattttagcagccagccacattctggaaacagcactggcagcaatcttccaaggaggagctgcccttctagtgctgctagccctaccctgcagggaccctcagactcgccaacctcagattcagtttctcagtccagcacaggaactctgagttccacctcctttcctcagaactctaggtcgtcattgccatcagacttacggactatcagtctgcccagtgctgggcagtcagctgtctaccaggcctccagggtatctgcggtttccaattcacagcactacccacaccgtgggagtgggggtgtgcaccagtaccgactccagccactgcaagggtcaggagtcaagactcagacgggactttcctagggcttctggatttgggcaaacagaactgaatgagcccatagctgcttccttccagctgcctctggaacctaggccgagcatattgctgaggaacggggggtacaaggtgccagaggattgggtctggtggacaagaaacaagacttgtggtcacaattggcctctggccttggagaaagctgtaaatcttgtctgaagcagagactataaagaagtttctccctgctgtcaagggtacattgttgacaagcaaatggtgtttcggttagtaacggttctaagtgcaatgagttgtgttgaagcctccgtctcccatccttgcctgtagcccgtagtcacttgtgcagtgaggacatctttttaaatttaaaaaaaaaaaaaaaaaaa

SEQ ID NO: 180820 - DNA, 3362 bp, Homo sapiens
  Payload ID: 15611
  Gene Symbol: SETD5
  Gene Name: SET domain containing 5
  ENST ID: ENST00000399686
  CDS Start-End: 1-2734
tgtagagatgtgtgtggatgcccgtactttcggtaatgatgctcggttcatcagaagatcatgtacaccaaatgcagaggtgcgacacatgattgcagatgggatgattcacctgtgcatctatgctgtgtctgccatcaccaaggatgctgaggtcaccatagcatttgattatgagtatagtaactgtaattataaagtggactgtgcctgtcacaagggaaaccggaattgtcctatacaaaaaaggaatcctaatgctacagaactgccactcctaccacctcctccaagcctacccaccattggagcagagactagacgtagaaaagcacgacggaaagagctagagatggagcagcagaatgaggcttcagaggagaataatgaccagcaatcacaagaagttccagaaaaagtaactgtatccagtgatcatgaggaagtagacaatccagaagaaaaaccagaagaagagaaagaagaggttatagatgaccaggagaacctagctcatagcaggaggaccagggaagatagaaaggtagaagccatcatgcatgcttttgaaaacttagagaaaagaaagaagcggcgggatcagcccttggaacagagcaactctgatgtagagattactacaaccacctcagagactcctgttggtgaagagacaaaaactgaagcccctgaatctgaagttagcaactctgtttcaaatgttaccatcccaagcaccccacagagtgttggtgtgaatacccggaggtcttcccaagcaggggatattgctgcagaaaaactagtccccaagccacctccagcaaagccttctaggccccggccgaagagtcgaatttctcggtacaggaccagttcagcccaaagactaaagcgtcagaagcaggccaatgcacagcaggcagaattgtcacaagctgccttggaagagggaggaagtaacagtttagtaactcctactgaagctggaagtctagacagttcaggagaaaacaggccattaacagggtctgacccaactgtggtgtcaattactggatcccatgtcaaccgtgctgcatctaaataccccaaaaccaaaaagtatctagttacagaatggttgaatgacaaagcagagaagcaagagtgccctgttgagtgccctttacgtatcacaacggatccaactgtactggcaacgaccctaaacatgttaccaggtcttatccattccccgttaatttgcaccacccccaaacactacattcgctttggctcaccctttatccctgagagacgtcgaaggccccttctgcctgatggcacattcagctcctgtaagaagcgctggataaaacaagccttagaagaagggatgactcaaacatcatctgtaccccaagagactagaactcagcacctataccaaagcaatgagaatagtagctcttctagtatctgcaaagacaatgcagacttgttgagcccattaaagaaatggaagtctcgctatctgatggagcagaatgtcaccaagttacttcggcctctgtctccagtcacaccaccccctcccaattcaggctcaaagagtccccagctggccacacctggctcatctcacccaggagaagaggagtgtcgaaatggatacagcctcatgttttcaccagtcacatctcttactactgctagtcgctgcaacactcctctacagtttgagctttgtcaccgaaaagacctggatttggcaaaagtaggataccttgactccaacactaacagctgtgctgatagaccttccctactcaactcaggtcattctgacctggctcctcatccctccctcggacccacttctgagactggtttcccaagcagaagtggagatggacatcagaccctcgtgagaaactcagaccaggcatttcggacagagttcaacttgatgtatgcctactcccctttgaatgctatgcctcgagcagatggactgtatcgaggatctcctctagtgggggataggaagcctttacatttggatgggggatattgttcccctgcagaaggattttccagcagatatgaacatggcttaatgaaagacctctctcgtggatccttgtcacctggtggtgaaagggcctgtgaaggagtcccatctgccccccagaacccaccacagaggaaaaaagtatccctgctggagtaccgaaaacggaaacaagaagctaaggaaaattctgctggtgggggaggtgactctgcacagagcaaaagcaagtctgcaggagctgggcaaggcagcagtaactccgtttccgacactggtgcccatggtgtgcagggatcctcagcccgaactccatcttcccctcacaaaaaattctccccatctcattcctctatgtcccatttggaggcggtaagcccatcagattccagaggcacttcttcatctcactgcagacctcaagagaatatcagcagtaggtggatggttcccacatcagtagaacgactccgagaaggagggagcatccccaaggtcctccgaagcagcgtgagggtggcccaaaagggagagccctctcccacatgggagagtaacatcacagagaaagactcagaccctgcagatggagaaggcccagagacattaagctcagcactctctaaaggagcaacagtttacagcccttccagatacagctaccagatatgtgactaagacagttgaaggagccactctagattggttggtcaagaaaagtctctgaggagttgacatttaaactgagacttcagtgacaaggaggcagtcctgggacgatgtgagtgaaattcattcttgaacgttgcagactctgtggtagaaaaagcttggttaagatgtaataaatggatggggctgggaaagaggatagaagatcctgtaagagggagataggggacagatcatgtagagcaggagtcggcaaactctttctataaagggccagatagtaaatatttagactttgcaagccatgtatggtctctgtcataactattcagccctttggctgggtgcgaatcatgcctgtaattccagcactttgggaggcccaagagagcagatcacttgaggtcagaagttcgagaccagcctggccaacatggcaaaaccctgtctactaaaaatacaaaaattaaccaggtgtggtggtgcgcacctgtaatcccagctactcaggaggctgaggcaggagaatctcttgaacctgggaggaggaggttatagtgaaccaaggtcactccactgcactccagcctgggtgatggagcgagactctgtctcaaaaaaaaaaaaaaaaaaa

SEQ ID NO: 180821 - DNA, 6582 bp, Homo sapiens
  Payload ID: 15611
  Gene Symbol: SETD5
  Gene Name: SET domain containing 5
  Uniprot ID: Q9C0A6
  ENST ID: ENST00000406341
  CDS Start-End: 191-4519
ctcgagtcctgccgcctcccgggagtgccgtgcgccgcagcccgggcccaggccccggcagcgcctgggacaaggattcctcatgtccataacatgttggatgaggctctgcagctcacccccactctcagagtggtcagtctccattaattggaccccgtgatttccaatctctgctgtgttggacgtcatgagcattgcaatccctctgggagtcaccacatcagatacatcctactcagatatggctgctggatcagaccctgaatctgtggaggctagtccagcagttaatgagaagagcgtgtattccactcataattatgggaccactcagaggcatgggtgtcgaggactgccttatgctacgatcatccctcgttctgacctgaatggcctgccgtcgcctgtagaggaacgctgtggagacagcccgaactctgaaggagaaactgtacctacctggtgtccttgtggtctttctcaggatggcttccttctcaactgtgacaagtgcaggggaatgagcagggggaaggttattagacttcatcggcggaagcaggacaacatatcaggtggggatagcagtgcaacagaaagctgggatgaggagctttctccttccactgtgttgtatacagcaacacagcacacacctacaagcatcaccttaactgttagaagaaccaaacccaagaagcggaaaaagagtccagaaaagggtcgtgcagcaccaaagacgaagaaaatcaagaattctccctctgaagcacagaatttagatgagaatacaactgagggctgggaaaatcggataagactatggactgaccagtatgaagaagctttcactaatcagtacagtgcagatgtacagaacgcgcttgaacaacacctacattctagcaaggaatttgtgggcaaacctactattttagacactattaataagactgaattggcctgtaataacacagttattggttcccaaatgcagttacagctgggaagagtcactcgtgttcaaaagcaccggaagatcctgagggctgcaagagatttggctttggacactcttataatagagtatcgtgggaaagtcatgttacgacagcaatttgaggtcaatgggcatttcttcaaaaaaccatacccctttgtgctcttctactcaaaattcaatggtgtagagatgtgtgtggatgcccgtactttcggtaatgatgctcggttcatcagaagatcatgtacaccaaatgcagaggtgcgacacatgattgcagatgggatgattcacctgtgcatctatgctgtgtctgccatcaccaaggatgctgaggtcaccatagcatttgattatgagtatagtaactgtaattataaagtggactgtgcctgtcacaagggaaaccggaattgtcctatacaaaaaaggaatcctaatgctacagaactgccactcctaccacctcctccaagcctacccaccattggagcagagactagacgtagaaaagcacgacggaaagagctagagatggagcagcagaatgaggcttcagaggagaataatgaccagcaatcacaagaagttccagaaaaagtaactgtatccagtgatcatgaggaagtagacaatccagaagaaaaaccagaagaagagaaagaagaggttatagatgaccaggagaacctagctcatagcaggaggaccagggaagatagaaaggtagaagccatcatgcatgcttttgaaaacttagagaaaagaaagaagcggcgggatcagcccttggaacagagcaactctgatgtagagattactacaaccacctcagagactcctgttggtgaagagacaaaaactgaagcccctgaatctgaagttagcaactctgtttcaaatgttaccatcccaagcaccccacagagtgttggtgtgaatacccggaggtcttcccaagcaggggatattgctgcagaaaaactagtccccaagccacctccagcaaagccttctaggccccggccgaagagtcgaatttctcggtacaggaccagttcagcccaaagactaaagcgtcagaagcaggccaatgcacagcaggcagaattgtcacaagctgccttggaagagggaggaagtaacagtttagtaactcctactgaagctggaagtctagacagttcaggagaaaacaggccattaacagggtctgacccaactgtggtgtcaattactggatcccatgtcaaccgtgctgcatctaaataccccaaaaccaaaaagtatctagttacagaatggttgaatgacaaagcagagaagcaagagtgccctgttgagtgccctttacgtatcacaacggatccaactgtactggcaacgaccctaaacatgttaccaggtcttatccattccccgttaatttgcaccacccccaaacactacattcgctttggctcaccctttatccctgagagacgtcgaaggccccttctgcctgatggcacattcagctcctgtaagaagcgctggataaaacaagccttagaagaagggatgactcaaacatcatctgtaccccaagagactagaactcagcacctataccaaagcaatgagaatagtagctcttctagtatctgcaaagacaatgcagacttgttgagcccattaaagaaatggaagtctcgctatctgatggagcagaatgtcaccaagttacttcggcctctgtctccagtcacaccaccccctcccaattcaggctcaaagagtccccagctggccacacctggctcatctcacccaggagaagaggagtgtcgaaatggatacagcctcatgttttcaccagtcacatctcttactactgctagtcgctgcaacactcctctacagtttgagctttgtcaccgaaaagacctggatttggcaaaagtaggataccttgactccaacactaacagctgtgctgatagaccttccctactcaactcaggtcattctgacctggctcctcatccctccctcggacccacttctgagactggtttcccaagcagaagtggagatggacatcagaccctcgtgagaaactcagaccaggcatttcggacagagttcaacttgatgtatgcctactcccctttgaatgctatgcctcgagcagatggactgtatcgaggatctcctctagtgggggataggaagcctttacatttggatgggggatattgttcccctgcagaaggattttccagcagatatgaacatggcttaatgaaagacctctctcgtggatccttgtcacctggtggtgaaagggcctgtgaaggagtcccatctgccccccagaacccaccacagaggaaaaaagtatccctgctggagtaccgaaaacggaaacaagaagctaaggaaaattctgctggtgggggaggtgactctgcacagagcaaaagcaagtctgcaggagctgggcaaggcagcagtaactccgtttccgacactggtgcccatggtgtgcagggatcctcagcccgaactccatcttcccctcacaaaaaattctccccatctcattcctctatgtcccatttggaggcggtaagcccatcagattccagaggcacttcttcatctcactgcagacctcaagagaatatcagcagtaggtggatggttcccacatcagtagaacgactccgagaaggagggagcatccccaaggtcctccgaagcagcgtgagggtggcccaaaagggagagccctctcccacatgggagagtaacatcacagagaaagactcagaccctgcagatggagaaggcccagagacattaagctcagcactctctaaaggagcaacagtttacagcccttccagatacagctaccagctcctgcagtgtgatagtcctcggacagaatcacaaagcctccttcagcagagttcctcccccttcagaggacatcctacacagtctccaggatacagttatcgaactactgcactgagacctggaaaccccccctctcacggttcttcagaatcatccctctcttccacgtcctattccagccccgcccaccctgtgtccacagactcgttggccccatttacggggacaccagggtattttagcagccagccacattctggaaacagcactggcagcaatcttccaaggaggagctgcccttctagtgctgctagccctaccctgcagggaccctcagactcgccaacctcagattcagtttctcagtccagcacaggaactctgagttccacctcctttcctcagaactctaggtcgtcattgccatcagacttacggactatcagtctgcccagtgctgggcagtcagctgtctaccaggcctccagggtatctgcggtttccaattcacagcactacccacaccgtgggagtgggggtgtgcaccagtaccgactccagccactgcaagggtcaggagtcaagactcagacgggactttcctagggcttctggatttgggcaaacagaactgaatgagcccatagctgcttccttccagctgcctctggaacctaggccgagcatattgctgaggaacggggggtacaaggtgccagaggattgggtctggtggacaagaaacaagacttgtggtcacaattggcctctggccttggagaaagctgtaaatcttgtctgaagcagagactataaagaagtttctccctgctgtcaagggtacattgttgacaagcaaatggtgtttcggttagtaacggttctaagtgcaatgagttgtgttgaagcctccgtctcccatccttgcctgtagcccgtagtcacttgtgcagtgaggacatctttttaaatttaaaaaaaaaaaaaaaaaaagttttcaaaggaaaaaaagttaaaagagccaatctcaaagccccaagccatctgagtactgttagggttttatgcacttaagaaaaaaggtaggtatgtaaatgttcatcctaagacaaccattccaaaagcaggtatctggccaatgtgtgtccaccaagaatactgtttatctttgtcttaagatcaccaagaaataggcaaggatagtaaagcttggaacctgcaccaactggagggtgcctggctctttgaagaaaagctcatggtcagctcttgattattcgggagcagattatttgagtagattgtctgagcctccaactgttaccatcctactcccccttcccaagctatttcacagctcagtaacccatgaagtaagtagacaagaaaaggaggaatgagacatgatataggccaattgcattgctacttaccagcttttggcaataaatttcattaggaaggataccgagtggtttgggaatgcttcgaattttattttttctactcccaattaatcaggagttgatgatcccatgagcaggaccgcctccatgattggggagcatgcacttgtgactgcagggtaagagtgggaagataggtttgtggagtggcaccgacaggactgtgattgtgtgtgggcctgccccacatttctctgggggatgcttatgtgagagtgggcccagtgaaagagttaccaagccacccacacccctaacactgttctggatgagagatgagagcagaccggcttctccccatcagtgcattgtgcctgttgtacacccctggaggagccctggagccagcccaggtggggtacacaatctttttaaattccatatggttgccagcttatttctttcacttgtttactgtaatatctggcgtgtttttatttatctaattttgtattcagttataaccatggtaggggtagtgaatatatgacaggtgtaatccctggtgctgcagtggaccttcttttcttttggacaagataatactgtgagtttccctccttccttccctctaatttgttttccttttttccccagcctcttgcatccccttcttttctaccctgtcctacaactatcatatgcacagtcttctctctttgtgtgtgactgttacaaaatttcacttttcaaaatcgaaatcaggtgtttgctcaaatgaggggagattttttttttttttttttttttaaatgctgagacctcagcagagtacttttctttttgttgtttcccccacaaacccatcagtctgggagagcattgggagtggaaatcatgttgcctgggatgctggtttctttgtatattatataaaacgtatgtaaatgtctctccatttgggctggggtttgcattctccccttggctatttaaccaaggggagaggccagcgggcaggcggccctcaccctgcctggcacgtgcagagaccccagccactctgtgtgggcagggtgctgtcaagaccagacctcttgggggggtaggggcgggggggtggggggaactcttggaagggaagaagtatcacttctttctcaagtggagtgtttacaccttgctgtaacatttgaactttcacaagagatgtaataattttgataataaaattcttaaccataataatcataaagttgagaa

SEQ ID NO: 180822 - DNA, 6463 bp, Homo sapiens
  Payload ID: 15611
  Gene Symbol: SETD5
  Gene Name: SET domain containing 5
  ENST ID: ENST00000407969
  CDS Start-End: 15-4400
ctgtgttggacgtcatgagcattgcaatccctctgggagtcaccacatcagatacatcctactcagatatggctgctggatcagaccctgaatctgtggaggctagtccagcagttaatgagaagagcgtgtattccactcataattatgggaccactcagaggcatgggtgtcgaggactgccttatgctgatcataattacggagcccctcctcctccgacacctcctgcttctccccctgtccagacgatcatccctcgttctgacctgaatggcctgccgtcgcctgtagaggaacgctgtggagacagcccgaactctgaaggagaaactgtacctacctggtgtccttgtggtctttctcaggatggcttccttctcaactgtgacaagtgcaggggaatgagcagggggaaggttattagacttcatcggcggaagcaggacaacatatcaggtggggatagcagtgcaacagaaagctgggatgaggagctttctccttccactgtgttgtatacagcaacacagcacacacctacaagcatcaccttaactgttagaagaaccaaacccaagaagcggaaaaagagtccagaaaagggtcgtgcagcaccaaagacgaagaaaatcaagaattctccctctgaagcacagaatttagatgagaatacaactgagggctgggaaaatcggataagactatggactgaccagtatgaagaagctttcactaatcagtacagtgcagatgtacagaacgcgcttgaacaacacctacattctagcaaggaatttgtgggcaaacctactattttagacactattaataagactgaattggcctgtaataacacagttattggttcccaaatgcagttacagctgggaagagtcactcgtgttcaaaagcaccggaagatcctgagggctgcaagagatttggctttggacactcttataatagagtatcgtgggaaagtcatgttacgacagcaatttgaggtcaatgggcatttcttcaaaaaaccatacccctttgtgctcttctactcaaaattcaatggtgtagagatgtgtgtggatgcccgtactttcggtaatgatgctcggttcatcagaagatcatgtacaccaaatgcagaggtgcgacacatgattgcagatgggatgattcacctgtgcatctatgctgtgtctgccatcaccaaggatgctgaggtcaccatagcatttgattatgagtatagtaactgtaattataaagtggactgtgcctgtcacaagggaaaccggaattgtcctatacaaaaaaggaatcctaatgctacagaactgccactcctaccacctcctccaagcctacccaccattggagcagagactagacgtagaaaagcacgacggaaagagctagagatggagcagcagaatgaggcttcagaggagaataatgaccagcaatcacaagaagttccagaaaaagtaactgtatccagtgatcatgaggaagtagacaatccagaagaaaaaccagaagaagagaaagaagaggttatagatgaccaggagaacctagctcatagcaggaggaccagggaagatagaaaggtagaagccatcatgcatgcttttgaaaacttagagaaaagaaagaagcggcgggatcagcccttggaacagagcaactctgatgtagagattactacaaccacctcagagactcctgttggtgaagagacaaaaactgaagcccctgaatctgaagttagcaactctgtttcaaatgttaccatcccaagcaccccacagagtgttggtgtgaatacccggaggtcttcccaagcaggggatattgctgcagaaaaactagtccccaagccacctccagcaaagccttctaggccccggccgaagagtcgaatttctcggtacaggaccagttcagcccaaagactaaagcgtcagaagcaggccaatgcacagcaggcagaattgtcacaagctgccttggaagagggaggaagtaacagtttagtaactcctactgaagctggaagtctagacagttcaggagaaaacaggccattaacagggtctgacccaactgtggtgtcaattactggatcccatgtcaaccgtgctgcatctaaataccccaaaaccaaaaagtatctagttacagaatggttgaatgacaaagcagagaagcaagagtgccctgttgagtgccctttacgtatcacaacggatccaactgtactggcaacgaccctaaacatgttaccaggtcttatccattccccgttaatttgcaccacccccaaacactacattcgctttggctcaccctttatccctgagagacgtcgaaggccccttctgcctgatggcacattcagctcctgtaagaagcgctggataaaacaagccttagaagaagggatgactcaaacatcatctgtaccccaagagactagaactcagcacctataccaaagcaatgagaatagtagctcttctagtatctgcaaagacaatgcagacttgttgagcccattaaagaaatggaagtctcgctatctgatggagcagaatgtcaccaagttacttcggcctctgtctccagtcacaccaccccctcccaattcaggctcaaagagtccccagctggccacacctggctcatctcacccaggagaagaggagtgtcgaaatggatacagcctcatgttttcaccagtcacatctcttactactgctagtcgctgcaacactcctctacagtttgagctttgtcaccgaaaagacctggatttggcaaaagtaggataccttgactccaacactaacagctgtgctgatagaccttccctactcaactcaggtcattctgacctggctcctcatccctccctcggacccacttctgagactggtttcccaagcagaagtggagatggacatcagaccctcgtgagaaactcagaccaggcatttcggacagagttcaacttgatgtatgcctactcccctttgaatgctatgcctcgagcagatggactgtatcgaggatctcctctagtgggggataggaagcctttacatttggatgggggatattgttcccctgcagaaggattttccagcagatatgaacatggcttaatgaaagacctctctcgtggatccttgtcacctggtggtgaaagggcctgtgaaggagtcccatctgccccccagaacccaccacagaggaaaaaagtatccctgctggagtaccgaaaacggaaacaagaagctaaggaaaattctgctggtgggggaggtgactctgcacagagcaaaagcaagtctgcaggagctgggcaaggcagcagtaactccgtttccgacactggtgcccatggtgtgcagggatcctcagcccgaactccatcttcccctcacaaaaaattctccccatctcattcctctatgtcccatttggaggcggtaagcccatcagattccagaggcacttcttcatctcactgcagacctcaagagaatatcagcagtaggtggatggttcccacatcagtagaacgactccgagaaggagggagcatccccaaggtcctccgaagcagcgtgagggtggcccaaaagggagagccctctcccacatgggagagtaacatcacagagaaagactcagaccctgcagatggagaaggcccagagacattaagctcagcactctctaaaggagcaacagtttacagcccttccagatacagctaccagctcctgcagtgtgatagtcctcggacagaatcacaaagcctccttcagcagagttcctcccccttcagaggacatcctacacagtctccaggatacagttatcgaactactgcactgagacctggaaaccccccctctcacggttcttcagaatcatccctctcttccacgtcctattccagccccgcccaccctgtgtccacagactcgttggccccatttacggggacaccagggtattttagcagccagccacattctggaaacagcactggcagcaatcttccaaggaggagctgcccttctagtgctgctagccctaccctgcagggaccctcagactcgccaacctcagattcagtttctcagtccagcacaggaactctgagttccacctcctttcctcagaactctaggtcgtcattgccatcagacttacggactatcagtctgcccagtgctgggcagtcagctgtctaccaggcctccagggtatctgcggtttccaattcacagcactacccacaccgtgggagtgggggtgtgcaccagtaccgactccagccactgcaagggtcaggagtcaagactcagacgggactttcctagggcttctggatttgggcaaacagaactgaatgagcccatagctgcttccttccagctgcctctggaacctaggccgagcatattgctgaggaacggggggtacaaggtgccagaggattgggtctggtggacaagaaacaagacttgtggtcacaattggcctctggccttggagaaagctgtaaatcttgtctgaagcagagactataaagaagtttctccctgctgtcaagggtacattgttgacaagcaaatggtgtttcggttagtaacggttctaagtgcaatgagttgtgttgaagcctccgtctcccatccttgcctgtagcccgtagtcacttgtgcagtgaggacatctttttaaatttaaaaaaaaaaaaaaaaaaagttttcaaaggaaaaaaagttaaaagagccaatctcaaagccccaagccatctgagtactgttagggttttatgcacttaagaaaaaaggtaggtatgtaaatgttcatcctaagacaaccattccaaaagcaggtatctggccaatgtgtgtccaccaagaatactgtttatctttgtcttaagatcaccaagaaataggcaaggatagtaaagcttggaacctgcaccaactggagggtgcctggctctttgaagaaaagctcatggtcagctcttgattattcgggagcagattatttgagtagattgtctgagcctccaactgttaccatcctactcccccttcccaagctatttcacagctcagtaacccatgaagtaagtagacaagaaaaggaggaatgagacatgatataggccaattgcattgctacttaccagcttttggcaataaatttcattaggaaggataccgagtggtttgggaatgcttcgaattttattttttctactcccaattaatcaggagttgatgatcccatgagcaggaccgcctccatgattggggagcatgcacttgtgactgcagggtaagagtgggaagataggtttgtggagtggcaccgacaggactgtgattgtgtgtgggcctgccccacatttctctgggggatgcttatgtgagagtgggcccagtgaaagagttaccaagccacccacacccctaacactgttctggatgagagatgagagcagaccggcttctccccatcagtgcattgtgcctgttgtacacccctggaggagccctggagccagcccaggtggggtacacaatctttttaaattccatatggttgccagcttatttctttcacttgtttactgtaatatctggcgtgtttttatttatctaattttgtattcagttataaccatggtaggggtagtgaatatatgacaggtgtaatccctggtgctgcagtggaccttcttttcttttggacaagataatactgtgagtttccctccttccttccctctaatttgttttccttttttccccagcctcttgcatccccttcttttctaccctgtcctacaactatcatatgcacagtcttctctctttgtgtgtgactgttacaaaatttcacttttcaaaatcgaaatcaggtgtttgctcaaatgaggggagattttttttttttttttttttttaaatgctgagacctcagcagagtacttttctttttgttgtttcccccacaaacccatcagtctgggagagcattgggagtggaaatcatgttgcctgggatgctggtttctttgtatattatataaaacgtatgtaaatgtctctccatttgggctggggtttgcattctccccttggctatttaaccaaggggagaggccagcgggcaggcggccctcaccctgcctggcacgtgcagagaccccagccactctgtgtgggcagggtgctgtcaagaccagacctcttgggggggtaggggcgggggggtggggggaactcttggaagggaagaagtatcacttctttctcaagtggagtgtttacaccttgctgtaacatttgaactttcacaagagatgtaataattttgataataaaattcttaaccataataatcataaagttgagaa

SEQ ID NO: 180823 - DNA, 6827 bp, Homo sapiens
  Payload ID: 15611
  Gene Symbol: SETD5
  Gene Name: SET domain containing 5
  Uniprot ID: Q9C0A6
  ENST ID: ENST00000402198
  CDS Start-End: 436-4764
gctcagagactcacgcagccccagtcccgccagtccgccaacacagtagtgccggcccccctctttccctggccctgccccccctccccgcctttggctcgctccgcctttctgccccccacccccacctcacgggtacgggccattcccggccaggaaacgccgtggcgccgcgttgggcctaactcgagtcctgccgcctcccgggagtgccgtgcgccgcagcccgggcccaggccccggcagcgcctgggacaaggtcttcagaactactagcagataatttggggggacttcatattcagaagtctatataaaggattcctcatgtccataacatgttggatgaggctctgcagctcacccccactctcagagtggtcagtctccattaattggaccccgtgatttccaatctctgctgtgttggacgtcatgagcattgcaatccctctgggagtcaccacatcagatacatcctactcagatatggctgctggatcagaccctgaatctgtggaggctagtccagcagttaatgagaagagcgtgtattccactcataattatgggaccactcagaggcatgggtgtcgaggactgccttatgctacgatcatccctcgttctgacctgaatggcctgccgtcgcctgtagaggaacgctgtggagacagcccgaactctgaaggagaaactgtacctacctggtgtccttgtggtctttctcaggatggcttccttctcaactgtgacaagtgcaggggaatgagcagggggaaggttattagacttcatcggcggaagcaggacaacatatcaggtggggatagcagtgcaacagaaagctgggatgaggagctttctccttccactgtgttgtatacagcaacacagcacacacctacaagcatcaccttaactgttagaagaaccaaacccaagaagcggaaaaagagtccagaaaagggtcgtgcagcaccaaagacgaagaaaatcaagaattctccctctgaagcacagaatttagatgagaatacaactgagggctgggaaaatcggataagactatggactgaccagtatgaagaagctttcactaatcagtacagtgcagatgtacagaacgcgcttgaacaacacctacattctagcaaggaatttgtgggcaaacctactattttagacactattaataagactgaattggcctgtaataacacagttattggttcccaaatgcagttacagctgggaagagtcactcgtgttcaaaagcaccggaagatcctgagggctgcaagagatttggctttggacactcttataatagagtatcgtgggaaagtcatgttacgacagcaatttgaggtcaatgggcatttcttcaaaaaaccatacccctttgtgctcttctactcaaaattcaatggtgtagagatgtgtgtggatgcccgtactttcggtaatgatgctcggttcatcagaagatcatgtacaccaaatgcagaggtgcgacacatgattgcagatgggatgattcacctgtgcatctatgctgtgtctgccatcaccaaggatgctgaggtcaccatagcatttgattatgagtatagtaactgtaattataaagtggactgtgcctgtcacaagggaaaccggaattgtcctatacaaaaaaggaatcctaatgctacagaactgccactcctaccacctcctccaagcctacccaccattggagcagagactagacgtagaaaagcacgacggaaagagctagagatggagcagcagaatgaggcttcagaggagaataatgaccagcaatcacaagaagttccagaaaaagtaactgtatccagtgatcatgaggaagtagacaatccagaagaaaaaccagaagaagagaaagaagaggttatagatgaccaggagaacctagctcatagcaggaggaccagggaagatagaaaggtagaagccatcatgcatgcttttgaaaacttagagaaaagaaagaagcggcgggatcagcccttggaacagagcaactctgatgtagagattactacaaccacctcagagactcctgttggtgaagagacaaaaactgaagcccctgaatctgaagttagcaactctgtttcaaatgttaccatcccaagcaccccacagagtgttggtgtgaatacccggaggtcttcccaagcaggggatattgctgcagaaaaactagtccccaagccacctccagcaaagccttctaggccccggccgaagagtcgaatttctcggtacaggaccagttcagcccaaagactaaagcgtcagaagcaggccaatgcacagcaggcagaattgtcacaagctgccttggaagagggaggaagtaacagtttagtaactcctactgaagctggaagtctagacagttcaggagaaaacaggccattaacagggtctgacccaactgtggtgtcaattactggatcccatgtcaaccgtgctgcatctaaataccccaaaaccaaaaagtatctagttacagaatggttgaatgacaaagcagagaagcaagagtgccctgttgagtgccctttacgtatcacaacggatccaactgtactggcaacgaccctaaacatgttaccaggtcttatccattccccgttaatttgcaccacccccaaacactacattcgctttggctcaccctttatccctgagagacgtcgaaggccccttctgcctgatggcacattcagctcctgtaagaagcgctggataaaacaagccttagaagaagggatgactcaaacatcatctgtaccccaagagactagaactcagcacctataccaaagcaatgagaatagtagctcttctagtatctgcaaagacaatgcagacttgttgagcccattaaagaaatggaagtctcgctatctgatggagcagaatgtcaccaagttacttcggcctctgtctccagtcacaccaccccctcccaattcaggctcaaagagtccccagctggccacacctggctcatctcacccaggagaagaggagtgtcgaaatggatacagcctcatgttttcaccagtcacatctcttactactgctagtcgctgcaacactcctctacagtttgagctttgtcaccgaaaagacctggatttggcaaaagtaggataccttgactccaacactaacagctgtgctgatagaccttccctactcaactcaggtcattctgacctggctcctcatccctccctcggacccacttctgagactggtttcccaagcagaagtggagatggacatcagaccctcgtgagaaactcagaccaggcatttcggacagagttcaacttgatgtatgcctactcccctttgaatgctatgcctcgagcagatggactgtatcgaggatctcctctagtgggggataggaagcctttacatttggatgggggatattgttcccctgcagaaggattttccagcagatatgaacatggcttaatgaaagacctctctcgtggatccttgtcacctggtggtgaaagggcctgtgaaggagtcccatctgccccccagaacccaccacagaggaaaaaagtatccctgctggagtaccgaaaacggaaacaagaagctaaggaaaattctgctggtgggggaggtgactctgcacagagcaaaagcaagtctgcaggagctgggcaaggcagcagtaactccgtttccgacactggtgcccatggtgtgcagggatcctcagcccgaactccatcttcccctcacaaaaaattctccccatctcattcctctatgtcccatttggaggcggtaagcccatcagattccagaggcacttcttcatctcactgcagacctcaagagaatatcagcagtaggtggatggttcccacatcagtagaacgactccgagaaggagggagcatccccaaggtcctccgaagcagcgtgagggtggcccaaaagggagagccctctcccacatgggagagtaacatcacagagaaagactcagaccctgcagatggagaaggcccagagacattaagctcagcactctctaaaggagcaacagtttacagcccttccagatacagctaccagctcctgcagtgtgatagtcctcggacagaatcacaaagcctccttcagcagagttcctcccccttcagaggacatcctacacagtctccaggatacagttatcgaactactgcactgagacctggaaaccccccctctcacggttcttcagaatcatccctctcttccacgtcctattccagccccgcccaccctgtgtccacagactcgttggccccatttacggggacaccagggtattttagcagccagccacattctggaaacagcactggcagcaatcttccaaggaggagctgcccttctagtgctgctagccctaccctgcagggaccctcagactcgccaacctcagattcagtttctcagtccagcacaggaactctgagttccacctcctttcctcagaactctaggtcgtcattgccatcagacttacggactatcagtctgcccagtgctgggcagtcagctgtctaccaggcctccagggtatctgcggtttccaattcacagcactacccacaccgtgggagtgggggtgtgcaccagtaccgactccagccactgcaagggtcaggagtcaagactcagacgggactttcctagggcttctggatttgggcaaacagaactgaatgagcccatagctgcttccttccagctgcctctggaacctaggccgagcatattgctgaggaacggggggtacaaggtgccagaggattgggtctggtggacaagaaacaagacttgtggtcacaattggcctctggccttggagaaagctgtaaatcttgtctgaagcagagactataaagaagtttctccctgctgtcaagggtacattgttgacaagcaaatggtgtttcggttagtaacggttctaagtgcaatgagttgtgttgaagcctccgtctcccatccttgcctgtagcccgtagtcacttgtgcagtgaggacatctttttaaatttaaaaaaaaaaaaaaaaaaagttttcaaaggaaaaaaagttaaaagagccaatctcaaagccccaagccatctgagtactgttagggttttatgcacttaagaaaaaaggtaggtatgtaaatgttcatcctaagacaaccattccaaaagcaggtatctggccaatgtgtgtccaccaagaatactgtttatctttgtcttaagatcaccaagaaataggcaaggatagtaaagcttggaacctgcaccaactggagggtgcctggctctttgaagaaaagctcatggtcagctcttgattattcgggagcagattatttgagtagattgtctgagcctccaactgttaccatcctactcccccttcccaagctatttcacagctcagtaacccatgaagtaagtagacaagaaaaggaggaatgagacatgatataggccaattgcattgctacttaccagcttttggcaataaatttcattaggaaggataccgagtggtttgggaatgcttcgaattttattttttctactcccaattaatcaggagttgatgatcccatgagcaggaccgcctccatgattggggagcatgcacttgtgactgcagggtaagagtgggaagataggtttgtggagtggcaccgacaggactgtgattgtgtgtgggcctgccccacatttctctgggggatgcttatgtgagagtgggcccagtgaaagagttaccaagccacccacacccctaacactgttctggatgagagatgagagcagaccggcttctccccatcagtgcattgtgcctgttgtacacccctggaggagccctggagccagcccaggtggggtacacaatctttttaaattccatatggttgccagcttatttctttcacttgtttactgtaatatctggcgtgtttttatttatctaattttgtattcagttataaccatggtaggggtagtgaatatatgacaggtgtaatccctggtgctgcagtggaccttcttttcttttggacaagataatactgtgagtttccctccttccttccctctaatttgttttccttttttccccagcctcttgcatccccttcttttctaccctgtcctacaactatcatatgcacagtcttctctctttgtgtgtgactgttacaaaatttcacttttcaaaatcgaaatcaggtgtttgctcaaatgaggggagattttttttttttttttttttttaaatgctgagacctcagcagagtacttttctttttgttgtttcccccacaaacccatcagtctgggagagcattgggagtggaaatcatgttgcctgggatgctggtttctttgtatattatataaaacgtatgtaaatgtctctccatttgggctggggtttgcattctccccttggctatttaaccaaggggagaggccagcgggcaggcggccctcaccctgcctggcacgtgcagagaccccagccactctgtgtgggcagggtgctgtcaagaccagacctcttgggggggtaggggcgggggggtggggggaactcttggaagggaagaagtatcacttctttctcaagtggagtgtttacaccttgctgtaacatttgaactttcacaagagatgtaataattttgataataaaattcttaaccataataatcataaagttgagaa

SEQ ID NO: 180824 - DNA, 3478 bp, Homo sapiens
  Payload ID: 15611
  Gene Symbol: SETD5
  Gene Name: SET domain containing 5
  ENST ID: ENST00000443339
  CDS Start-End: 255-413
ctaactcgagtcctgccgcctcccgggagtgccgtgcgccgcagcccgggcccaggccccggcagcgcctgggacaaggtcttcagaactactagcagataatttggggggacttcatattcagaagtctatataaaggattcctcatgtccataacatgttggatgaggctctgcagctcacccccactctcagagtggtcagtctccattaattggaccccgtgatttccaatctctgctgtgttggacgtcatgagcattgcaatccctctgggagtcaccacatcagatacatcctactcagatatggctgctggatcagaaaaggaagtggaagccccctacctttcaagacgaagtggcactacaccaggatgtgaaagtccagcgaaagagacccaaggggcctagggggcagcacacccccagaagccaagtctattccaggcagtaccagggattagggtctgggctggaaaaatcctggtgttttgaatatgttcaggtccagttcagactcttgatcccacagccacttcttgagtgagccctgaatctgtggaggctagtccagcagttaatgagaagagcgtgtattccactcataattatgggaccactcagaggcatgggtgtcgaggactgccttatgctcatgacgaagttgccccttttgcacttccctgactccagcggacgtctagccctgcatcattgttcttgtttttatgtcccagttgaccttggcattttgttttatcactttcctggttgaagccaaaaaacaaagggatcataattacggagcccctcctcctccgacacctcctgcttctccccctgtccagacgatcatccctcgttctgacctgaatggcctgccgtcgcctgtagaggaacgctgtggagacagcccgaactctgaaggagaaactgtacctacctggtgtccttgtggtctttctcaggatggcttccttctcaactgtgacaagtgcaggggaatgagcagggggaaggttattagacttcatcggcggaagcaggacaacatatcaggtggggatagcagtgcaacagaaagctgggatgaggagctttctccttccactgtgttgtatacagcaacacagcacacacctacaagcatcaccttaactgttagaagaaccaaacccaagaagcggaaaaagagtccagaaaagggtcgtgcagcaccaaagacgaagaaaatcaagaattctccctctgaagcacagaatttagatgagaatacaactgagggctgggaaaatcggataagactatggactgaccagtatgaagaagctttcactaatcagtacagtgcagatgtacagaacgcgcttgaacaacacctacattctagcaaggaatttgtgggcaaacctactattttagacactattaataagactgaattggcctgtaataacacagttattggttcccaaatgcagttacagctgggaagagtcactcgtgttcaaaagcaccggaagatcctgagggctgcaagagatttggctttggacactcttataatagagtatcgtgggaaagtcatgttacgacagcaatttgaggtcaatgggcatttcttcaaaaaaccatacccctttgtgctcttctactcaaaattcaatggtgtagagatgtgtgtggatgcccgtactttcggtaatgatgctcggttcatcagaagatcatgtacaccaaatgcagaggtgcgacacatgattgcagatgggatgattcacctgtgcatctatgctgtgtctgccatcaccaaggatgctgaggtcaccatagcatttgattatgagtatagtaactgtaattataaagtggactgtgcctgtcacaagggaaaccggaattgtcctatacaaaaaaggaatcctaatgctacagaactgccactcctaccacctcctccaagcctacccaccattggagcagagactagacgtagaaaagcacgacggaaagagctagagatggagcagcagaatgaggcttcagaggagaataatgaccagcaatcacaagaagttccagaaaaagtaactgtatccagtgatcatgaggaagtagacaatccagaagaaaaaccagaagaagagaaagaagaggttatagatgaccaggagaacctagctcatagcaggaggaccagggaagatagaaaggtagaagccatcatgcatgcttttgaaaacttagagaaaagaaagaagcggcgggatcagcccttggaacagagcaactctgatgtagagattactacaaccacctcagagactcctgttggtgaagagacaaaaactgaagcccctgaatctgaagttagcaactctgtttcaaatgttaccatcccaagcaccccacagagtgttggtgtgaatacccggaggtcttcccaagcaggggatattgctgcagaaaaactagtccccaagccacctccagcaaagccttctaggccccggccgaagagtcgaatttctcggtacaggaccagttcagcccaaagactaaagcgtcagaagcaggccaatgcacagcaggcagaattgtcacaagctgccttggaagagggaggaagtaacagtttagtaactcctactgaagctggaagtctagacagttcaggagaaaacaggccattaacagggtctgacccaactgtggtgtcaattactggatcccatgtcaaccgtgctgcatctaaataccccaaaaccaaaaagtatctagttacagaatggttgaatgacaaagcagagaagcaagagtgccctgttgagtgccctttacgtatcacaacggatccaactgtactggcaacgaccctaaacatgttaccaggtcttatccattccccgttaatttgcaccacccccaaacactacattcgctttggctcaccctttatccctgagagacgtcgaaggccccttctgcctgatggcacattcagctcctgtaagaagcgctggataaaacaagccttagaagaagggatgactcaaacatcatctgtaccccaagagactagaactcagcacctataccaaagcaatgagaatagtagctcttctagtatctgcaaagacaatgcagacttgttgagcccattaaagaaatggaagtctcgctatctgatggagcagaatgtcaccaagttacttcggcctctgtctccagtcacaccaccccctcccaattcaggctcaaagagtccccagctggccacacctggctcatctcacccaggagaagaggagtgtcgaaatggatacagcctcatgttttcaccagtcacatctcttactactgctagtcgctgcaacactcctctacagtttgaggtgatttgggtttggttgctgggagtgctggatatgaaaatcatcatttgtaccttctcatttcaaatataataccattcc

SEQ ID NO: 180825 - DNA, 579 bp, Homo sapiens
  Payload ID: 15611
  Gene Symbol: SETD5
  Gene Name: SET domain containing 5
  ENST ID: ENST00000415650
  CDS Start-End: 282-479
aggaaacgccgtggcgccgcgttgggcctaactcgagtcctgccgcctcccgggagtgccgtgcgccgcagcccgggcccaggccccggcagcgcctgggacaaggtcttcagaactactagcagataatttggggggacttcatattcagaagtctatataaaggattcctcatgtccataacatgttggatgaggctctgcagctcacccccactctcagagtggtcagtctccattaattggaccccgtgatttccaatctctgctgtgttggacgtcatgagcattgcaatccctctgggagtcaccacatcagatacatcctactcagatatggctgctggatcagaggtatcctgtcttggtagtgaatggaagagggcctggtccctggggcagtgcagaaggcactttgatcatctcactcactgcaaatgtcatgtgaggtttcatggaagtattaagagatccaattaagaagaatagttctgagtctaaaccagcccagagtggcttctctaggggaaactccccgctcagctgccctgaatctgtggaggctagtccagcagttaat

SEQ ID NO: 180826 - DNA, 1824 bp, Homo sapiens
  Payload ID: 15611
  Gene Symbol: SETD5
  Gene Name: SET domain containing 5
  ENST ID: ENST00000431285
  CDS Start-End: 540-698
agtggcgtttccgctcgggcagcgggctgagtgagctgccgccgccgccgccgccgccgccgccgccgccgctgccgggggaggggcggccgccgcccgcctgcgctcagagactcacgcagccccagtcccgccagtccgccaacacagtagtgccggcccccctctttccctggccctgccccccctccccgcctttggctcgctccgcctttctgccccccacccccacctcacgggtacgggccattcccggccaggaaacgccgtggcgccgcgttgggcctaactcgagtcctgccgcctcccgggagtgccgtgcgccgcagcccgggcccaggccccggcagcgcctgggacaaggtcttcagaactactagcagataatttggggggacttcatattcagaagtctatataaaggattcctcatgtccataacatgttggatgaggctctgcagctcacccccactctcagagtggtcagtctccattaattggaccccgtgatttccaatctctgctgtgttggacgtcatgagcattgcaatccctctgggagtcaccacatcagatacatcctactcagatatggctgctggatcagaaaaggaagtggaagccccctacctttcaagacgaagtggcactacaccaggatgtgaaagtccagcgaaagagacccaaggggcctagggggcagcacacccccagaagccaagtctattccaggcagtaccagggattagggtctgggctggaaaaatcctggtgttttgaatatgttcaggtccagttcagactcttgatcccacagccacttcttgagtgagggtatcctgtcttggtagtgaatggaagagggcctggtccctggggcagtgcagaaggcactttgatcatctcactcactgcaaatgtcatgtgaggtttcatggaagtattaagagatccaattaagaagaatagttctgagtctaaaccagcccagagtggcttctctaggggaaactccccgctcagctgccctgaatctgtggaggctagtccagcagttaatgagaagagcgtgtattccactcataattatgggaccactcagaggcatgggtgtcgaggactgccttatgctgatcataattacggagcccctcctcctccgacacctcctgcttctccccctgtccagacgatcatccctcgttctgacctgaatggcctgccgtcgcctgtagaggaacgctgtggagacagcccgaactctgaaggagaaactgtacctacctggtgtccttgtggtctttctcaggatggcttccttctcaactgtgacaagtgcaggggaatgagcagggggaaggttattagacttcatcggcggaagcaggacaacatatcaggtggggatagcagtgcaacagaaagctgggatgaggagctttctccttccactgtgttgtatacagcaacacagcacacacctacaagcatcaccttaactgttagaagaaccaaacccaagaagcggaaaaagagtccagaaaagggtcgtgcagcaccaaagacgaagaaaatcaagaattctccctctgaagcacagaatttagatgagaatacaactgagggctgggaaaatcggataagactatggactgaccagtatgaagaagctttcactaatcagtacagtgcagatgtacagaacgcgcttgaacaacacctacattctagcaaggaatttgtgggcaaacctactattttagacactattaataagactgaattggcctgtaataacacagttattggttcccaaatgcag

SEQ ID NO: 180827 - DNA, 1323 bp, Homo sapiens
  Payload ID: 15611
  Gene Symbol: SETD5
  Gene Name: SET domain containing 5
  ENST ID: ENST00000421188
  CDS Start-End: 1-1323
caaccgtgctgcatctaaataccccaaaaccaaaaagtatctagttacagaatggttgaatgacaaagcagagaagcaagagtgccctgttgagtgccctttacgtatcacaacggatccaactgtactggcaacgaccctaaacatgttaccaggtcttatccattccccgttaatttgcaccacccccaaacactacattcgctttggctcaccctttatccctgagagacgtcgaaggccccttctgcctgatggcacattcagctcctgtaagaagcgctggataaaacaagccttagaagaagggatgactcaaacatcatctgtaccccaagagactagaactcagcacctataccaaagcaatgagaatagtagctcttctagtatctgcaaagacaatgcagacttgttgagcccattaaagaaatggaagtctcgctatctgatggagcagaatgtcaccaagttacttcggcctctgtctccagtcacaccaccccctcccaattcaggctcaaagagtccccagctggccacacctggctcatctcacccaggagaagaggagtgtcgaaatggatacagcctcatgttttcaccagtcacatctcttactactgctagtcgctgcaacactcctctacagtttgagaacatatcctcccctgagagttcccctgcgcataggcccgagtccctgtcacccgagctttgtcaccgaaaagacctggatttggcaaaagtaggataccttgactccaacactaacagctgtgctgatagaccttccctactcaactcaggtcattctgacctggctcctcatccctccctcggacccacttctgagactggtttcccaagcagaagtggagatggacatcagaccctcgtgagaaactcagaccaggcatttcggacagagttcaacttgatgtatgcctactcccctttgaatgctatgcctcgagcagatggactgtatcgaggatctcctctagtgggggataggaagcctttacatttggatgggggatattgttcccctgcagaaggattttccagcagatatgaacatggcttaatgaaagacctctctcgtggatccttgtcacctggtggtgaaagggcctgtgaaggagtcccatctgccccccagaacccaccacagaggaaaaaagtatccctgctggagtaccgaaaacggaaacaagaagctaaggaaaattctgctggtgggggaggtgactctgcacagagcaaaagcaagtctgcaggagctgggcaaggcagcagtaactccgtttccgacactgg

SEQ ID NO: 180828 - DNA, 3428 bp, Homo sapiens
  Payload ID: 15611
  Gene Symbol: SETD5
  Gene Name: SET domain containing 5
  ENST ID: ENST00000413704
  CDS Start-End: 1-532
agagatgtgtgtggatgcccgtactttcggtaatgatgctcggttcatcagaagatcatgtacaccaaatgcagaggtgcgacacatgattgcagatgggatgattcacctgtgcatctatgctgtgtctgccatcaccaaggatgctgaggtcaccatagcatttgattatgagtatagtaactgtaattataaagtggactgtgcctgtcacaagggaaaccggaattgtcctatacaaaaaaggaatcctaatgctacagaactgccactcctaccacctcctccaagcctacccaccattggagcagagactagacgtagaaaagcacgacggaaagagctagagatggagcagcagaatgaggcttcagaggagaataatgaccagcaatcacaagaagttccagaaaaagtaactgtatccagtgatcatgagagcttgagtacagctgaatattgcctctatcttaaaggaagtagacaatccagaagaaaaaccagaagaagagaaagaagaggttatagatgaccaggagaacctagctcatagcaggaggaccagggaagatagaaaggtagaagccatcatgcatgcttttgaaaacttagagaaaagaaagaagcggcgggatcagcccttggaacagagcaactctgatgtagagattactacaaccacctcagagactcctgttggtgaagagacaaaaactgaagcccctgaatctgaagttagcaactctgtttcaaatgttaccatcccaagcaccccacagagtgttggtgtgaatacccggaggtcttcccaagcaggggatattgctgcagaaaaactagtccccaagccacctccagcaaagccttctaggccccggccgaagagtcgaatttctcggtacaggaccagttcagcccaaagactaaagcgtcagaagcaggccaatgcacagcaggcagaattgtcacaagctgccttggaagagggaggaagtaacagtttagtaactcctactgaagctggaagtctagacagttcaggagaaaacaggccattaacagggtctgacccaactgtggtgtcaattactggatcccatgtcaaccgtgctgcatctaaataccccaaaaccaaaaagtatctagttacagaatggttgaatgacaaagcagagaagcaagagtgccctgttgagtgccctttacgtatcacaacggatccaactgtactggcaacgaccctaaacatgttaccaggtcttatccattccccgttaatttgcaccacccccaaacactacattcgctttggctcaccctttatccctgagagacgtcgaaggccccttctgcctgatggcacattcagctcctgtaagaagcgctggataaaacaagccttagaagaagggatgactcaaacatcatctgtaccccaagagactagaactcagcacctataccaaagcaatgagaatagtagctcttctagtatctgcaaagacaatgcagacttgttgagcccattaaagaaatggaagtctcgctatctgatggagcagaatgtcaccaagttacttcggcctctgtctccagtcacaccaccccctcccaattcaggctcaaagagtccccagctggccacacctggctcatctcacccaggagaagaggagtgtcgaaatggatacagcctcatgttttcaccagtcacatctcttactactgctagtcgctgcaacactcctctacagtttgagctttgtcaccgaaaagacctggatttggcaaaagtaggataccttgactccaacactaacagctgtgctgatagaccttccctactcaactcaggtcattctgacctggctcctcatccctccctcggacccacttctgagactggtttcccaagcagaagtggagatggacatcagaccctcgtgagaaactcagaccaggcatttcggacagagttcaacttgatgtatgcctactcccctttgaatgctatgcctcgagcagatggactgtatcgaggatctcctctagtgggggataggaagcctttacatttggatgggggatattgttcccctgcagaaggattttccagcagatatgaacatggcttaatgaaagacctctctcgtggatccttgtcacctggtggtgaaagggcctgtgaaggagtcccatctgccccccagaacccaccacagaggaaaaaagtatccctgctggagtaccgaaaacggaaacaagaagctaaggaaaattctgctggtgggggaggtgactctgcacagagcaaaagcaagtctgcaggagctgggcaaggcagcagtaactccgtttccgacactggtgcccatggtgtgcagggatcctcagcccgaactccatcttcccctcacaaaaaattctccccatctcattcctctatgtcccatttggaggcggtaagcccatcagattccagaggcacttcttcatctcactgcagacctcaagagaatatcagcagtaggtggatggttcccacatcagtagaacgactccgagaaggagggagcatccccaaggtcctccgaagcagcgtgagggtggcccaaaagggagagccctctcccacatgggagagtaacatcacagagaaagactcagaccctgcagatggagaaggcccagagacattaagctcagcactctctaaaggagcaacagtttacagcccttccagatacagctaccagctcctgcagtgtgatagtcctcggacagaatcacaaagcctccttcagcagagttcctcccccttcagaggacatcctacacagtctccaggatacagttatcgaactactgcactgagacctggaaaccccccctctcacggttcttcagaatcatccctctcttccacgtcctattccagccccgcccaccctgtgtccacagactcgttggccccatttacggggacaccagggtattttagcagccagccacattctggaaacagcactggcagcaatcttccaaggaggagctgcccttctagtgctgctagccctaccctgcagggaccctcagactcgccaacctcagattcagtttctcagtccagcacaggaactctgagttccacctcctttcctcagaactctaggtcgtcattgccatcagacttacggactatcagtctgcccagtgctgggcagtcagctgtctaccaggcctccagggtatctgcggtttccaattcacagcactacccacaccgtgggagtgggggtgtgcaccagtaccgactccagccactgcaagggtcaggagtcaagactcagacgggactttcctagggcttctggatttgggcaaacagaactgaatgagcccatagctgcttccttccagctgcctct

SEQ ID NO: 180829 - DNA, 900 bp, Homo sapiens
  Payload ID: 15611
  Gene Symbol: SETD5
  Gene Name: SET domain containing 5
  ENST ID: ENST00000442373
  CDS Start-End: 390-900
acccccagaagccaagtctattccaggcagtaccagggattagggtctgggctggaaaaatcctggtgttttgaatatgttcaggtccagttcagactcttgatcccacagccacttcttgagtgagccctgaatctgtggaggctagtccagcagttaatgagaagagcgtgtattccactcataattatgggaccactcagaggcatgggtgtcgaggactgccttatgctacgatcatccctcgttctgacctgaatggcctgccgtcgcctgtagaggaacgctgtggagacagcccgaactctgaaggagaaactgtacctacctggtgtccttgtggtctttctcaggatggcttccttctcaactgtgacaagtgcaggggaatgagcagggggaaggttattagacttcatcggcggaagcaggacaacatatcaggtggggatagcagtgcaacagaaagctgggatgaggagctttctccttccactgtgttgtatacagcaacacagcacacacctacaagcatcaccttaactgttagaagaaccaaacccaagaagcggaaaaagagtccagaaaagggtcgtgcagcaccaaagacgaagaaaatcaagaattctccctctgaagcacagaatttagatgagaatacaactgagggctgggaaaatcggataagactatggactgaccagtatgaagaagctttcactaatcagtacagtgcagatgtacagaacgcgcttgaacaacacctacattctagcaaggaatttgtgggcaaacctactattttagacactattaataagactgaattggcctgtaataacacagttattggttcccaaatgcagttacagctgggaagagtcactcgtgttcaaaagc

SEQ ID NO: 180830 - DNA, 921 bp, Homo sapiens
  Payload ID: 15611
  Gene Symbol: SETD5
  Gene Name: SET domain containing 5
  ENST ID: ENST00000450326
  CDS Start-End: 436-921
gctcagagactcacgcagccccagtcccgccagtccgccaacacagtagtgccggcccccctctttccctggccctgccccccctccccgcctttggctcgctccgcctttctgccccccacccccacctcacgggtacgggccattcccggccaggaaacgccgtggcgccgcgttgggcctaactcgagtcctgccgcctcccgggagtgccgtgcgccgcagcccgggcccaggccccggcagcgcctgggacaaggtcttcagaactactagcagataatttggggggacttcatattcagaagtctatataaaggattcctcatgtccataacatgttggatgaggctctgcagctcacccccactctcagagtggtcagtctccattaattggaccccgtgatttccaatctctgctgtgttggacgtcatgagcattgcaatccctctgggagtcaccacatcagatacatcctactcagatatggctgctggatcagaccctgaatctgtggaggctagtccagcagttaatgagaagagcgtgtattccactcataattatgggaccactcagaggcatgggtgtcgaggactgccttatgctacgatcatccctcgttctgacctgaatggcctgccgtcgcctgtagaggaacgctgtggagacagcccgaactctgaaggagaaactgtacctacctggtgtccttgtggtctttctcaggatggcttccttctcaactgtgacaagtgcaggggaatgagcagggggaaggttattagacttcatcggcggaagcaggacaacatatcaggtggggatagcagtgcaacagaaagctgggatgaggagctttctccttccactgtgttgtatacagcaacacagcacacacctacaagcatcacctta

SEQ ID NO: 180831 - DNA, 1553 bp, Homo sapiens
  Payload ID: 15612
  Gene Symbol: SETD6
  Gene Name: SET domain containing 6
  Uniprot ID: Q8TBK2
  ENST ID: ENST00000219315
  CDS Start-End: 51-1472
ggaagtgaccgcgcggtgcgccggcccgcgaggaaacgcgctcttagaccatggcgacccaggcgaagcgtccacgggtggcggggcccgtggacggcggcgacctggatcctgtggcctgcttcctgagctggtgccggcgggtggggctggagctgagtcccaaggtgagcgagcgagccggcgggcggaggacccgcggcggggcgcgggctgccctgaccagccctcctgctcaggtggcggtcagccggcagggcacggtggccggctacggcatggtggcccgggagagcgtgcaggccggagagctgttgttcgtggtgccgcgggccgcgctcctgtcgcagcacacctgctccatcggcggcctgctggagcgagagcgagttgcgctgcagagccagtcgggctgggtgccactgctgctggcgctgctccacgagctgcaggccccggcctcacgctggaggccctactttgcgctctggcccgagctgggccgcttggagcacccgatgttctggccagaggaggagcgccggtgcctgctccagggcacaggcgtacctgaggccgtggagaaggatttggccaacatccgcagcgagtaccagtccatcgtgctgcccttcatggaagcccaccccgatctcttcagcctcagggttcgctccctagaactctaccaccagctggtggcccttgtgatggcctatagctttcaggaaccactggaggaagaagaggatgaaaaggagcccaactcccccgtgatggtgcctgctgcagacatactaaaccacttagccaatcacaacgccaatctagaatactctgcgaattgtcttcggatggtagccactcagcccattcctaaaggccatgagattttcaacacttatgggcaaatggctaactggcaactgattcatatgtacggttttgttgaaccatatcctgacaacacagatgacacagctgacattcagatggtgacagttcgtgaggcagcattacagggaacaaaaactgaagctgaaaggcacctagtgtacgagcgctgggatttcctatgcaaactggagatggtaggggaagagggagcctttgtgatagggagggaggaggtgctgactgaagaggagctgaccaccacactaaaggtactgtgcatgcctgctgaggagttcagagagcttaaagaccaggatggagggggagatgataaaagggaagagggcagcctgacgatcacaaatattcccaagctcaaagcatcgtggagacagctgcttcaaaacagtgttctactgactttgcagacctatgccacagacttaaaaactgaccaaggtttactcagtaataaggaagtctatgcgaaactcagctggagggaacagcaagccttacaggttcgctatggtcagaagatgatcttacatcagttgttggagctgacaagttagcagtttccctgttccctgaaggaacagcaataagaactttattctaagctaatactcattgatgtttgaaaaagaggaaaa

SEQ ID NO: 180832 - DNA, 2042 bp, Homo sapiens
  Payload ID: 15612
  Gene Symbol: SETD6
  Gene Name: SET domain containing 6
  Uniprot ID: Q8TBK2
  ENST ID: ENST00000310682
  CDS Start-End: 60-1409
agagacgccggaagtgaccgcgcggtgcgccggcccgcgaggaaacgcgctcttagaccatggcgacccaggcgaagcgtccacgggtggcggggcccgtggacggcggcgacctggatcctgtggcctgcttcctgagctggtgccggcgggtggggctggagctgagtcccaaggtggcggtcagccggcagggcacggtggccggctacggcatggtggcccgggagagcgtgcaggccggagagctgttgttcgtggtgccgcgggccgcgctcctgtcgcagcacacctgctccatcggcggcctgctggagcgagagcgagttgcgctgcagagccagtcgggctgggtgccactgctgctggcgctgctccacgagctgcaggccccggcctcacgctggaggccctactttgcgctctggcccgagctgggccgcttggagcacccgatgttctggccagaggaggagcgccggtgcctgctccagggcacaggcgtacctgaggccgtggagaaggatttggccaacatccgcagcgagtaccagtccatcgtgctgcccttcatggaagcccaccccgatctcttcagcctcagggttcgctccctagaactctaccaccagctggtggcccttgtgatggcctatagctttcaggaaccactggaggaagaagaggatgaaaaggagcccaactcccccgtgatggtgcctgctgcagacatactaaaccacttagccaatcacaacgccaatctagaatactctgcgaattgtcttcggatggtagccactcagcccattcctaaaggccatgagattttcaacacttatgggcaaatggctaactggcaactgattcatatgtacggttttgttgaaccatatcctgacaacacagatgacacagctgacattcagatggtgacagttcgtgaggcagcattacagggaacaaaaactgaagctgaaaggcacctagtgtacgagcgctgggatttcctatgcaaactggagatggtaggggaagagggagcctttgtgatagggagggaggaggtgctgactgaagaggagctgaccaccacactaaaggtactgtgcatgcctgctgaggagttcagagagcttaaagaccaggatggagggggagatgataaaagggaagagggcagcctgacgatcacaaatattcccaagctcaaagcatcgtggagacagctgcttcaaaacagtgttctactgactttgcagacctatgccacagacttaaaaactgaccaaggtttactcagtaataaggaagtctatgcgaaactcagctggagggaacagcaagccttacaggttcgctatggtcagaagatgatcttacatcagttgttggagctgacaagttagcagtttccctgttccctgaaggaacagcaataagaactttattctaagctaatactcattgatgtttgaaaaagaggaaaatttggatctttcttttgcttactaaacaccaagaggaaaagtagcaaagttggtgtgctaggattaactcaggtaagggtgatgtgttttaggattgagaacagcagacttgggaatcactgctaattgttacttaaagcatgttacagatgttttgttctcagttttaaccaaagccagtggacatacggtagtaataagtaagtcttgttgtgtttcagcatttaataatagactttggaggtagacccctggtttaaatctaagtctagtttgaggaagtcacttaacctttattgaaaagactctggatttaataagctgtgtaactggtactcgatagttacccaaagttcagtctagatggcacaaaccacctctcagggaataaaccctaagacatcactcaaggaggacttcaattatttaattttgaactgttttgtcctctctggccataaaacttgacagtcatgaaaggtaaggcaaattttaagtgggttaagtttttaaatacgtatctactcattttctttaaaaaaaaaaaaaaaa

SEQ ID NO: 180833 - DNA, 3423 bp, Homo sapiens
  Payload ID: 15612
  Gene Symbol: SETD6
  Gene Name: SET domain containing 6
  ENST ID: ENST00000394266
  CDS Start-End: 57-1271
gacgccggaagtgaccgcgcggtgcgccggcccgcgaggaaacgcgctcttagaccatggcgacccaggcgaagcgtccacgggtggcggggcccgtggacggcggcgacctggatcctgtggcctgcttcctgagctggtgccggcgggtggggctggagctgagtcccaaggtggcggtcagccggcagggcacggtggccggctacggcatggtggcccgggagagcgtgcaggccggagagctgttgttcgtggtgccgcgggccgcgctcctgtcgcagcacacctgctccatcggcggcctgctggagcgagagcgagttgcgctgcagagccagtcgggctgggtgccactgctgctggcgctgctccacgagctgcaggccccggcctcacgctggaggccctactttgcgctctggcccgagctgggccgcttggagcacccgatgttctgcctcagggttcgctccctagaactctaccaccagctggtggcccttgtgatggcctatagctttcaggaaccactggaggaagaagaggatgaaaaggagcccaactcccccgtgatggtgcctgctgcagacatactaaaccacttagccaatcacaacgccaatctagaatactctgcgaattgtcttcggatggtagccactcagcccattcctaaaggccatgagattttcaacacttatgggcaaatggctaactggcaactgattcatatgtacggttttgttgaaccatatcctgacaacacagatgacacagctgacattcagatggtgacagttcgtgaggcagcattacagggaacaaaaactgaagctgaaaggcacctagtgtacgagcgctgggatttcctatgcaaactggagatggtaggggaagagggagcctttgtgatagggagggaggaggtgctgactgaagaggagctgaccaccacactaaaggtactgtgcatgcctgctgaggagttcagagagcttaaagaccaggatggagggggagatgataaaagggaagagggcagcctgacgatcacaaatattcccaagctcaaagcatcgtggagacagctgcttcaaaacagtgttctactgactttgcagacctatgccacagacttaaaaactgaccaaggtttactcagtaataaggaagtctatgcgaaactcagctggagggaacagcaagccttacaggttcgctatggtcagaagatgatcttacatcagttgttggagctgacaagttagcagtttccctgttccctgaaggaacagcaataagaactttattctaagctaatactcattgatgtttgaaaaagaggaaaatttggatctttcttttgcttactaaacaccaagaggaaaagtagcaaagttggtgtgctaggattaactcaggtaagggtgatgtgttttaggattgagaacagcagacttgggaatcactgctaattgttacttaaagcatgttacagatgttttgttctcagttttaaccaaagccagtggacatacggtagtaataagtaagtcttgttgtgtttcagcatttaataatagactttggaggtagacccctggtttaaatctaagtctagtttgaggaagtcacttaacctttattgaaaagactctggatttaataagctgtgtaactggtactcgatagttacccaaagttcagtctagatggcacaaaccacctctcagggaataaaccctaagacatcactcaaggaggacttcaattatttaattttgaactgttttgtcctctctggccataaaacttgacagtcatgaaaggtaaggcaaattttaagtgggttaagtttttaaatacgtatctactcattttctttaaaaaaaaaaaaaaaatacctgggggaaaaggatattaaaactgggtattttaaactcagcttaaccagataaacctgctccagcatttgtccagtgttgaaataaataggaagaaaaatacaatttccttaaacatgccagcttagtagtaggaatgacctatcaatcaatcaatcaatcattcagcaagaagttagttggtggttccccatggccccaaggtctgcagggctggattgtccacttttcctcctcaccaccagcactggctgctgctactgagaaaggcacagtggactcatgtgtgtgtcatgactttaatggttagctacagtatgcatacacatacaagaagtaggggagctgaagcccaggaaaaggctacaaaatacaacacagggaccaatacatttgcaaaacattcaaaatccttataaaaggggctgtattggtcctttcaactttgtcattattcagcttagcctgtatggccattcattcagtggggtaatgggggagaacaattaattaatgagatttggttccctttcctatattcccactgtttttaagtttcaggagaggattgggggggtgagggtaggggtgggctttaggcctggtctggtttccctttatataaagagctgacccccatctcaggcggctgaggtgtataatccccaaaagaaataagatggtacaaatgcagtcagctttggaatacgtttgggtagagacaaaatggaaactcatgggattccaatagtgagcccttcccatgttcctggacatatccaattctagcacatccacatttttaataacttagtgattttcaaggtcccctgtccacattaaaaaaataagttacataatattcaaactggctttttgctattctttgggacaccaggaatgtcagaagacatggagctatgccctcagacaagtgcatggcatcagctgcctcttcattacaaggtaccagtttatgtacttgccttggacacagcttgcacaaagccaagaagttccagacaaaggttttctctttcatgtatttacacaagttcaaaatgatattcacagcatcttctaaattttggccaagagtcaaaaaaatgcatttaaactttggaacgtgcccacataagacaggaggctgatcccaacagtagttggggcagatacccacaaaccaaagggctgggaaagtcaggaagagctgaaaggattcttcagtcagtttatgaactcggtgcagtgagacctctagactgacacgtacaacagagatgcagtttcgtctaactggcacctgtcccttccattacttgctgggcctgcttctgtcccatgcagcactgtgcgaccgactggaataacctgaaggatgaagacagttacaaatctctgattaaagagtaggcctaacaataccttgcatctcattcagctgacccaacctagagacagatggttttcagtctccagtctcattcctagacaattaaaaattactttgaactca

SEQ ID NO: 180834 - DNA, 576 bp, Homo sapiens
  Payload ID: 15612
  Gene Symbol: SETD6
  Gene Name: SET domain containing 6
  ENST ID: ENST00000447443
  CDS Start-End: 26-576
ccgcgaggaaacgcgctcttagaccatggcgacccaggcgaagcgtccacgggtggcggggcccgtggacggcggcgacctggatcctgtggcctgcttcctgagctggtgccggcgggtggggctggagctgagtcccaagagcgagttgcgctgcagagccagtcgggctgggtgccactgctgctggcgctgctccacgagctgcaggccccggcctcacgctggaggccctactttgcgctctggcccgagctgggccgcttggagcacccgatgttctggaacaaaaactgaagctgaaaggcacctagtgtacgagcgctgggatttcctatgcaaactggagatggtaggggaagagggagcctttgtgatagggagggaggaggtgctgactgaagaggagctgaccaccacactaaaggtactgtgcatgcctgctgaggagttcagagagcttaaagaccaggatggagggggagatgataaaagggaagagggcagcctgacgatcacaaatattcccaagctcaaagcatcgtggagacagctgcttcaaaacagtgttctact

SEQ ID NO: 180835 - DNA, 1909 bp, Homo sapiens
  Payload ID: 15612
  Gene Symbol: SETD6
  Gene Name: SET domain containing 6
  ENST ID: ENST00000427443
  CDS Start-End: 43-831
ccgcgcggtgcgccggcccgcgaggaaacgcgctcttagaccatggcgacccaggcgaagcgtccacgggtggcggggcccgtggacggcggcgacctggatcctgtggcctgcttcctgagctggtgccggcgggtggggctggagctgagtcccaaggtggcggtcagccggcagggcacggtggccggctacggcatggtggcccgggagagcgtgcaggccggagagctgttgttcgtggtgccgcgggccgcgctcctgtcgcagcacacctgctccatcggcggcctgctggagcgagagcgagttgcgctgcagagccagtcgggctgggtgccactgctgctggcgctgctccacgagctgcaggccccggcctcacgctggaggccctactttgcgctctggcccgagctgggccgcttggagcacccgatgttctggccagaggaggagcgccggtgcctgctccagggcacaggcgtacctgaggccgtggagaaggatttggccaacatccgcagcgagtaccagtccatcgtgctgcccttcatggaagcccaccccgatctcttcagcctcagggttcgctccctagaactctaccaccagctggtggcccttgtgatggcctatagctttcaggaaccactggaggaagaagaggatgaaaaggagcccaactcccccgtgatggtgcctgctgcagacatactaaaccacttagccaatcacaacgccaatctagaatactctgcggcatggccccagcttctccctttcacctcagaattgtcttcggatggtagccactcagcccattcctaaaggccatgagattttcaacacttatgggcaaatggctaactggcaactgattcatatgtacggttttgttgaaccatatcctgacaacacagatgacacagctgacattcagatggtgacagttcgtgaggcagcattacagggaacaaaaactgaagctgaaaggcacctagtgtacgagcgctgggatttcctatgcaaactggagatggtaggggaagagggagcctttgtgatagggagggaggaggtgctgactgaagaggagctgaccaccacactaaaggtactgtgcatgcctgctgaggagttcagagagcttaaagaccaggatggagggggagatgataaaagggaagagggcagcctgacgatcacaaatattcccaagctcaaagcatcgtggagacagctgcttcaaaacagtgttctactgactttgcagacctatgccacagacttaaaaactgaccaaggtttactcagtaataaggaagtctatgcgaaactcagctggagggaacagcaagccttacaggttcgctatggtcagaagatgatcttacatcagttgttggagctgacaagttagcagtttccctgttccctgaaggaacagcaataagaactttattctaagctaatactcattgatgtttgaaaaagaggaaaatttggatctttcttttgcttactaaacaccaagaggaaaagtagcaaagttggtgtgctaggattaactcaggtaagggtgatgtgttttaggattgagaacagcagacttgggaatcactgctaattgttacttaaagcatgttacagatgttttgttctcagttttaaccaaagccagtggacatacggtagtaataagtaagtcttgttgtgtttcagcatttaataatagactttggaggtagacccctggtttaaatctaagtctagtttgaggaagtcacttaacctttattgaaaagactctggatttaataagctgtgtaactggtactcgatagttacccaaagttcagtctagatggcacaaaccacctctcagggaataaaccctaagacatca

SEQ ID NO: 180836 - DNA, 1739 bp, Homo sapiens
  Payload ID: 15612
  Gene Symbol: SETD6
  Gene Name: SET domain containing 6
  ENST ID: ENST00000422445
  CDS Start-End: 1-792
gtggcggggcccgtggacggcggcgacctggatcctgtggcctgcttcctgagctggtgccggcgggtggggctggagctgagtcccaaggtgagcgagcgagccggcgggcggaggacccgcggcggggcgcgggctgccctgaccagccctcctgctcaggtggcggtcagccggcagggcacggtggccggctacggcatggtggcccgggagagcgtgcaggccggagagctgttgttcgtggtgccgcgggccgcgctcctgtcgcagcacacctgctccatcggcggcctgctggagcgagagcgagttgcgctgcagagccagtcgggctgggtgccactgctgctggcgctgctccacgagctgcaggccccggcctcacgctggaggccctactttgcgctctggcccgagctgggccgcttggagcacccgatgttctggccagaggaggagcgccggtgcctgctccagggcacaggcgtacctgaggccgtggagaaggatttggccaacatccgcagcgagtaccagtccatcgtgctgcccttcatggaagcccaccccgatctcttcagcctcagggttcgctccctagaactctaccaccagctggtggcccttgtgatggcctatagctttcaggaaccactggaggaagaagaggatgaaaaggagcccaactcccccgtgatggtgcctgctgcagacatactaaaccacttagccaatcacaacgccaatctagaatactctgcgatgacacagctgacattcagatggtgacagttcgtgaggcagcattacagggaacaaaaactgaagctgaaaggcacctagtgtacgagcgctgggatttcctatgcaaactggagatggtaggggaagagggagcctttgtgatagggagggaggaggtgctgactgaagaggagctgaccaccacactaaaggtactgtgcatgcctgctgaggagttcagagagcttaaagaccaggatggagggggagatgataaaagggaagagggcagcctgacgatcacaaatattcccaagctcaaagcatcgtggagacagctgcttcaaaacagtgttctactgactttgcagacctatgccacagacttaaaaactgaccaaggtttactcagtaataaggaagtctatgcgaaactcagctggagggaacagcaagccttacaggttcgctatggtcagaagatgatcttacatcagttgttggagctgacaagttagcagtttccctgttccctgaaggaacagcaataagaactttattctaagctaatactcattgatgtttgaaaaagaggaaaatttggatctttcttttgcttactaaacaccaagaggaaaagtagcaaagttggtgtgctaggattaactcaggtaagggtgatgtgttttaggattgagaacagcagacttgggaatcactgctaattgttacttaaagcatgttacagatgttttgttctcagttttaaccaaagccagtggacatacggtagtaataagtaagtcttgttgtgtttcagcatttaataatagactttggaggtagacccctggtttaaatctaagtctagtttgaggaagtcacttaacctttattgaaaagactctggatttaataagctgtgtaactggtactcgatagttacccaaagttcagtctagatggcacaaaccacctctcagggaataaac

SEQ ID NO: 180837 - DNA, 1619 bp, Homo sapiens
  Payload ID: 15613
  Gene Symbol: SETD9
  Gene Name: SET domain containing 9
  Uniprot ID: Q8NE22
  ENST ID: ENST00000285947
  CDS Start-End: 387-1286
agacagccgtgacagagaaactaggcggtccgctcctgggacgcggtctcgggggcgggttcgcccctgaggcccggtgacccttcgcccgcaaccagggctagcgcttgtgtgcgcccacggaagcacccgagcgaccggagaaagaaaaagtggtcaaggggacctccttccagctctacgcgcctctcattcagagaggtgaggtcaggaaaggggaaggacgaagccccagagcaacagaagtcaggcggtgccaggaacactgagagcggagccaggggaaggcggccgagcgcggccccctctcctcccgggccggggcgggcccgaggcctcgatccgccttccccgcgccgtcctggtcacggccccgcggggcagccatgcctggccgtctgctgcggggcctgtggcagcgatggcgccgttacaagtaccgcttcgttccctggatcgcactgaacctaagccacaacccgaggaccctccgatatgttccagaggaatccaaagacaaagttatctcagatgaagatgtcctaggaacattactgaaagttttccaggctctattcttaaatgatttcaataaacaatcagaaatcttgtctatgcttccagaatctgttaaatcaaaatatcaagacctactggcagttgaacatcaaggggtgaaactgcttgaaaacagacatcaacagcaaagtacctttaaaccagaagaaattctttacaagactttgggtttcagtgttgcccaagcaactagctcattgatttctgctggaaaaggtgtcttcgttactaaaggattggtaccaaaaggcgcagtcgtatctatgtatcctggtacagtatatcagaagtatgagccgatctttttccagtccattggaaatccgtttatttttagatgcctggatggggtactcattgatgggaatgacaaagggatatcaaaagttgtgtacagatcttgcaatgggagggatcgactcggccctttaaaaatgagtgatagtacatggctaacgtcagaaattcataaccctctggctgtgggacagtatgtcaacaattgttccaatgacagagcagctaatgtctgttatcaggaatttgatgtgcctgcagttttccctatagaactgaagcagtatcttccaaacattgcctacagctatgacaaacaaagcccacttcgatgtgttgttcttgtcgcacttagggacatcaatcaaggagaagagcttttttcaaactactacacaattgtcagctaactctgtgaatcagaaattattaggttttctactcagctattaattctaagtgttttttgttaatcacttctctgagttctacctgtaaaacaaatattttgagacttaattggaataggaatttcttatgtttttgttgatattatatttatgttccaatttcatgataaaagctacttgcttcattacaatttcaaatttgtaatgcaattccaagtttaattggttttcacctaaatacacaatagcttattaaattaaaacctactctttgaacttataatttcaatttttcttttgtttattttgtaagctctgtggtggtttataaaa

SEQ ID NO: 180838 - DNA, 1009 bp, Homo sapiens
  Payload ID: 15613
  Gene Symbol: SETD9
  Gene Name: SET domain containing 9
  ENST ID: ENST00000418299
  CDS Start-End: 32-151
gccgtcctggtcacggccccgcggggcagccatgcctggccgtctgctgcggggcctgtggcagcgatggcgccgttacaagtaccgcttcgttccctggatcgcactgaacctaagccacaacccgaggtacagtatatcagaagtatgagccgatctttttccagtccattggaaatccgtttatttttagatgcctggatggggtactcattgatgggaatgacaaagggatatcaaaagttgtgtacagatcttgcaatgggagggatcgactcggccctttaaaaatgagtgatagtacatggctaacgtcagaaattcataaccctctggctgtgggacagtatgtcaacaattgttccaatgacagagcagctaatgtctgttatcaggaatttgatgtgcctgcagttttccctatagaactgaagcagtatcttccaaacattgcctacagctatgacaaacaaagcccacttcgatgtgttgttcttgtcgcacttagggacatcaatcaaggagaagagcttttttcaaactactacacaattgtcagctaactctgtgaatcagaaattattaggttttctactcagctattaattctaagtgttttttgttaatcacttctctgagttctacctgtaaaacaaatattttgagacttaattggaataggaatttcttatgtttttgttgatattatatttatgttccaatttcatgataaaagctacttgcttcattacaatttcaaatttgtaatgcaattccaagtttaattggttttcacctaaatacacaatagcttattaaattaaaacctactctttgaacttataatttcaatttttcttttgtttattttgtaagctctgtggtggtttataaaattgtagccaggcatcagcagttcttgtagtactgctgatgtgtacaaacttctgtaaaaactttatttttacagaattgagtaaaaaatacctattgtgttgccatgagtaaa

SEQ ID NO: 180839 - DNA, 417 bp, Homo sapiens
  Payload ID: 15613
  Gene Symbol: SETD9
  Gene Name: SET domain containing 9
  ENST ID: ENST00000423328
  CDS Start-End: 271-417
ttgcgttcggcactgactggggagcttgtatctgggcaaaaatggaaactttttaaaaagactgcccttaccgcgtgagagtgcgtggctttttctccaccaggggttaattaggtgcttgaacttcctcagaaaagccaagccagggtttattttcatagttcatacaagtacttcacgtggttaaagaagcccatcccggctgtgagaatagcgtgcagtagctcgcgcgttaagaacgggcagaacgccactcaaaagcacgtcgggatggtgggtttcggattggggaccctccgatatgttccagaggaatccaaagacaaagttatctcagatgaagatgtcctaggaacattactgaaagttttccaggctctattcttaaatgatttcaataaacaatcagaaatcttg

SEQ ID NO: 180840 - DNA, 1306 bp, Homo sapiens
  Payload ID: 15613
  Gene Symbol: SETD9
  Gene Name: SET domain containing 9
  Uniprot ID: Q8NE22
  ENST ID: ENST00000628593
  CDS Start-End: 295-1110
aaccagggctagcgcttgtgtgcgcccacggaagcacccgagcgaccggagaaagaaaaagtggtcaaggggacctccttccagctctacgcgcctctcattcagagaggtgaggtcaggaaaggggaaggacgaagccccagagcaacagaagtcaggcggtgccaggaacactgagagcggagccaggggaaggcggccgagcgcggccccctctcctcccgggccggggcgggcccgaggcctcgatccgccttccccgcgccgtcctggtcacggccccgcggggcagccatgcctggccgtctgctgcggggcctgtggcagcgatggcgccgttacaagtaccgcttcgttccctggatcgcactgaacctaagccacaacccgaggaccctccgatatgttccagaggaatccaaagacaaagttatctcagatgaagatgtcctaggaacattactgaaagttttccaggctctattcttaaatgatttcaataaacaatcagaaatcttgtctatgcttccagaatctgttaaatcaaaatatcaagacctactggcagttgaacatcaaggggtgaaactgcttgaaaacagacatcaacagcaaagtacctttaaaccagaagaaattctttacaagactttgggtttcagtgttgcccaagcaactagctcattgatttctgctggaaaaggtgtcttcgttactaaaggattggtaccaaaaggcgcagtcgtatctatgtatcctggtacagtatatcagaagtatgagccgatctttttccagtccattggaaatccgtttatttttagatgcctggatggggtactcattgatgggaatgacaaagggatatcaaaagttgtgtacagatcttgcaatgggagggatcgactcggccctttaaaaatgagtgatagtacatggctaacgtcagaaattcataaccctctggctgtgggacagtatgtcaacaattgttccaatgacagagcagctaatgtctgttatcaggaatttgatgtgcctgcagttttccctatagaactgaagcagtatcttccaaacattgcctacagctatgacaaacaaaggtgacatgactgtctacgtagaaaactccaaagaatcaacaaaaaatcgcctgtaactaataagcacttacagcaaagtttcaggagacaaggttaatacacaaaagtcaactgctttcctatataacagcaatgacgattgaaatttgaaatttaaaacacaagaccatttacattagcaccccaaaattaaaatactt

SEQ ID NO: 180841 - DNA, 4437 bp, Homo sapiens
  Payload ID: 15614
  Gene Symbol: SETDB1
  Gene Name: SET domain, bifurcated 1
  Uniprot ID: Q15047
  ENST ID: ENST00000271640
  CDS Start-End: 191-4066
ggcactaaaggtttgcttccgggcgtttcttttgcttccccttccctctttcacgcttcctcccctccccctcctcccttatcccttcgctttcgctcttttccgtcgaggccgacccctgagttgtgagtctggggtctggttggtgaaaaagagcccttgaagctggaagacgggagaggacaaaagcatgtcttcccttcctgggtgcattggtttggatgcagcaacagctacagtggagtctgaagagattgcagagctgcaacaggcagtggttgaggaactgggtatctctatggaggaacttcggcatttcatcgatgaggaactggagaagatggattgtgtacagcaacgcaagaagcagctagcagagttagagacatgggtaatacagaaagaatctgaggtggctcacgttgaccaactctttgatgatgcatccagggcagtgactaattgtgagtctttggtgaaggacttctactccaagctgggactacaataccgggacagtagctctgaggacgaatcttcccggcctacagaaataattgagattcctgatgaagatgatgatgtcctcagtattgattcaggtgatgctgggagcagaactccaaaagaccagaagctccgtgaagctatggctgccttaagaaagtcagctcaagatgttcagaagttcatggatgctgtcaacaagaagagcagttcccaggatctgcataaaggaaccttgagtcagatgtctggagaactaagcaaagatggtgacctgatagtcagcatgcgaattctgggcaagaagagaactaagacttggcacaaaggcacccttattgccatccagacagttgggccagggaagaaatacaaggtgaaatttgacaacaaaggaaagagtctactgtcggggaaccatattgcctatgattaccaccctcctgctgacaagctgtatgtgggcagtcgggtggtcgccaaatacaaagatgggaatcaggtctggctctatgctggcattgtagctgagacaccaaacgtcaaaaacaagctcaggtttctcattttctttgatgatggctatgcttcctatgtcacacagtcggaactgtatcccatttgccggccactgaaaaagacttgggaggacatagaagacatctcctgccgtgacttcatagaggagtatgtcactgcctaccccaaccgccccatggtactgctcaagagtggccagcttatcaagactgagtgggaaggcacgtggtggaagtcccgagttgaggaggtggatggcagcctagtcaggatcctcttcctggatgacaaaagatgtgagtggatctatcgaggctctacacggctggagcccatgttcagcatgaaaacatcctcagcctctgcactggagaagaagcaaggacagctcaggacacgtccaaatatgggtgctgtgaggagcaaaggccctgttgtccagtacacacaggatctgaccggtactggaacccagttcaagccagtggaacccccacagcctacagctccacctgccccacctttcccacctgctccacctctatccccccaagcaggtgacagtgacttggaaagccagcttgcccagtcacggaagcaggtagccaaaaagagcacgtcctttcgaccaggatctgtgggctctggtcattcctcccctacatctcctgcactcagtgaaaatgtctctggtgggaaacctgggatcaaccagacatatagatcacctttaggctccacagcctctgccccagcaccctcagcactcccggcccctccagcacccccagtcttccatggcatgctggagcgggccccagcagagccctcctaccgtgctcccatggagaagcttttctacttacctcatgtctgcagctatacctgtctgtctcgagtcagacctatgaggaatgagcagtaccggggcaagaaccctctgctggtcccgttactatatgacttccggcggatgacagcccggcgtcgagttaaccgcaagatgggctttcatgttatctataagacaccttgtggtctctgccttcggacaatgcaggagatagaacgctaccttttcgagactggctgtgacttcctcttcctggagatgttctgtttggatccatatgttcttgtggaccgaaagtttcagccctataagcctttttactatattttggacatcacttatgggaaggaagatgttcccctatcctgtgtcaatgagattgacacaacccctccaccccaggtggcctacagcaaggaacgtatcccgggcaagggtgttttcattaacacaggccctgaatttctggttggctgtgactgcaaggatgggtgtcgggacaagtccaagtgtgcctgccatcaactaactatccaggctacagcctgtaccccaggaggccaaatcaaccctaactctggctaccagtacaagagactagaagagtgtctacccacaggggtatatgagtgtaacaaacgctgcaaatgtgacccaaacatgtgcacaaaccggttggtgcaacatggactacaagttcggctacagctattcaagacacagaacaagggctggggtatccgctgcttggatgacattgccaaaggctcttttgtttgtatttatgcaggcaaaatcctgacagatgactttgcagacaaggagggtctggaaatgggtgatgagtactttgcaaatctggaccatatcgagagcgtggagaacttcaaagaaggatatgagagtgatgccccctgttcctctgacagcagtggtgtagacttgaaggaccaggaagatggcaacagcggtacagaggaccctgaagagtccaatgatgatagctcagatgataacttctgtaaggatgaggacttcagcaccagttcagtgtggcggagctatgctacccggaggcagacccggggccagaaagagaacggactctctgagacaacttccaaggactcccaccccccagatcttggacccccacatattcctgttcctccctcaatccctgtaggtggctgcaatccaccttcctccgaagagacacccaagaacaaggtggcctcatggttgagctgcaatagtgtcagtgaaggtggttttgctgactctgatagccattcatccttcaagactaatgaaggtggggagggccgggctgggggaagccgaatggaggctgagaaggcctccacctcaggactaggcatcaaggatgagggagacatcaaacaggccaagaaagaggacactgacgaccgaaacaagatgtcagtagttactgaaagctctcgaaattacggttacaatccttctcctgtgaagcctgaaggacttcgccgcccacctagtaagactagtatgcatcaaagccgaagactcatggcttctgctcagtccaaccctgatgatgtcctgacactgtccagcagcacagaaagtgagggggaaagtgggaccagccgaaagcccactgctggtcagacttcggctacagcggttgacagtgatgatatccagaccatatcctctggctctgaaggggatgactttgaggacaagaagaacatgactggtccaatgaagcgtcaagtggcagtaaaatcaacccgaggctttgctcttaaatcaacccatgggattgcaattaaatcaaccaacatggcctctgtggacaagggggagagcgcacctgttcgtaagaacacacgccaattctatgatggcgaggagtcttgctacatcattgatgccaagcttgaaggcaacctgggccgctacctcaaccacagttgcagccccaacctgtttgtccagaatgtcttcgtggatacccatgatcttcgcttcccctgggtggccttctttgccagcaaaagaatccgggctgggacagaacttacttgggactacaactacgaggtgggcagtgtggaaggcaaggagctactctgttgctgtggggccattgaatgcagaggacgtcttctttagaggacagccttcttcccaacccttcttgaactgtcgtttcctcaggaactgggtcttcctgattgttgaaccctgacccgaagtctctgggctagctactccccccagctcctagttgatagaaatgggggttctggaccagatgatcccttccaatgtggtgctagcaggcaggatcccttctccacctccaaaggccctaaagggtggggagagatcaccactctaacctcggcctgacatccctcccatcccatatttgtccaagtgttcctgcttctaacagactttgttcttagaatggagcctgtgtatctactatctccagtttgtattatttcttgaaagtcttttaacaatatgataaaact

SEQ ID NO: 180842 - DNA, 1478 bp, Homo sapiens
  Payload ID: 15614
  Gene Symbol: SETDB1
  Gene Name: SET domain, bifurcated 1
  Uniprot ID: Q15047
  ENST ID: ENST00000368962
  CDS Start-End: 127-1320
gtttgcttccgggcgtttcttttgcttccccttccctctttcacgcttcctcccctccccctcctcccttatcccttcgctttcgctcttttccgtcgaggccgacccctgagttaggacaaaagcatgtcttcccttcctgggtgcattggtttggatgcagcaacagctacagtggagtctgaagagattgcagagctgcaacaggcagtggttgaggaactgggtatctctatggaggaacttcggcatttcatcgatgaggaactggagaagatggattgtgtacagcaacgcaagaagcagctagcagagttagagacatgggtaatacagaaagaatctgaggtggctcacgttgaccaactctttgatgatgcatccagggcagtgactaattgtgagtctttggtgaaggacttctactccaagctgggactacaataccgggacagtagctctgaggacgaatcttcccggcctacagaaataattgagattcctgatgaagatgatgatgtcctcagtattgattcaggtgatgctgggagcagaactccaaaagaccagaagctccgtgaagctatggctgccttaagaaagtcagctcaagatgttcagaagttcatggatgctgtcaacaagaagagcagttcccaggatctgcataaaggaaccttgagtcagatgtctggagaactaagcaaagatggtgacctgatagtcagcatgcgaattctgggcaagaagagaactaagacttggcacaaaggcacccttattgccatccagacagttgggccagggaagaaatacaaggtgaaatttgacaacaaaggaaagagtctactgtcggggaaccatattgcctatgattaccaccctcctgctgacaagctgtatgtgggcagtcgggtggtcgccaaatacaaagatgggaatcaggtctggctctatgctggcattgtagctgagacaccaaacgtcaaaaacaagctcaggtttctcattttctttgatgatggctatgcttcctatgtcacacagtcggaactgtatcccatttgccggccactgaaaaagacttgggaggacatagaagacatctcctgccgtgacttcatagaggagtatgtcactgcctaccccaaccgccccatggtactgctcaagagtggccagcttatcaagactgagtgggaaggcacgtggtggaagtcccgagttgaggaggtggatggcagcctagtcaggatcctcttcctggtactgttcttctctacaattttggaggcagaggttggtggggggggaacttaagaagcagtaatgaggatggttttatagctattccatagccttcctctttcttatcctcgtatgtgttctcactgtttttggtcaaattttactttgccctttttgttgttcctctgcaggtcattgttgaaaataaattatctgaattataatacgaa

SEQ ID NO: 180843 - DNA, 1045 bp, Homo sapiens
  Payload ID: 15614
  Gene Symbol: SETDB1
  Gene Name: SET domain, bifurcated 1
  ENST ID: ENST00000368963
  CDS Start-End: 106-855
ttcgctttcgctcttttccgtcgaggccgacccctgagttgtgagtctggggtctggttggtgaaaaagagcccttgaagctggaagacgggagaggacaaaagcatgtcttcccttcctgggtgcattggtttggatgcagcaacagctacagtggagtctgaagagattgcagagctgcaacaggcagtggttgaggaactgggtatctctatggaggaacttcggcatttcatcgatgaggaactggagaagatggattgtgtacagcaacgcaagaagcagctagcagagttagagacatgggtaatacagaaagaatctgaggtggctcacgttgaccaactctttgatgatgcatccagggcagtgactaattgtgagtctttggtgaaggacttctactccaagctgggactacaataccgggacagtagctctgaggacgaatcttcccggcctacagaaataattgagattcctgatgaagatgatgatgtcctcagtattgattcaggtgatgctgggagcagaactccaaaagaccagaagctccgtgaagctatggctgccttaagaaagtcagctcaagatgttcagaagttcatggatgctgtcaacaagaagagcagttcccaggatctgcataaaggaaccttgagtcagatgtctggagaactaagcaaagatggtgacctgatagtcagcatgcgaattctgggcaagaagagaactaagacttggcacaaaggcacccttattgccatccagacagttggtttctcattttctttgatgatggctatgcttcctatgtcacacagtcggaactgtatcccatttgccggccactgaaaaagacttgggaggacatagaagacatctcctgccgtgacttcatagaggagtatgtcactgcctaccccaaccgccccatggtactgctcaagagtggccagcttatcaagactgagtgggaaggcacgtggtggaagtcccgagttgaggaggtggatggcagcctagtcaggatcctcttcctggt

SEQ ID NO: 180844 - DNA, 548 bp, Homo sapiens
  Payload ID: 15614
  Gene Symbol: SETDB1
  Gene Name: SET domain, bifurcated 1
  ENST ID: ENST00000368964
  CDS Start-End: 43-378
aaaaagagcccttgaagctggaagacgggagaggacaaaagcatgtcttcccttcctgggtgcattggtttggatgcagcaacagctacagtggagtctgaagagattgcagagctgcaacaggcagtggttgaggaactgggtatctctatggaggaacttcggcatttcatcgatgaggaactggagaagatggattgtgtacagcaacgcaagaagcagctagcagagttagagacatgggtaatacagaaagaatctgaggtggctcacgttgaccaactctttgatgatgcatccaggacttctactccaagctgggactacaataccgggacagtagctctgaggacgaatcttcccggcctacagaaataattgagattcctgatgaagatgatgatgtcctcagtattgattcaggtgatgctgggagcagaactccaaaagaccagaagctccgtgaagctatggctgccttaagaaagtcagctcaagatgttcagaagttcatggatgctgtcaacaagaagagcagttcccaggat

SEQ ID NO: 180845 - DNA, 4370 bp, Homo sapiens
  Payload ID: 15614
  Gene Symbol: SETDB1
  Gene Name: SET domain, bifurcated 1
  Uniprot ID: Q15047
  ENST ID: ENST00000368969
  CDS Start-End: 118-3990
ctcccttatcccttcgctttcgctcttttccgtcgaggccgacccctgagttgtgagtctggggtctggttggtgaaaaagagcccttgaagctggaagacgggagaggacaaaagcatgtcttcccttcctgggtgcattggtttggatgcagcaacagctacagtggagtctgaagagattgcagagctgcaacaggcagtggttgaggaactgggtatctctatggaggaacttcggcatttcatcgatgaggaactggagaagatggattgtgtacagcaacgcaagaagcagctagcagagttagagacatgggtaatacagaaagaatctgaggtggctcacgttgaccaactctttgatgatgcatccagggcagtgactaattgtgagtctttggtgaaggacttctactccaagctgggactacaataccgggacagtagctctgaggacgaatcttcccggcctacagaaataattgagattcctgatgaagatgatgatgtcctcagtattgattcaggtgatgctgggagcagaactccaaaagaccagaagctccgtgaagctatggctgccttaagaaagtcagctcaagatgttcagaagttcatggatgctgtcaacaagaagagcagttcccaggatctgcataaaggaaccttgagtcagatgtctggagaactaagcaaagatggtgacctgatagtcagcatgcgaattctgggcaagaagagaactaagacttggcacaaaggcacccttattgccatccagacagttgggccagggaagaaatacaaggtgaaatttgacaacaaaggaaagagtctactgtcggggaaccatattgcctatgattaccaccctcctgctgacaagctgtatgtgggcagtcgggtggtcgccaaatacaaagatgggaatcaggtctggctctatgctggcattgtagctgagacaccaaacgtcaaaaacaagctcaggtttctcattttctttgatgatggctatgcttcctatgtcacacagtcggaactgtatcccatttgccggccactgaaaaagacttgggaggacatagaagacatctcctgccgtgacttcatagaggagtatgtcactgcctaccccaaccgccccatggtactgctcaagagtggccagcttatcaagactgagtgggaaggcacgtggtggaagtcccgagttgaggaggtggatggcagcctagtcaggatcctcttcctggatgacaaaagatgtgagtggatctatcgaggctctacacggctggagcccatgttcagcatgaaaacatcctcagcctctgcactggagaagaagcaaggacagctcaggacacgtccaaatatgggtgctgtgaggagcaaaggccctgttgtccagtacacacaggatctgaccggtactggaacccagttcaagccagtggaacccccacagcctacagctccacctgccccacctttcccacctgctccacctctatccccccaagcaggtgacagtgacttggaaagccagcttgcccagtcacggaagcaggtagccaaaaagagcacgtcctttcgaccaggatctgtgggctctggtcattcctcccctacatctcctgcactcagtgaaaatgtctctggtgggaaacctgggatcaaccagacatatagatcacctttaggctccacagcctctgccccagcaccctcagcactcccggcccctccagcacccccagtcttccatggcatgctggagcgggccccagcagagccctcctaccgtgctcccatggagaagcttttctacttacctcatgtctgcagctatacctgtctgtctcgagtcagacctatgaggaatgagcagtaccggggcaagaaccctctgctggtcccgttactatatgacttccggcggatgacagcccggcgtcgagttaaccgcaagatgggctttcatgttatctataagacaccttgtggtctctgccttcggacaatgcaggagatagaacgctaccttttcgagactggctgtgacttcctcttcctggagatgttctgtttggatccatatgttcttgtggaccgaaagtttcagccctataagcctttttactatattttggacatcacttatgggaaggaagatgttcccctatcctgtgtcaatgagattgacacaacccctccaccccaggtggcctacagcaaggaacgtatcccgggcaagggtgttttcattaacacaggccctgaatttctggttggctgtgactgcaaggatgggtgtcgggacaagtccaagtgtgcctgccatcaactaactatccaggctacagcctgtaccccaggaggccaaatcaaccctaactctggctaccagtacaagagactagaagagtgtctacccacaggggtatatgagtgtaacaaacgctgcaaatgtgacccaaacatgtgcacaaaccggttggtgcaacatggactacaagttcggctacagctattcaagacacagaacaagggctggggtatccgctgcttggatgacattgccaaaggctcttttgtttgtatttatgcaggcaaaatcctgacagatgactttgcagacaaggagggtctggaaatgggtgatgagtactttgcaaatctggaccatatcgagagcgtggagaacttcaaagaaggatatgagagtgatgccccctgttcctctgacagcagtggtgtagacttgaaggaccaggaagatggcaacagcggtacagaggaccctgaagagtccaatgatgatagctcagatgataacttctgtaaggatgaggacttcagcaccagttcagtgtggcggagctatgctacccggaggcagacccggggccagaaagagaacggactctctgagacaacttccaaggactcccaccccccagatcttggacccccacatattcctgttcctccctcaatccctgtaggtggctgcaatccaccttcctccgaagagacacccaagaacaaggtggcctcatggttgagctgcaatagtgtcagtgaaggtggttttgctgactctgatagccattcatccttcaagactaatgaaggtggggagggccgggctgggggaagccgaatggaggctgagaaggcctccacctcaggactaggcatcaaggatgagggagacatcaaacaggccaagaaagaggacactgacgaccgaaacaagatgtcagtagttactgaaagctctcgaaattacggttacaatccttctcctgtgaagcctgaaggacttcgccgcccacctagtaagactagtatgcatcaaagccgaagactcatggcttctgctcagtccaaccctgatgatgtcctgacactgtccagcagcacagaaagtgagggggaaagtgggaccagccgaaagcccactgctggtcagacttcggctacagcggttgacagtgatgatatccagaccatatcctctggctctgaaggggatgactttgaggacaagaagaacatgactggtccaatgaagcgtcaagtggcagtaaaatcaacccgaggctttgctcttaaatcaacccatgggattgcaattaaatcaaccaacatggcctctgtggacaagggggagagcgcacctgttcgtaagaacacacgccaattctatgatggcgaggagtcttgctacatcattgatgccaagcttgaaggcaacctgggccgctacctcaaccacagttgcagccccaacctgtttgtccagaatgtcttcgtggatacccatgatcttcgcttcccctgggtggccttctttgccagcaaaatccgggctgggacagaacttacttgggactacaactacgaggtgggcagtgtggaaggcaaggagctactctgttgctgtggggccattgaatgcagaggacgtcttctttagaggacagccttcttcccaacccttcttgaactgtcgtttcctcaggaactgggtcttcctgattgttgaaccctgacccgaagtctctgggctagctactccccccagctcctagttgatagaaatgggggttctggaccagatgatcccttccaatgtggtgctagcaggcaggatcccttctccacctccaaaggccctaaagggtggggagagatcaccactctaacctcggcctgacatccctcccatcccatatttgtccaagtgttcctgcttctaacagactttgttcttagaatggagcctgtgtatctactatctccagtttgtattatttcttgaaagtcttttaacaatatgataaaactaagattgtg

SEQ ID NO: 180846 - DNA, 590 bp, Homo sapiens
  Payload ID: 15614
  Gene Symbol: SETDB1
  Gene Name: SET domain, bifurcated 1
  ENST ID: ENST00000423081
  CDS Start-End: 139-590
gaactgggtttgcgaatgggtaggacgcacccctagaatgggtagcacgggggtgggctggtgtgtgggcagaggaaaatggaggcgctgaaaatcagattttctttaaccgtttgattaaaaaagcagttcacacgaatgtgtgaagtatttggattgtggatattagaggacaaaagcatgtcttcccttcctgggtgcattggtttggatgcagcaacagctacagtggagtctgaagagattgcagagctgcaacaggcagtggttgaggaactgggtatctctatggaggaacttcggcatttcatcgatgaggaactggagaagatggattgtgtacagcaacgcaagaagcagctagcagagttagagacatgggtaatacagaaagaatctgaggtggctcacgttgaccaactctttgatgatgcatccagggcagtgactaattgtgagtctttggtgaaggacttctactccaagctgggactacaataccgggacagtagctctgaggacgaatcttcccggcctacagaaataattgagattcctgatgaagatgatgatgtcctcagtattgattc

SEQ ID NO: 180847 - DNA, 668 bp, Homo sapiens
  Payload ID: 15614
  Gene Symbol: SETDB1
  Gene Name: SET domain, bifurcated 1
  ENST ID: ENST00000448029
  CDS Start-End: 199-668
aaaggtttgcttccgggcgtttcttttgcttccccttccctctttcacgcttcctcccctccccctcctcccttatcccttcgctttcgctcttttccgtcgaggccgacccctgagttgtgagtctggggtctggttggtgaaaaagagcccttgaagctggaagacgggaggtgcggggaatactaggacaaaagcatgtcttcccttcctgggtgcattggtttggatgcagcaacagctacagtggagtctgaagagattgcagagctgcaacaggcagtggttgaggaactgggtatctctatggaggaacttcggcatttcatcgatgaggaactggagaagatggattgtgtacagcaacgcaagaagcagctagcagagttagagacatgggtaatacagaaagaatctgaggtggctcacgttgaccaactctttgatgatgcatccagggcagtgactaattgtgagtctttggtgaaggacttctactccaagctgggactacaataccgggacagtagctctgaggacgaatcttcccggcctacagaaataattgagattcctgatgaagatgatgatgtcctcagtattgattcaggtgatgctgggagcagaactccaaaagaccagaagctccgtgaagctatggctgcctt

SEQ ID NO: 180848 - DNA, 3854 bp, Homo sapiens
  Payload ID: 15614
  Gene Symbol: SETDB1
  Gene Name: SET domain, bifurcated 1
  ENST ID: ENST00000498193
  CDS Start-End: 76-3854
ttggtgaaaaagagcccttgaagctggaagacgggaggtgcggggaatactgttgagttatttgaggacaaaagcatgtcttcccttcctgggtgcattggtttggatgcagcaacagctacagtggagtctgaagagattgcagagctgcaacaggcagtggttgaggaactgggtatctctatggaggaacttcggcatttcatcgatgaggaactggagaagatggattgtgtacagcaacgcaagaagcagctagcagagttagagacatgggtaatacagaaagaatctgaggtggctcacgttgaccaactctttgatgatgcatccagggcagtgactaattgtgagtctttggtgaaggacttctactccaagctgggactacaataccgggacagtagctctgaggacgaatcttcccggcctacagaaataattgagattcctgatgaagatgatgatgtcctcagtattgattcaggtgatgctgggagcagaactccaaaagaccagaagctccgtgaagctatggctgccttaagaaagtcagctcaagatgttcagaagttcatggatgctgtcaacaagaagagcagttcccaggatctgcataaaggaaccttgagtcagatgtctggagaactaagcaaagatggtgacctgatagtcagcatgcgaattctgggcaagaagagaactaagacttggcacaaaggcacccttattgccatccagacagttgggccagggaagaaatacaaggtgaaatttgacaacaaaggaaagagtctactgtcggggaaccatattgcctatgattaccaccctcctgctgacaagctgtatgtgggcagtcgggtggtcgccaaatacaaagatgggaatcaggtctggctctatgctggcattgtagctgagacaccaaacgtcaaaaacaagctcaggtttctcattttctttgatgatggctatgcttcctatgtcacacagtcggaactgtatcccatttgccggccactgaaaaagacttgggaggacatagaagacatctcctgccgtgacttcatagaggagtatgtcactgcctaccccaaccgccccatggtactgctcaagagtggccagcttatcaagactgagtgggaaggcacgtggtggaagtcccgagttgaggaggtggatggcagcctagtcaggatcctcttcctggatgacaaaagatgtgagtggatctatcgaggctctacacggctggagcccatgttcagcatgaaaacatcctcagcctctgcactggagaagaagcaaggacagctcaggacacgtccaaatatgggtgctgtgaggagcaaaggccctgttgtccagtacacacaggatctgaccggtactggaacccagttcaagccagtggaacccccacagcctacagctccacctgccccacctttcccacctgctccacctctatccccccaagcaggtgacagtgacttggaaagccagcttgcccagtcacggaagcaggtagccaaaaagagcacgtcctttcgaccaggatctgtgggctctggtcattcctcccctacatctcctgcactcagtgaaaatgtctctggtgggaaacctgggatcaaccagacatatagatcacctttaggctccacagcctctgccccagcaccctcagcactcccggcccctccagcacccccagtcttccatggcatgctggagcgggccccagcagagccctcctaccgtgctcccatggagaagcttttctacttacctcatgtctgcagctatacctgtctgtctcgagtcagacctatgaggaatgagcagtaccggggcaagaaccctctgctggtcccgttactatatgacttccggcggatgacagcccggcgtcgagttaaccgcaagatgggctttcatgttatctataagacaccttgtggtctctgccttcggacaatgcaggagatagaacgctaccttttcgagactggctgtgacttcctcttcctggagatgttctgtttggatccatatgttcttgtggaccgaaagtttcagccctataagcctttttactatattttggacatcacttatgggaaggaagatgttcccctatcctgtgtcaatgagattgacacaacccctccaccccaggtggcctacagcaaggaacgtatcccgggcaagggtgttttcattaacacaggccctgaatttctggttggctgtgactgcaaggatgggtgtcgggacaagtccaagtgtgcctgccatcaactaactatccaggctacagcctgtaccccaggaggccaaatcaaccctaactctggctaccagtacaagagactagaagagtgtctacccacaggggtatatgagtgtaacaaacgctgcaaatgtgacccaaacatgtgcacaaaccggttggtgcaacatggactacaagttcggctacagctattcaagacacagaacaagggctggggtatccgctgcttggatgacattgccaaaggctcttttgtttgtatttatgcaggcaaaatcctgacagatgactttgcagacaaggagggtctggaaatgggtgatgagtactttgcaaatctggaccatatcgagagcgtggagaacttcaaagaaggatatgagagtgatgccccctgttcctctgacagcagtggtgtagacttgaaggaccaggaagatggcaacagcggtacagaggaccctgaagagtccaatgatgatagctcagatgataacttctgtaaggatgaggacttcagcaccagttcagtgtggcggagctatgctacccggaggcagacccggggccagaaagagaacggactctctgagacaacttccaaggactcccaccccccagatcttggacccccacatattcctgttcctccctcaatccctgtaggtggctgcaatccaccttcctccgaagagacacccaagaacaaggtggcctcatggttgagctgcaatagtgtcagtgaaggtggttttgctgactctgatagccattcatccttcaagactaatgaaggtggggagggccgggctgggggaagccgaatggaggctgagaaggcctccacctcaggactaggcatcaaggatgagggagacatcaaacaggccaagaaagaggacactgacgaccgaaacaagatgtcagtagttactgaaagctctcgaaattacggttacaatccttctcctgtgaagcctgaaggacttcgccgcccacctagtaagactagtatgcatcaaagccgaagactcatggcttctgctcagtccaaccctgatgatgtcctgacactgtccagcagcacagaaagtgagggggaaagtgggaccagccgaaagcccactgctggtcagacttcggctacagcggttgacagtgatgatatccagaccatatcctctggctctgaaggggatgactttgaggacaagaagaacatgactggtccaatgaagcgtcaagtggcagtaaaatcaacccgaggctttgctcttaaatcaacccatgggattgcaattaaatcaaccaacatggcctctgtggacaagggggagagcgcacctgttcgtaagaacacacgccaattctatgatggcgaggagtcttgctacatcattgatgccaagcttgaaggcaacctgggccgctacctcaacgtgagacccctctccccacctctagatgctggattatcccatggtcctcagatttcttttaacatactctataagcccttttcttgttataaactcttgatctcaaagga

SEQ ID NO: 180849 - DNA, 587 bp, Homo sapiens
  Payload ID: 15614
  Gene Symbol: SETDB1
  Gene Name: SET domain, bifurcated 1
  ENST ID: ENST00000525956
  CDS Start-End: 98-587
agttttcgtcgcctctgaggggcgccccgcggctttggatttgaccccgtcaggctaccgtcgcggtgaccggaacggcactaaagaggacaaaagcatgtcttcccttcctgggtgcattggtttggatgcagcaacagctacagtggagtctgaagagattgcagagctgcaacaggcagtggttgaggaactgggtatctctatggaggaacttcggcatttcatcgatgaggaactggagaagatggattgtgtacagcaacgcaagaagcagctagcagagttagagacatgggtaatacagaaagaatctgaggtggctcacgttgaccaactctttgatgatgcatccagggcagtgactaattgtgagtctttggtgaaggacttctactccaagctgggactacaataccgggacagtagctctgaggacgaatcttcccggcctacagaaataattgagattcctgatgaagatgatgatgtcctcagtattgattcaggtgatgctgggagcagaactccaaaagaccagaagctccgtgaagctatggctgccttaagaaagtcagctcaagatg

SEQ ID NO: 180850 - DNA, 2043 bp, Homo sapiens
  Payload ID: 15614
  Gene Symbol: SETDB1
  Gene Name: SET domain, bifurcated 1
  ENST ID: ENST00000534805
  CDS Start-End: 135-2043
ttcctcccctccccctcctcccttatcccttcgctttcgctcttttccgtcgaggccgacccctgagttgtgagtctggggtctggttggtgaaaaagagcccttgaagctggaagacgggagaggacaaaagcatgtcttcccttcctgggtgcattggtttggatgcagcaacagctacagtggagtctgaagagattgcagagctgcaacaggcagtggttgaggaactgggtatctctatggaggaacttcggcatttcatcgatgaggaactggagaagatggattgtgtacagcaacgcaagaagcagctagcagagttagagacatgggtaatacagaaagaatctgaggtggctcacgttgaccaactctttgatgatgcatccagggcagtgactaattgtgagtctttggtgaaggacttctactccaagctgggactacaataccgggacagtagctctgaggacgaatcttcccggcctacagaaataattgagattcctgatgaagatgatgatgtcctcagtattgattcaggtgatgctgggagcagaactccaaaagaccagaagctccgtgaagctatggctgccttaagaaagtcagctcaagatgttcagaagttcatggatgctgtcaacaagaagagcagttcccaggatctgcataaaggaaccttgagtcagatgtctggagaactaagcaaagatggtgacctgatagtcagcatgcgaattctgggcaagaagagaactaagacttggcacaaaggcacccttattgccatccagacagttgggccagggaagaaatacaaggtgaaatttgacaacaaaggaaagagtctactgtcggggaaccatattgcctatgattaccaccctcctgctgacaagctgtatgtgggcagtcgggtggtcgccaaatacaaagatgggaatcaggtctggctctatgctggcattgtagctgagacaccaaacgtcaaaaacaagctcaggtttctcattttctttgatgatggctatgcttcctatgtcacacagtcggaactgtatcccatttgccggccactgaaaaagacttgggaggacatagaagacatctcctgccgtgacttcatagaggagtatgtcactgcctaccccaaccgccccatggtactgctcaagagtggccagcttatcaagactgagtgggaaggcacgtggtggaagtcccgagttgaggaggtggatggcagcctagtcaggatcctcttcctggatgacaaaagatgtgagtggatctatcgaggctctacacggctggagcccatgttcagcatgaaaacatcctcagcctctgcactggagaagaagcaaggacagctcaggacacgtccaaatatgggtgctgtgaggagcaaaggccctgttgtccagtacacacaggatctgaccggtactggaacccagttcaagccagtggaacccccacagcctacagctccacctgccccacctttcccacctgctccacctctatccccccaagcaggtgacagtgaaagcttggaaagccagcttgcccagtcacggaagcaggtagccaaaaagagcacgtcctttcgaccaggatctgtgggctctggtcattcctcccctacatctcctgcactcagtgaaaatgtctctggtgggaaacctgggatcaaccagacatatagatcacctttaggctccacagcctctgccccagcaccctcagcactcccggcccctccagcacccccagtcttccatggcatgctggagcgggccccagcagagccctcctaccgtgctcccatggagaagcttttctacttacctcatgtctgcagctatacctgtctgtctcgagtcagacctatgaggaatgagcagtaccggggcaagaaccctctgctggtcccgttactatatgacttccggcggatgacagcccggcgtcgagttaaccgcaagatgggctttcatgttatctataagacaccttgtggtctctgccttc

SEQ ID NO: 180851 - DNA, 2138 bp, Homo sapiens
  Payload ID: 15615
  Gene Symbol: SETDB2
  Gene Name: SET domain, bifurcated 2
  ENST ID: ENST00000258672
  CDS Start-End: 441-2087
gctgggaacctgaggttgtcaaaggggcggcaggaaatggacagcagtataaaacccagaagcagaacttgaaggttaaaccactagcccatttcacagaatgtttcatccatttgtggaccaaaagatggagttggtttttatttttaaaaagataatgttaatgatctgataccactacaaatatttacgtgagaagattcatggacttgtcttttggttggactgtcactcatttctgaaagtttcttcagccacaatttctatttgaaaattcaagtatcaaaggataccaggtttagaatggtataatgatgtattttgtctgaggactgcaaattttatagagaccacagttggattccagtgatattctgcaatcaaagtgatttgataaacctaattttgaagcattttatatttataagcgacatcaaaagatgggagaaaaaaatggcgatgcaaaaactttctggatggagctagaagatgatggaaaagtggacttcatttttgaacaagtacaaaatgtgctgcagtcactgaaacaaaagatcaaagatgggtctgccaccaataaagaatacatccaagcaatgattctagtgaatgaagcaactataattaacagttcaacatcaataaaggatcctatgcctgtgactcagaaggaacaggaaaacaaatccaatgcatttccctctacatcatgtgaaaactcctttccagaagactgtacatttctaacaacagaaaataaggaaattctctctcttgaagataaagttgtagactttagagaaaaagactcatcttcgaatttatcttaccaaagtcatgactgctctggtgcttgtctgatgaaaatgccactgaacttgaagggagaaaaccctctgcagctgccaatcaaatgtcacttccaaagacgacatgcaaagacaaactctcattcttcagcactccacgtgagttataaaaccccttgtggaaggagtctacgaaacgtggaggaagtttttcgttacctgcttgagacagagtgtaactttttatttacagataacttttctttcaatacctatgttcagttggctcggaattacccaaagcaaaaagaagttgtttctgatgtggatattagcaatggagtggaatcagtgcccatttctttctgtaatgaaattgacagtagaaagctcccacagtttaagtacagaaagactgtgtggcctcgagcatataatctaaccaacttttccagcatgtttactgattcctgtgactgctctgagggctgcatagacataacaaaatgtgcatgtcttcaactgacagcaaggaatgccaaaacttcccccttgtcaagtgacaaaataaccactggatataaatataaaagactacagagacagattcctactggcatttatgaatgcagccttttgtgcaaatgtaatcgacaattgtgtcaaaaccgagttgtccaacatggtcctcaagtgaggttacaggtgttcaaaactgagcagaagggatggggtgtacgctgtctagatgacattgacagagggacatttgtttgcatttattcaggaagattactaagcagagctaacactgaaaaatcttatggtattgatgaaaacgggagagatgagaatactatgaaaaatatattttcaaaaaagaggaaattagaagttgcatgttcagattgtgaagttgaagttctcccattaggattggaaacacatcctagaactgctaaaactgagaaatgtccaccaaagttcagtaataatcccaaggagcttactgtggaaacgaaatatgataatatttcaagaattcaatatcattcagttattagagatcctgaatccaagacagccatttttcaacacaatgggaaaaaaatggaatttgtttcctcggagtctgtcactccagaagataatgatggatttaaaccaccccgagagcatctgaactctaaaaccaagggagcacaaagtaggctttgtttcttctgtgaatgcctacctcttctgcctgtttctctgtctcttgctcaatacctgtagctcattttcttagattccataataaacatgctgcatttgtcagaaaggtta

SEQ ID NO: 180852 - DNA, 5619 bp, Homo sapiens
  Payload ID: 15615
  Gene Symbol: SETDB2
  Gene Name: SET domain, bifurcated 2
  Uniprot ID: Q96T68
  ENST ID: ENST00000317257
  CDS Start-End: 343-2466
gaatgtttcatccatttgtggaccaaaagatggagttggtttttatttttaaaaagataatgttaatgatctgataccactacaaatatttacgtgagaagattcatggacttgtcttttggttggactgtcactcatttctgaaagtttcttcagccacaatttctatttgaaaattcaagtatcaaaggataccaggtttagaatggtataatgatgtattttgtctgaggactgcaaattttatagagaccacagttggattccagtgatattctgcaatcaaagtgatttgataaacctaattttgaagcattttatatttataagcgacatcaaaagatgggagaaaaaaatggcgatgcaaaaactttctggatggagctagaagatgatggaaaagtggacttcatttttgaacaagtacaaaatgtgctgcagtcactgaaacaaaagatcaaagatgggtctgccaccaataaagaatacatccaagcaatgattctagtgaatgaagcaactataattaacagttcaacatcaataaaggatcctatgcctgtgactcagaaggaacaggaaaacaaatccaatgcatttccctctacatcatgtgaaaactcctttccagaagactgtacatttctaacaacagaaaataaggaaattctctctcttgaagataaagttgtagactttagagaaaaagactcatcttcgaatttatcttaccaaagtcatgactgctctggtgcttgtctgatgaaaatgccactgaacttgaagggagaaaaccctctgcagctgccaatcaaatgtcacttccaaagacgacatgcaaagacaaactctcattcttcagcactccacgtgagttataaaaccccttgtggaaggagtctacgaaacgtggaggaagtttttcgttacctgcttgagacagagtgtaactttttatttacagataacttttctttcaatacctatgttcagttggctcggaattacccaaagcaaaaagaagttgtttctgatgtggatattagcaatggagtggaatcagtgcccatttctttctgtaatgaaattgacagtagaaagctcccacagtttaagtacagaaagactgtgtggcctcgagcatataatctaaccaacttttccagcatgtttactgattcctgtgactgctctgagggctgcatagacataacaaaatgtgcatgtcttcaactgacagcaaggaatgccaaaacttcccccttgtcaagtgacaaaataaccactggatataaatataaaagactacagagacagattcctactggcatttatgaatgcagccttttgtgcaaatgtaatcgacaattgtgtcaaaaccgagttgtccaacatggtcctcaagtgaggttacaggtgttcaaaactgagcagaagggatggggtgtacgctgtctagatgacattgacagagggacatttgtttgcatttattcaggaagattactaagcagagctaacactgaaaaatcttatggtattgatgaaaacgggagagatgagaatactatgaaaaatatattttcaaaaaagaggaaattagaagttgcatgttcagattgtgaagttgaagttctcccattaggattggaaacacatcctagaactgctaaaactgagaaatgtccaccaaagttcagtaataatcccaaggagcttactgtggaaacgaaatatgataatatttcaagaattcaatatcattcagttattagagatcctgaatccaagacagccatttttcaacacaatgggaaaaaaatggaatttgtttcctcggagtctgtcactccagaagataatgatggatttaaaccaccccgagagcatctgaactctaaaaccaagggagcacaaaaggactcaagttcaaaccatgttgatgagtttgaagataatctgctgattgaatcagatgtgatagatataactaaatatagagaagaaactccaccaaggagcagatgtaaccaggcgaccacattggataatcagaatattaaaaaggcaattgaggttcaaattcagaaaccccaagagggacgatctacagcatgtcaaagacagcaggtattttgtgatgaagagttgctaagtgaaaccaagaatacttcatctgattctctaacaaagttcaataaagggaatgtgtttttattggatgccacaaaagaaggaaatgtcggccgcttccttaatcatagttgttgcccaaatctcttggtacagaatgtttttgtagaaacacacaacaggaattttccattggtggcattcttcaccaacaggtatgtgaaagcaagaacagagctaacatgggattatggctatgaagctgggactgtgcctgagaaggaaatcttctgccaatgtggggttaataaatgtagaaaaaaaatattataaatatgtaactaacgcctgtttgtgaaattagcttatcaggctgaaattaaagccatgcaaaagaaggtctaggtccatcaaggaaattcccctccgttttcctttgtcatggggtttatgttttatttcagattttatttgtgtgacttagaaattccaggaacacaattaggatattttcatacacatagggtatcttgttcactgctgtgctactttacatgagtaggatggaagtgtatattttatatgaaataccactgtacaatttataatttatttacaaattatatattaagagaaacaaatgtcataacagaactcagctgtttctaattgcttttgtgactgttaccttttagttcatgcccccccaaagagctaaatttcacatttttacctacaaaattgatttttaattcctggcaaataatttaccattatgagctacaaggtgggcaacagcgcctgaggatctaattttatgcatattactcccaagtattttaacacttgttggagaagcaatatctggatcgataaaacactgtcccatcaaccatttgagtggggagagggagaagctcttctgtaagtaagattctggcaagctctttgaaatgagtcttctttcccacagattttctctactctttctatacaaacagataggagaagagggaatagaaacctggaggaacttgaatatttttgttctagatagagatacagttactgaaaaggaaacctagaaagtagtcacacgttgcttatttaggccagaagtaattgtactgggcaaaaatttcacttaaaaaacacaagaagtccaggtatggtggctcagacctgtaatcccagcactttgagaggccgaggcaggtggattacttgagcctaggggttcaagaccagcttgggcaacatgtcaaaaccctgtctctacaaaaaatacaaaaattagcctggcatgatggcatgtgcccgtagtctcagctactcaggagtgaggtgggaggatcatttgagctcagaaggtcaaggctgcaatgagacataatttcaccatagtacttccagcctgggcaatagagcaagactctctctcaaaaaaaacagcacacacacacacacacgaaaacaattctgaactatgaaatctgaaacagccccttggtatctcctgggcatgatttgcaaatcttttttttttacagaaaaaaggcaaagagtaagcactttgccataggttacttggccgtgatcatctatctagtggaaaaggggactgggaagcccaagcagactgggaaaccagacagctaggaaaaggagcaaaacatagcccagcaacctacagatgaagaaagttgagaaatccatttattcaccatagagacgcaggaatttcaggcaatgcactaaaatgaaatgggggaaaaaagcttgatcagtatgggaaccatttttgtgcaaaagggaatattatggatcagccagtatttctttgagctctgcctgtggagtccatttgacctttagaaatatgaggtattctgtcagttttatcttcttggagaaatttctcctaaaatcttgatttgctttagtctggactggttcatagccatcatcttccatcagtaccccagagattcactttgtctcttatgtgggatctgtttccagttagatgccattattttccttttccttggtttactcttccacatattggtaaagctcttccaatagcttttggaaaggaaaaatgaaaagtaaatgttttgaatctctgtgtgtttgacaatgtctttattttacccttatacctgattgctgttttggttggcaaggtataggattctttagtggtctccatgcccagttttgaagacatctgctagctttcagtgctgttgctgtggagtctgaaaatctgtcttctggcttccagggtgactactggaaattgaatgccattctgttccttctcttttgcatatataatccatttttatctctcttgaagcttataggtttatctttgtctcaatgttctgtccctgttaagagtccattttcatcctttgtactaggtgcctggtgggatcattccgtctgaaactaatgatttcccatctcttcactgtttctggaattcctgttttccagatgttagacctccagaatttgatctctaattttcctatcttttctcttaactttcagctctgtcttcttgctaggaccttttcctaggagcatttctcaatttaatcttccagttcatctgttgcattttatttttctagtctcatattgtctcatatttttaatttctaagagctccccttctccgaatattctttttttttaatagcatcctattttggctcatggttgcagtattttatctccttgaagatgtttgtgtgtttatgtatgtatatgcacacacgtatacatacacatacaggcatgcatctctgtattctttcggcataatctgtgtcctccagggtttgtttctttgtttcccctgtatgtttgttttggtcgttcacattataggctttcctcagagttaatggtcttggtagtctactcatatttaagtgtggaacaccaaaaagcttactataagctgagagtgtggtaaagggctctttgttttactatgacctacctgagctatcttgctggggaacaccctaatgtcagtctctttataaagggcctttcattttggcctggcaagaaatactctttcatcctcctgcatggagggcaaaaaaaaatttaaaaattggctgctagggtctgtctgctcacttccctgttttgcagaccccacactcttctgcaattcatttcatagttgtcaagactatacaaattgtcctttttaatgttctctcttctgctatccctagttggcagtcttcctctttacaacctgctgaaagtggaagacctccagttttcctttaattcctcagcaaaccaccaactattatatgtcttttttccagaacaacttattttttaactataattatatgcatttatgttagattcactgaaaacctcatcttgtatggtgctctgtaccctatgggtgctaaataaaggcttgctactggcaactgg

SEQ ID NO: 180853 - DNA, 6139 bp, Homo sapiens
  Payload ID: 15615
  Gene Symbol: SETDB2
  Gene Name: SET domain, bifurcated 2
  Uniprot ID: Q96T68
  ENST ID: ENST00000354234
  CDS Start-End: 826-2985
cctgcgctcgggaggtttgggcggcttggcgtcggaggagagccccacccgcggaggaacccagccttgccaacggagctggcggagctcactcctcaggtcaggcgggcggcgtagaaaacgcagcggagccaggtgaaaccaaggcaccgccgtggctggcccccgacagttcctctagccgggaggttggaggagctgaaaacgccgcggagccctcggccgcccgagcaggggctggaccccagcccttgcagcctcccttctcctggcacccaagtgcagtcctggctgcagaaggggccgcgggcgcactgagtttccaacctccatttcagcctgtctgtctcagggtgcagccttaatgagaggtgattcctaagctgctgggaacctgaggttgtcaaaggggcggcaggaaatggacagcagtataaaacccagaagcagaacttgaaggttaaaccactagcccatttcacagaatgtttcatccatttgtggaccaaaagatggagttggtttttatttttaaaaagataatgttaatgatctgataccactacaaatatttacgtgagaagattcatggacttgtcttttggttggactgtcactcatttctgaaagtttcttcagccacaatttctatttgaaaattcaagtatcaaaggataccaggtttagaatggtataatgatgtattttgtctgaggactgcaaattttatagagaccacagttggattccagtgatattctgcaatcaaagtgatttgataaacctaattttgaagcattttatatttataagcgacatcaaaagatgggagaaaaaaatggcgatgcaaaaactttctggatggagctagaagatgatggaaaagtggacttcatttttgaacaagtacaaaatgtgctgcagtcactgaaacaaaagatcaaagatgggtctgccaccaataaagaatacatccaagcaatgattctagtgaatgaagcaactataattaacagttcaacatcaataaagggagcatcacagaaagaagtgaatgcccaaagcagtgatcctatgcctgtgactcagaaggaacaggaaaacaaatccaatgcatttccctctacatcatgtgaaaactcctttccagaagactgtacatttctaacaacagaaaataaggaaattctctctcttgaagataaagttgtagactttagagaaaaagactcatcttcgaatttatcttaccaaagtcatgactgctctggtgcttgtctgatgaaaatgccactgaacttgaagggagaaaaccctctgcagctgccaatcaaatgtcacttccaaagacgacatgcaaagacaaactctcattcttcagcactccacgtgagttataaaaccccttgtggaaggagtctacgaaacgtggaggaagtttttcgttacctgcttgagacagagtgtaactttttatttacagataacttttctttcaatacctatgttcagttggctcggaattacccaaagcaaaaagaagttgtttctgatgtggatattagcaatggagtggaatcagtgcccatttctttctgtaatgaaattgacagtagaaagctcccacagtttaagtacagaaagactgtgtggcctcgagcatataatctaaccaacttttccagcatgtttactgattcctgtgactgctctgagggctgcatagacataacaaaatgtgcatgtcttcaactgacagcaaggaatgccaaaacttcccccttgtcaagtgacaaaataaccactggatataaatataaaagactacagagacagattcctactggcatttatgaatgcagccttttgtgcaaatgtaatcgacaattgtgtcaaaaccgagttgtccaacatggtcctcaagtgaggttacaggtgttcaaaactgagcagaagggatggggtgtacgctgtctagatgacattgacagagggacatttgtttgcatttattcaggaagattactaagcagagctaacactgaaaaatcttatggtattgatgaaaacgggagagatgagaatactatgaaaaatatattttcaaaaaagaggaaattagaagttgcatgttcagattgtgaagttgaagttctcccattaggattggaaacacatcctagaactgctaaaactgagaaatgtccaccaaagttcagtaataatcccaaggagcttactgtggaaacgaaatatgataatatttcaagaattcaatatcattcagttattagagatcctgaatccaagacagccatttttcaacacaatgggaaaaaaatggaatttgtttcctcggagtctgtcactccagaagataatgatggatttaaaccaccccgagagcatctgaactctaaaaccaagggagcacaaaaggactcaagttcaaaccatgttgatgagtttgaagataatctgctgattgaatcagatgtgatagatataactaaatatagagaagaaactccaccaaggagcagatgtaaccaggcgaccacattggataatcagaatattaaaaaggcaattgaggttcaaattcagaaaccccaagagggacgatctacagcatgtcaaagacagcaggtattttgtgatgaagagttgctaagtgaaaccaagaatacttcatctgattctctaacaaagttcaataaagggaatgtgtttttattggatgccacaaaagaaggaaatgtcggccgcttccttaatcatagttgttgcccaaatctcttggtacagaatgtttttgtagaaacacacaacaggaattttccattggtggcattcttcaccaacaggtatgtgaaagcaagaacagagctaacatgggattatggctatgaagctgggactgtgcctgagaaggaaatcttctgccaatgtggggttaataaatgtagaaaaaaaatattataaatatgtaactaacgcctgtttgtgaaattagcttatcaggctgaaattaaagccatgcaaaagaaggtctaggtccatcaaggaaattcccctccgttttcctttgtcatggggtttatgttttatttcagattttatttgtgtgacttagaaattccaggaacacaattaggatattttcatacacatagggtatcttgttcactgctgtgctactttacatgagtaggatggaagtgtatattttatatgaaataccactgtacaatttataatttatttacaaattatatattaagagaaacaaatgtcataacagaactcagctgtttctaattgcttttgtgactgttaccttttagttcatgcccccccaaagagctaaatttcacatttttacctacaaaattgatttttaattcctggcaaataatttaccattatgagctacaaggtgggcaacagcgcctgaggatctaattttatgcatattactcccaagtattttaacacttgttggagaagcaatatctggatcgataaaacactgtcccatcaaccatttgagtggggagagggagaagctcttctgtaagtaagattctggcaagctctttgaaatgagtcttctttcccacagattttctctactctttctatacaaacagataggagaagagggaatagaaacctggaggaacttgaatatttttgttctagatagagatacagttactgaaaaggaaacctagaaagtagtcacacgttgcttatttaggccagaagtaattgtactgggcaaaaatttcacttaaaaaacacaagaagtccaggtatggtggctcagacctgtaatcccagcactttgagaggccgaggcaggtggattacttgagcctaggggttcaagaccagcttgggcaacatgtcaaaaccctgtctctacaaaaaatacaaaaattagcctggcatgatggcatgtgcccgtagtctcagctactcaggagtgaggtgggaggatcatttgagctcagaaggtcaaggctgcaatgagacataatttcaccatagtacttccagcctgggcaatagagcaagactctctctcaaaaaaaacagcacacacacacacacacgaaaacaattctgaactatgaaatctgaaacagccccttggtatctcctgggcatgatttgcaaatcttttttttttacagaaaaaaggcaaagagtaagcactttgccataggttacttggccgtgatcatctatctagtggaaaaggggactgggaagcccaagcagactgggaaaccagacagctaggaaaaggagcaaaacatagcccagcaacctacagatgaagaaagttgagaaatccatttattcaccatagagacgcaggaatttcaggcaatgcactaaaatgaaatgggggaaaaaagcttgatcagtatgggaaccatttttgtgcaaaagggaatattatggatcagccagtatttctttgagctctgcctgtggagtccatttgacctttagaaatatgaggtattctgtcagttttatcttcttggagaaatttctcctaaaatcttgatttgctttagtctggactggttcatagccatcatcttccatcagtaccccagagattcactttgtctcttatgtgggatctgtttccagttagatgccattattttccttttccttggtttactcttccacatattggtaaagctcttccaatagcttttggaaaggaaaaatgaaaagtaaatgttttgaatctctgtgtgtttgacaatgtctttattttacccttatacctgattgctgttttggttggcaaggtataggattctttagtggtctccatgcccagttttgaagacatctgctagctttcagtgctgttgctgtggagtctgaaaatctgtcttctggcttccagggtgactactggaaattgaatgccattctgttccttctcttttgcatatataatccatttttatctctcttgaagcttataggtttatctttgtctcaatgttctgtccctgttaagagtccattttcatcctttgtactaggtgcctggtgggatcattccgtctgaaactaatgatttcccatctcttcactgtttctggaattcctgttttccagatgttagacctccagaatttgatctctaattttcctatcttttctcttaactttcagctctgtcttcttgctaggaccttttcctaggagcatttctcaatttaatcttccagttcatctgttgcattttatttttctagtctcatattgtctcatatttttaatttctaagagctccccttctccgaatattctttttttttaatagcatcctattttggctcatggttgcagtattttatctccttgaagatgtttgtgtgtttatgtatgtatatgcacacacgtatacatacacatacaggcatgcatctctgtattctttcggcataatctgtgtcctccagggtttgtttctttgtttcccctgtatgtttgttttggtcgttcacattataggctttcctcagagttaatggtcttggtagtctactcatatttaagtgtggaacaccaaaaagcttactataagctgagagtgtggtaaagggctctttgttttactatgacctacctgagctatcttgctggggaacaccctaatgtcagtctctttataaagggcctttcattttggcctggcaagaaatactctttcatcctcctgcatggagggcaaaaaaaaatttaaaaattggctgctagggtctgtctgctcacttccctgttttgcagaccccacactcttctgcaattcatttcatagttgtcaagactatacaaattgtcctttttaatgttctctcttctgctatccctagttggcagtcttcctctttacaacctgctgaaagtggaagacctccagttttcctttaattcctcagcaaaccaccaactattatatgtcttttttccagaacaacttattttttaactataattatatgcatttatgttagattcactgaaaacctcatcttgtatggtgctctgtaccctatgggtgctaaataaaggcttgctactggcaactgga

SEQ ID NO: 180854 - DNA, 5313 bp, Homo sapiens
  Payload ID: 15615
  Gene Symbol: SETDB2
  Gene Name: SET domain, bifurcated 2
  ENST ID: ENST00000611815
  CDS Start-End: 1-2160
atgggtaagaaaccaagcgatgcaaaaactttctggatggagctagaagatgatggaaaagtggacttcatttttgaacaagtacaaaatgtgctgcagtcactgaaacaaaagatcaaagatgggtctgccaccaataaagaatacatccaagcaatgattctagtgaatgaagcaactataattaacagttcaacatcaataaagggagcatcacagaaagaagtgaatgcccaaagcagtgatcctatgcctgtgactcagaaggaacaggaaaacaaatccaatgcatttccctctacatcatgtgaaaactcctttccagaagactgtacatttctaacaacagaaaataaggaaattctctctcttgaagataaagttgtagactttagagaaaaagactcatcttcgaatttatcttaccaaagtcatgactgctctggtgcttgtctgatgaaaatgccactgaacttgaagggagaaaaccctctgcagctgccaatcaaatgtcacttccaaagacgacatgcaaagacaaactctcattcttcagcactccacgtgagttataaaaccccttgtggaaggagtctacgaaacgtggaggaagtttttcgttacctgcttgagacagagtgtaactttttatttacagataacttttctttcaatacctatgttcagttggctcggaattacccaaagcaaaaagaagttgtttctgatgtggatattagcaatggagtggaatcagtgcccatttctttctgtaatgaaattgacagtagaaagctcccacagtttaagtacagaaagactgtgtggcctcgagcatataatctaaccaacttttccagcatgtttactgattcctgtgactgctctgagggctgcatagacataacaaaatgtgcatgtcttcaactgacagcaaggaatgccaaaacttcccccttgtcaagtgacaaaataaccactggatataaatataaaagactacagagacagattcctactggcatttatgaatgcagccttttgtgcaaatgtaatcgacaattgtgtcaaaaccgagttgtccaacatggtcctcaagtgaggttacaggtgttcaaaactgagcagaagggatggggtgtacgctgtctagatgacattgacagagggacatttgtttgcatttattcaggaagattactaagcagagctaacactgaaaaatcttatggtattgatgaaaacgggagagatgagaatactatgaaaaatatattttcaaaaaagaggaaattagaagttgcatgttcagattgtgaagttgaagttctcccattaggattggaaacacatcctagaactgctaaaactgagaaatgtccaccaaagttcagtaataatcccaaggagcttactgtggaaacgaaatatgataatatttcaagaattcaatatcattcagttattagagatcctgaatccaagacagccatttttcaacacaatgggaaaaaaatggaatttgtttcctcggagtctgtcactccagaagataatgatggatttaaaccaccccgagagcatctgaactctaaaaccaagggagcacaaaaggactcaagttcaaaccatgttgatgagtttgaagataatctgctgattgaatcagatgtgatagatataactaaatatagagaagaaactccaccaaggagcagatgtaaccaggcgaccacattggataatcagaatattaaaaaggcaattgaggttcaaattcagaaaccccaagagggacgatctacagcatgtcaaagacagcaggtattttgtgatgaagagttgctaagtgaaaccaagaatacttcatctgattctctaacaaagttcaataaagggaatgtgtttttattggatgccacaaaagaaggaaatgtcggccgcttccttaatcatagttgttgcccaaatctcttggtacagaatgtttttgtagaaacacacaacaggaattttccattggtggcattcttcaccaacaggtatgtgaaagcaagaacagagctaacatgggattatggctatgaagctgggactgtgcctgagaaggaaatcttctgccaatgtggggttaataaatgtagaaaaaaaatattataaatatgtaactaacgcctgtttgtgaaattagcttatcaggctgaaattaaagccatgcaaaagaaggtctaggtccatcaaggaaattcccctccgttttcctttgtcatggggtttatgttttatttcagattttatttgtgtgacttagaaattccaggaacacaattaggatattttcatacacatagggtatcttgttcactgctgtgctactttacatgagtaggatggaagtgtatattttatatgaaataccactgtacaatttataatttatttacaaattatatattaagagaaacaaatgtcataacagaactcagctgtttctaattgcttttgtgactgttaccttttagttcatgcccccccaaagagctaaatttcacatttttacctacaaaattgatttttaattcctggcaaataatttaccattatgagctacaaggtgggcaacagcgcctgaggatctaattttatgcatattactcccaagtattttaacacttgttggagaagcaatatctggatcgataaaacactgtcccatcaaccatttgagtggggagagggagaagctcttctgtaagtaagattctggcaagctctttgaaatgagtcttctttcccacagattttctctactctttctatacaaacagataggagaagagggaatagaaacctggaggaacttgaatatttttgttctagatagagatacagttactgaaaaggaaacctagaaagtagtcacacgttgcttatttaggccagaagtaattgtactgggcaaaaatttcacttaaaaaacacaagaagtccaggtatggtggctcagacctgtaatcccagcactttgagaggccgaggcaggtggattacttgagcctaggggttcaagaccagcttgggcaacatgtcaaaaccctgtctctacaaaaaatacaaaaattagcctggcatgatggcatgtgcccgtagtctcagctactcaggagtgaggtgggaggatcatttgagctcagaaggtcaaggctgcaatgagacataatttcaccatagtacttccagcctgggcaatagagcaagactctctctcaaaaaaaacagcacacacacacacacacgaaaacaattctgaactatgaaatctgaaacagccccttggtatctcctgggcatgatttgcaaatcttttttttttacagaaaaaaggcaaagagtaagcactttgccataggttacttggccgtgatcatctatctagtggaaaaggggactgggaagcccaagcagactgggaaaccagacagctaggaaaaggagcaaaacatagcccagcaacctacagatgaagaaagttgagaaatccatttattcaccatagagacgcaggaatttcaggcaatgcactaaaatgaaatgggggaaaaaagcttgatcagtatgggaaccatttttgtgcaaaagggaatattatggatcagccagtatttctttgagctctgcctgtggagtccatttgacctttagaaatatgaggtattctgtcagttttatcttcttggagaaatttctcctaaaatcttgatttgctttagtctggactggttcatagccatcatcttccatcagtaccccagagattcactttgtctcttatgtgggatctgtttccagttagatgccattattttccttttccttggtttactcttccacatattggtaaagctcttccaatagcttttggaaaggaaaaatgaaaagtaaatgttttgaatctctgtgtgtttgacaatgtctttattttacccttatacctgattgctgttttggttggcaaggtataggattctttagtggtctccatgcccagttttgaagacatctgctagctttcagtgctgttgctgtggagtctgaaaatctgtcttctggcttccagggtgactactggaaattgaatgccattctgttccttctcttttgcatatataatccatttttatctctcttgaagcttataggtttatctttgtctcaatgttctgtccctgttaagagtccattttcatcctttgtactaggtgcctggtgggatcattccgtctgaaactaatgatttcccatctcttcactgtttctggaattcctgttttccagatgttagacctccagaatttgatctctaattttcctatcttttctcttaactttcagctctgtcttcttgctaggaccttttcctaggagcatttctcaatttaatcttccagttcatctgttgcattttatttttctagtctcatattgtctcatatttttaatttctaagagctccccttctccgaatattctttttttttaatagcatcctattttggctcatggttgcagtattttatctccttgaagatgtttgtgtgtttatgtatgtatatgcacacacgtatacatacacatacaggcatgcatctctgtattctttcggcataatctgtgtcctccagggtttgtttctttgtttcccctgtatgtttgttttggtcgttcacattataggctttcctcagagttaatggtcttggtagtctactcatatttaagtgtggaacaccaaaaagcttactataagctgagagtgtggtaaagggctctttgttttactatgacctacctgagctatcttgctggggaacaccctaatgtcagtctctttataaagggcctttcattttggcctggcaagaaatactctttcatcctcctgcatggagggcaaaaaaaaatttaaaaattggctgctagggtctgtctgctcacttccctgttttgcagaccccacactcttctgcaattcatttcatagttgtcaagactatacaaattgtcctttttaatgttctctcttctgctatccctagttggcagtcttcctctttacaacctgctgaaagtggaagacctccagttttcctttaattcctcagcaaaccaccaactattatatgtcttttttccagaacaacttattttttaactataattatatgcatttatgttagattcactgaaaacctcatcttgtatggtgctctgtaccctatgggtgctaaataaaggcttgctactggcaactgg

SEQ ID NO: 180855 - DNA, 2915 bp, Homo sapiens
  Payload ID: 15616
  Gene Symbol: SET
  Gene Name: SET nuclear proto-oncogene
  Uniprot ID: Q01105
  ENST ID: ENST00000322030
  CDS Start-End: 358-1191
cgccgtaggaggaggtggaggaggaggcggctcgggagagcgagcagcgagctggctggatcgccgagcgcgagtgagggagccgagccgcccgccgccgccgcctccgcctcccctccgcgaacaggagcccgggccggggcccggcacgccgccccagcccgtccctcggcgtcaggccgcgagggtagcgcgcgcgagcgagcgagggggagggagagcgagcgagcgccgggaggaggcggccggaccgagcgggcgcccgcgcgtgtggcgtgaggggaagccgcttgcccgcccccttcgccttcccttctctccccctccccgctccccccccgaccgcggagcagcaccatgtcggcgccggcggccaaagtcagtaaaaaggagctcaactccaaccacgacggggccgacgagacctcagaaaaagaacagcaagaagcgattgaacacattgatgaagtacaaaatgaaatagacagacttaatgaacaagccagtgaggagattttgaaagtagaacagaaatataacaaactccgccaaccattttttcagaagaggtcagaattgatcgccaaaatcccaaatttttgggtaacaacatttgtcaaccatccacaagtgtctgcactgcttggggaggaagatgaagaggcactgcattatttgaccagagttgaagtgacagaatttgaagatattaaatcaggttacagaatagatttttattttgatgaaaatccttactttgaaaataaagttctctccaaagaatttcatctgaatgagagtggtgatccatcttcgaagtccaccgaaatcaaatggaaatctggaaaggatttgacgaaacgttcgagtcaaacgcagaataaagccagcaggaagaggcagcatgaggaaccagagagcttctttacctggtttactgaccattctgatgcaggtgctgatgagttaggagaggtcatcaaagatgatatttggccaaacccattacagtactacttggttcccgatatggatgatgaagaaggagaaggagaagaagatgatgatgatgatgaagaggaggaaggattagaagatattgacgaagaaggggatgaggatgaaggtgaagaagatgaagatgatgatgaaggggaggaaggagaggaggatgaaggagaagatgactaaatagaacactgatggattccaaccttcctttttttaaattttctccagtccctgggagcaagttgcagtcttttttttttttttttttttttttccctcttgtgctcagtcgccctgttcttgaggtctcttttctctactccatggttctcaatttatttggggggaaataccttgagcagaatacaatgggaaaagagtctctacccctttctgttcgaagttcatttttatcccttcctgtctgaacaaaaactgtatggaatcaacaccaccgagctctgtgggaaaaaagaaaaacctgctcccttcgctctgctggaagctggagggtgctaggcccctgtgtagtagtgcatagaattctagcttttttcctcctttctctgtatattgggctcagagagtacactgtgtctctatgtgaatatggacagttagcatttaccaacatgtatctgtctactttctcttgtttaaaaaaagaaaaaaaaacttaaaaaaatggggttatagaaggtcagcaaagggtgggtttgagatgtttgggtgggttaagtgggcattttgacaacatggcttctcctttggcatgtttaattgtgatatttgacagacatccttgcagtttaagatgacacttttaaaataaattctctcctaatgatgacttgagccctgccactcaatgggagaatcagcagaacctgtaggatcttatttggaattgacattctctattgtaattttgttcctgtttatttttaaattttctttttgtttcactggaaaggaaagatgatgctcagttttaaacgttaaaagtgtacaagttgctttgttacaataaaactaaatgtgtacacaaaggatttgatgcttttctctcagcataggtatgcttactatgaccttccaagtttgacttgtataacatcactgtcaaactttgtcaccctaacttcgtattttttgatacgcactttgcaggatgacctcagggctatgtggattgagtaatgggatttgaatcaatgtattaatatctccatagctgggaaacgtgggttcaatttgccattggtttctgaaagtattcacatcatttgggataccagatagctcaatactctctgagtacattgtgcccttgatttttatctccaagtggcagtttttaaaattggccttttacctggatataaattaattgtgcctgccaccaccatccaacagacctggtgctctaatgccaagttatacacgggacagttgctggcatgtcttcattggctatataaaatgtggccaagaagataggctctcagtaagaagtctgatggtgagcagtaactgtccctgctttctggtataaagctctcaaatgtgaccatgtgaatctgggtgggataatggactcagctctgtctgctcaatgccattgtgcagagaagcaccctaatgcataagctttttaatgctgtaaaatatagtcgctgaaattaaatgccactttttcagaggtgaattaatggacagtctggtgaacttcaaaagctttttgatgtataaaacttgataaatggaactattccatcaataggcaaaagtgtaacaacctatctagatggatagtatgtaatttctgcacaggtctctgtttagtaaatacatcactgtataccgatcaggaatcttgctccaataaaggaacataaagattt

SEQ ID NO: 180856 - DNA, 1029 bp, Homo sapiens
  Payload ID: 15616
  Gene Symbol: SET
  Gene Name: SET nuclear proto-oncogene
  Uniprot ID: Q01105
  ENST ID: ENST00000372686
  CDS Start-End: 2-799
gatgcctcgctcccatcagccgccgccgccgccacatgaaaaagaacagcaagaagcgattgaacacattgatgaagtacaaaatgaaatagacagacttaatgaacaagccagtgaggagattttgaaagtagaacagaaatataacaaactccgccaaccattttttcagaagaggtcagaattgatcgccaaaatcccaaatttttgggtaacaacatttgtcaaccatccacaagtgtctgcactgcttggggaggaagatgaagaggcactgcattatttgaccagagttgaagtgacagaatttgaagatattaaatcaggttacagaatagatttttattttgatgaaaatccttactttgaaaataaagttctctccaaagaatttcatctgaatgagagtggtgatccatcttcgaagtccaccgaaatcaaatggaaatctggaaaggatttgacgaaacgttcgagtcaaacgcagaataaagccagcaggaagaggcagcatgaggaaccagagagcttctttacctggtttactgaccattctgatgcaggtgctgatgagttaggagaggtcatcaaagatgatatttggccaaacccattacagtactacttggttcccgatatggatgatgaagaaggagaaggagaagaagatgatgatgatgatgaagaggaggaaggattagaagatattgacgaagaaggggatgaggatgaaggtgaagaagatgaagatgatgatgaaggggaggaaggagaggaggatgaaggagaagatgactaaatagaacactgatggattccaaccttcctttttttaaattttctccagtccctgggagcaagttgcagtcttttttttttttttttttttttttccctcttgtgctcagtcgccctgttcttgaggtctcttttctctactccatggttctcaatttatttggggggaaataccttgagcagaatacaatgggaaaagagtctctacccctttctgttcgaagttcattt

SEQ ID NO: 180857 - DNA, 801 bp, Homo sapiens
  Payload ID: 15616
  Gene Symbol: SET
  Gene Name: SET nuclear proto-oncogene
  ENST ID: ENST00000372688
  CDS Start-End: 1-801
atgatgcctcgctcccatcagccgccgccgccgccacatgaaaaagaacagcaagaagcgattgaacacattgatgaagtacaaaatgaaatagacagacttaatgaacaagccagtgaggagattttgaaagtagaacagaaatataacaaactccgccaaccattttttcagaagaggtcagaattgatcgccaaaatcccaaatttttgggtaacaacatttgtcaaccatccacaagtgtctgcactgcttggggaggaagatgaagaggcactgcattatttgaccagagttgaagtgacagaatttgaagatattaaatcaggttacagaatagatttttattttgatgaaaatccttactttgaaaataaagttctctccaaagaatttcatctgaatgagagtggtgatccatcttcgaagtccaccgaaatcaaatggaaatctggaaaggatttgacgaaacgttcgagtcaaacgcagaataaagccagcaggaagaggcagcatgaggaaccagagagcttctttacctggtttactgaccattctgatgcaggtgctgatgagttaggagaggtcatcaaagatgatatttggccaaacccattacagtactacttggttcccgatatggatgatgaagaaggagaaggagaagaagatgatgatgatgatgaagaggaggaaggattagaagatattgacgaagaaggggatgaggatgaaggtgaagaagatgaagatgatgatgaaggggaggaaggagaggaggatgaaggagaagatgactaa

SEQ ID NO: 180858 - DNA, 2850 bp, Homo sapiens
  Payload ID: 15616
  Gene Symbol: SET
  Gene Name: SET nuclear proto-oncogene
  Uniprot ID: Q01105
  ENST ID: ENST00000372692
  CDS Start-End: 242-1114
gtgcccctgcagagcgaggcagagagcaactaaaagaaatttctcctgattggagggtgggtgggatgaggctgggggagggggccggggtgtgtgtcccactgtcatgtaaatatcccttccaggcagggcggctccagtgcagatttaagccgctggcacctggggcagtctcagtgttcagcctgcttccggacgggcgaggagactcgtggtctggttctgggacttccctaacagcatggcccctaaacgccagtctccactcccgcctcaaaagaagaaaccaagaccacctcctgctctgggaccggaggagacatcggcctctgcaggcttgccgaagaagggagaaaaagaacagcaagaagcgattgaacacattgatgaagtacaaaatgaaatagacagacttaatgaacaagccagtgaggagattttgaaagtagaacagaaatataacaaactccgccaaccattttttcagaagaggtcagaattgatcgccaaaatcccaaatttttgggtaacaacatttgtcaaccatccacaagtgtctgcactgcttggggaggaagatgaagaggcactgcattatttgaccagagttgaagtgacagaatttgaagatattaaatcaggttacagaatagatttttattttgatgaaaatccttactttgaaaataaagttctctccaaagaatttcatctgaatgagagtggtgatccatcttcgaagtccaccgaaatcaaatggaaatctggaaaggatttgacgaaacgttcgagtcaaacgcagaataaagccagcaggaagaggcagcatgaggaaccagagagcttctttacctggtttactgaccattctgatgcaggtgctgatgagttaggagaggtcatcaaagatgatatttggccaaacccattacagtactacttggttcccgatatggatgatgaagaaggagaaggagaagaagatgatgatgatgatgaagaggaggaaggattagaagatattgacgaagaaggggatgaggatgaaggtgaagaagatgaagatgatgatgaaggggaggaaggagaggaggatgaaggagaagatgactaaatagaacactgatggattccaaccttcctttttttaaattttctccagtccctgggagcaagttgcagtcttttttttttttttttttttttttccctcttgtgctcagtcgccctgttcttgaggtctcttttctctactccatggttctcaatttatttggggggaaataccttgagcagaatacaatgggaaaagagtctctacccctttctgttcgaagttcatttttatcccttcctgtctgaacaaaaactgtatggaatcaacaccaccgagctctgtgggaaaaaagaaaaacctgctcccttcgctctgctggaagctggagggtgctaggcccctgtgtagtagtgcatagaattctagcttttttcctcctttctctgtatattgggctcagagagtacactgtgtctctatgtgaatatggacagttagcatttaccaacatgtatctgtctactttctcttgtttaaaaaaagaaaaaaaaacttaaaaaaatggggttatagaaggtcagcaaagggtgggtttgagatgtttgggtgggttaagtgggcattttgacaacatggcttctcctttggcatgtttaattgtgatatttgacagacatccttgcagtttaagatgacacttttaaaataaattctctcctaatgatgacttgagccctgccactcaatgggagaatcagcagaacctgtaggatcttatttggaattgacattctctattgtaattttgttcctgtttatttttaaattttctttttgtttcactggaaaggaaagatgatgctcagttttaaacgttaaaagtgtacaagttgctttgttacaataaaactaaatgtgtacacaaaggatttgatgcttttctctcagcataggtatgcttactatgaccttccaagtttgacttgtataacatcactgtcaaactttgtcaccctaacttcgtattttttgatacgcactttgcaggatgacctcagggctatgtggattgagtaatgggatttgaatcaatgtattaatatctccatagctgggaaacgtgggttcaatttgccattggtttctgaaagtattcacatcatttgggataccagatagctcaatactctctgagtacattgtgcccttgatttttatctccaagtggcagtttttaaaattggccttttacctggatataaattaattgtgcctgccaccaccatccaacagacctggtgctctaatgccaagttatacacgggacagttgctggcatgtcttcattggctatataaaatgtggccaagaagataggctctcagtaagaagtctgatggtgagcagtaactgtccctgctttctggtataaagctctcaaatgtgaccatgtgaatctgggtgggataatggactcagctctgtctgctcaatgccattgtgcagagaagcaccctaatgcataagctttttaatgctgtaaaatatagtcgctgaaattaaatgccactttttcagaggtgaattaatggacagtctggtgaacttcaaaagctttttgatgtataaaacttgataaatggaactattccatcaataggcaaaagtgtaacaacctatctagatggatagtatgtaatttctgcacaggtctctgtttagtaaatacatcactgtataccgatcaggaatcttgctccaataaaggaacataaagattttttttggactgg

SEQ ID NO: 180859 - DNA, 962 bp, Homo sapiens
  Payload ID: 15616
  Gene Symbol: SET
  Gene Name: SET nuclear proto-oncogene
  Uniprot ID: Q01105
  ENST ID: ENST00000409104
  CDS Start-End: 86-892
aagaagcactgaggaggagtcctacctcagggctcagtgtggacctgttggcacttttactgggtctcagtcccttttcctccacatgggatgcagagacctcctgcccagcttgaaacctaccttgctggaaaaagaacagcaagaagcgattgaacacattgatgaagtacaaaatgaaatagacagacttaatgaacaagccagtgaggagattttgaaagtagaacagaaatataacaaactccgccaaccattttttcagaagaggtcagaattgatcgccaaaatcccaaatttttgggtaacaacatttgtcaaccatccacaagtgtctgcactgcttggggaggaagatgaagaggcactgcattatttgaccagagttgaagtgacagaatttgaagatattaaatcaggttacagaatagatttttattttgatgaaaatccttactttgaaaataaagttctctccaaagaatttcatctgaatgagagtggtgatccatcttcgaagtccaccgaaatcaaatggaaatctggaaaggatttgacgaaacgttcgagtcaaacgcagaataaagccagcaggaagaggcagcatgaggaaccagagagcttctttacctggtttactgaccattctgatgcaggtgctgatgagttaggagaggtcatcaaagatgatatttggccaaacccattacagtactacttggttcccgatatggatgatgaagaaggagaaggagaagaagatgatgatgatgatgaagaggaggaaggattagaagatattgacgaagaaggggatgaggatgaaggtgaagaagatgaagatgatgatgaaggggaggaaggagaggaggatgaaggagaagatgactaaatagaacactgatggattccaaccttcctttttttaaattttctccagtccctgggagcaagttgcagtc

SEQ ID NO: 180860 - DNA, 235 bp, Homo sapiens
  Payload ID: 15616
  Gene Symbol: SET
  Gene Name: SET nuclear proto-oncogene
  ENST ID: ENST00000454747
  CDS Start-End: 140-235
actgaggaatgttccaagcttaggcagggcggctccagtgcagatttaagccgctggcacctggggcagtctcagtgttcagcctgcttccggacgggcgaggagactcgtggtctggttctgggacttccctaacagcatggcccctaaacgccagtctccactcccgcctcaaaagaagaaaccaagaccacctcctgctctgggaccggaggagacatcggcctctgcaggc

SEQ ID NO: 180861 - DNA, 909 bp, Homo sapiens
  Payload ID: 15617
  Gene Symbol: SETSIP
  Gene Name: SET-like protein
  Uniprot ID: P0DME0
  ENST ID: ENST00000596516
  CDS Start-End: 1-909
atggtctggttcttggacttccctaacagcatggcccctaaacgccagtctccactcccacttcaaaagaagaaaccaagaccacctcctgctctgggactggaggagacatcggcctctgcaggcttgccgaagaagggagaaaaagaacagcaagaagcaattgaacacattgatgaagtacaaaatgaaatagacagacttaatgaacaagacagtgaggagattttgaaagtagaacagaaatataacaaactccgccaaccattttttcagaagaggtcagaattgatcgccaaaatcccaaattttggggtaacaacatttgtcaaccatccacaagtgtcttcactgcttggggaggaggacgaagaggcactgcattatttgactaaagttgaagtgacagaatttgaagatattaaatcaggttacagaatagatttttattttgatgaaaatccttactttgaaaataaagttttctccaaagaatttcatctgaatgagagtggtgatccatcttcaaagtccaccaaaatcaaatggaaatctggaaaggatgtgacgaaacgttcaagtcaaacgcagaataaagccagcaggaagaggcagcatgaggaaccagagagcttctttacctggtttactgatcattctgatgcaggtgctgatgagttagaagaggtcatcaaagatgatatttggccaaacccattacagtattacttggttcctgatatggatgatgaagaaggaggagaagatgatgatgatgatgatgatgatggtgatgaaggggaggaagaattagaagatattgatgaaggggatgaggatgaaggtgaagaagatgaagatgatgatgaaggggaggaaggagaggaggatgaaggagaagatgactaa

SEQ ID NO: 180862 - DNA, 879 bp, Homo sapiens
  Payload ID: 15617
  Gene Symbol: SETSIP
  Gene Name: SET-like protein
  ENST ID: ENST00000485873
  CDS Start-End: 1-879
atggcccctaaacgccagtctccactcccacttcaaaagaagaaaccaagaccacctcctgctctgggactggaggagacatcggcctctgcaggcttgccgaagaagggagaaaaagaacagcaagaagcaattgaacacattgatgaagtacaaaatgaaatagacagacttaatgaacaagacagtgaggagattttgaaagtagaacagaaatataacaaactccgccaaccattttttcagaagaggtcagaattgatcgccaaaatcccaaattttggggtaacaacatttgtcaaccatccacaagtgtcttcactgcttggggaggaggacgaagaggcactgcattatttgactaaagttgaagtgacagaatttgaagatattaaatcaggttacagaatagatttttattttgatgaaaatccttactttgaaaataaagttttctccaaagaatttcatctgaatgagagtggtgatccatcttcaaagtccaccaaaatcaaatggaaatctggaaaggatgtgacgaaacgttcaagtcaaacgcagaataaagccagcaggaagaggcagcatgaggaaccagagagcttctttacctggtttactgatcattctgatgcaggtgctgatgagttagaagaggtcatcaaagatgatatttggccaaacccattacagtattacttggttcctgatatggatgatgaagaaggaggagaagatgatgatgatgatgatgatgatggtgatgaaggggaggaagaattagaagatattgatgaaggggatgaggatgaaggtgaagaagatgaagatgatgatgaaggggaggaaggagaggaggatgaaggagaagatgactaa

SEQ ID NO: 180863 - DNA, 3275 bp, Homo sapiens
  Payload ID: 15618
  Gene Symbol: SCMH1
  Gene Name: sex comb on midleg homolog 1 (Drosophila)
  Uniprot ID: Q96GD3
  ENST ID: ENST00000326197
  CDS Start-End: 301-2283
aagctgctgacatcctggatctagggttgtaaagaagattacatgagctaatggatgtgaaaacatcttaaaaactctcaaatacttttcaactttggaggattattatgattttcattctgttcagcggctatactcagactttactctaaaagtcaaatcttctgacattctttgaagtgaagcattctatgaatgtgagctgaagaaatgaatgaaatgaaataatgcagcatctagtgctttttgcatggcccaaaggggctctgtgctgctccactacagaggaaacttcaagaaatgctggtttgctacagtgttttagcttgtgagattctctgggaccttccctgctccatcatggggtcacctctaggtcattttacctgggacaaatacctaaaagaaacatgttcagtcccagcgcctgtccattgcttcaagcagtcctacacacctccaagcaacgagttcaagatcagtatgaaattggaagcacaggaccccaggaacaccacatccacctgtattgccacagtagttggactgacaggtgcccgccttcgcctgcgccttgatgggagcgacaacaaaaatgacttctggcggctggttgactcagctgaaatccagcctattgggaactgtgaaaagaatgggggtatgctacagccacctcttggatttcggctgaatgcgtcttcttggcccatgttccttttgaagacgctaaatggagcagagatggctcccatcaggattttccacaaggagccaccatcgccttcccacaacttcttcaaaatgggaatgaagctagaagctgtggacaggaagaaccctcatttcatttgcccagccactattggggaggttcggggctcagaggtgcttgtcacttttgatgggtggcgaggggcctttgactactggtgccgcttcgactcccgagacatcttccctgtgggctggtgttccttgactggagacaacctgcagcctcctggcaccaaagttgtgattccaaagaatccctatcctgcctccgatgtgaatactgagaagcccagcatccacagcagcaccaaaactgtcttggaacatcaaccagggcagagggggcgtaaaccaggaaagaagcggggccggacacccaagaccctaatttcccatcccatctctgccccatccaagacagctgaacctttgaaattcccaaagaagagaggtcccaaacctggcagcaagaggaaacctcggactttgctgaacccaccacctgcctcaccaacaaccagcactcctgaaccggataccagcactgtaccccaggatgctgccaccatccccagctcagccatgcaggccccaacagtttgtatctacttgaacaagaatggcagcacaggcccccacttagataagaagaaggtccagcaactccctgaccattttggaccagcccgtgcctctgtggtgttgcagcaggctgtccaggcctgtatcgactgtgcttatcaccagaaaaccgtcttcagcttcctcaagcaaggccatggtggtgaggttatctcagccgtgtttgaccgggaacagcataccctcaacctcccagcagtcaacagcatcacctacgtcctccgcttcctggagaaactctgccacaaccttcgtagtgacaatctgtttggcaaccagccctttacacagactcacttgtcactcactgccatagagtacagccacagccacgacaggtacctaccaggtgaaacctttgtcctggggaatagtctggcccgctccttggaaccacactcagactcaatggactctgcctcaaatcccaccaaccttgtcagcacctcccaaaggcaccggcccttgctttcatcctgtggcctcccaccaagcactgcctcagctgtgcgcaggctatgctccaggggagtgttaaaaggatcaaatgaaagaagggatatggaatcattttggaaactaaatcgttccccagggtcggaccgatacctggagagccgcgatgcctctcgactgagtggccgggacccctcctcatggacagtcgaggatgtgatgcagtttgtccgggaagctgatcctcagcttggaccccacgctgacctgtttcgcaaacacgagatcgatggcaaggccctgctgctgctgcgcagtgacatgatgatgaagtacatgggcctgaagctggggcctgcactcaagctctcctaccacattgaccggctgaagcagggcaagttctgaaccaggagaggcagcctagacaaccaagtggcagcaggtgggggcattcttctaggaatgaggggcatcagcccaccccaggcacctcagtggggttccgggccacctcaggactccaagaggctgtgtggagccaccactcctagccacagctgccatgataagtccttccatgaaggactgaggagggagagtgggggtccagggctggtgctgctcttccctcagctctgccggggctctaaggtccctctatttatttctcaaccctggctggcctctcaccaggagtttaggctgaatgccttccacgtgatggaggaaaaggccaactctgtcctggtcttgctgtggcaccccatcgccccacagctcgtaccttctcaccagattcccctgaatccaaactcgtggtgcaaacctctaccttttttacaaaaagatcttattgttaatttattgtttctggcacttgggcaaaccctgtagttaatactcctcccacactagacactgggtttcaggaggagggagactgccctgctttggtcccagagaggccctctgcagataggcgtggcccctcttcagaggacactaccctagggcactttctctttgaggtggagagacccataaagccttgaccacatcactccatatggggaggagaaggatccctgtcaccttctcctctcttcacggggcccttttgcagccctaggcctcatctgtgggaagggagtccctggcttatactgcccccaccacagctccttgccctggccagaactgctgtcgaagaaaatcaggccggaaggccaagaaggcgctaagggggatgggagggcaggttttccaggctggagtcggttccacccactcgcctgtccacaggcttccttgtaagcaagtcagcagcacagctactcacgctgccatctggacttattttatgtcaatctgtttataaataaaaaccaatatagata

SEQ ID NO: 180864 - DNA, 3108 bp, Homo sapiens
  Payload ID: 15618
  Gene Symbol: SCMH1
  Gene Name: sex comb on midleg homolog 1 (Drosophila)
  Uniprot ID: Q96GD3
  ENST ID: ENST00000337495
  CDS Start-End: 170-2116
acatggcggcgggaagagagtgagccgccccgcgcccccgccgcgccctcagatggagaaattagcatacaaagaaactgacttgtcagaagtcagagcaaggtattggtggatccagggataaatcccaaacttcttaacccctagaccggtttttagtccattgactatgcagcctaatgtgatagactggagtgatgttagaaaacacaaatatggtcacctatcagagtctgcatcccaatatcaagaagctgctgacatcctggatctaggtcattttacctgggacaaatacctaaaagaaacatgttcagtcccagcgcctgtccattgcttcaagcagtcctacacacctccaagcaacgagttcaagatcagtatgaaattggaagcacaggaccccaggaacaccacatccacctgtattgccacagtagttggactgacaggtgcccgccttcgcctgcgccttgatgggagcgacaacaaaaatgacttctggcggctggttgactcagctgaaatccagcctattgggaactgtgaaaagaatgggggtatgctacagccacctcttggatttcggctgaatgcgtcttcttggcccatgttccttttgaagacgctaaatggagcagagatggctcccatcaggattttccacaaggagccaccatcgccttcccacaacttcttcaaaatgggaatgaagctagaagctgtggacaggaagaaccctcatttcatttgcccagccactattggggaggttcggggctcagaggtgcttgtcacttttgatgggtggcgaggggcctttgactactggtgccgcttcgactcccgagacatcttccctgtgggctggtgttccttgactggagacaacctgcagcctcctggcaccaaagttgtgattccaaagaatccctatcctgcctccgatgtgaatactgagaagcccagcatccacagcagcaccaaaactgtcttggaacatcaaccagggcagagggggcgtaaaccaggaaagaagcggggccggacacccaagaccctaatttcccatcccatctctgccccatccaagacagctgaacctttgaaattcccaaagaagagaggtcccaaacctggcagcaagaggaaacctcggactttgctgaacccaccacctgcctcaccaacaaccagcactcctgaaccggataccagcactgtaccccaggatgctgccaccatccccagctcagccatgcaggccccaacagtttgtatctacttgaacaagaatggcagcacaggcccccacttagataagaagaaggtccagcaactccctgaccattttggaccagcccgtgcctctgtggtgttgcagcaggctgtccaggcctgtatcgactgtgcttatcaccagaaaaccgtcttcagcttcctcaagcaaggccatggtggtgaggttatctcagccgtgtttgaccgggaacagcataccctcaacctcccagcagtcaacagcatcacctacgtcctccgcttcctggagaaactctgccacaaccttcgtagtgacaatctgtttggcaaccagccctttacacagactcacttgtcactcactgccatagagtacagccacagccacgacaggtacctaccaggtgaaacctttgtcctggggaatagtctggcccgctccttggaaccacactcagactcaatggactctgcctcaaatcccaccaaccttgtcagcacctcccaaaggcaccggcccttgctttcatcctgtggcctcccaccaagcactgcctcagctgtgcgcaggctatgctccagggggtcggaccgatacctggagagccgcgatgcctctcgactgagtggccgggacccctcctcatggacagtcgaggatgtgatgcagtttgtccgggaagctgatcctcagcttggaccccacgctgacctgtttcgcaaacacgagatcgatggcaaggccctgctgctgctgcgcagtgacatgatgatgaagtacatgggcctgaagctggggcctgcactcaagctctcctaccacattgaccggctgaagcagggcaagttctgaaccaggagaggcagcctagacaaccaagtggcagcaggtgggggcattcttctaggaatgaggggcatcagcccaccccaggcacctcagtggggttccgggccacctcaggactccaagaggctgtgtggagccaccactcctagccacagctgccatgataagtccttccatgaaggactgaggagggagagtgggggtccagggctggtgctgctcttccctcagctctgccggggctctaaggtccctctatttatttctcaaccctggctggcctctcaccaggagtttaggctgaatgccttccacgtgatggaggaaaaggccaactctgtcctggtcttgctgtggcaccccatcgccccacagctcgtaccttctcaccagattcccctgaatccaaactcgtggtgcaaacctctaccttttttacaaaaagatcttattgttaatttattgtttctggcacttgggcaaaccctgtagttaatactcctcccacactagacactgggtttcaggaggagggagactgccctgctttggtcccagagaggccctctgcagataggcgtggcccctcttcagaggacactaccctagggcactttctctttgaggtggagagacccataaagccttgaccacatcactccatatggggaggagaaggatccctgtcaccttctcctctcttcacggggcccttttgcagccctaggcctcatctgtgggaagggagtccctggcttatactgcccccaccacagctccttgccctggccagaactgctgtcgaagaaaatcaggccggaaggccaagaaggcgctaagggggatgggagggcaggttttccaggctggagtcggttccacccactcgcctgtccacaggcttccttgtaagcaagtcagcagcacagctactcacgctgccatctggacttattttatgtcaatctgtttataaataaaaaccaatatagata

SEQ ID NO: 180865 - DNA, 2906 bp, Homo sapiens
  Payload ID: 15618
  Gene Symbol: SCMH1
  Gene Name: sex comb on midleg homolog 1 (Drosophila)
  Uniprot ID: Q96GD3
  ENST ID: ENST00000361191
  CDS Start-End: 179-1912
ttaatcttatactttctttccacatgactatttttctctccctctgcagtgatagactggagtgatgttagaaaacacaaatatggtcacctatcagagtctgcatcccaatatcaagaagctgctgacatcctggatctagtcctacacacctccaagcaacgagttcaagatcagtatgaaattggaagcacaggaccccaggaacaccacatccacctgtattgccacagtagttggactgacaggtgcccgccttcgcctgcgccttgatgggagcgacaacaaaaatgacttctggcggctggttgactcagctgaaatccagcctattgggaactgtgaaaagaatgggggtatgctacagccacctcttggatttcggctgaatgcgtcttcttggcccatgttccttttgaagacgctaaatggagcagagatggctcccatcaggattttccacaaggagccaccatcgccttcccacaacttcttcaaaatgggaatgaagctagaagctgtggacaggaagaaccctcatttcatttgcccagccactattggggaggttcggggctcagaggtgcttgtcacttttgatgggtggcgaggggcctttgactactggtgccgcttcgactcccgagacatcttccctgtgggctggtgttccttgactggagacaacctgcagcctcctggcaccaaagttgtgattccaaagaatccctatcctgcctccgatgtgaatactgagaagcccagcatccacagcagcaccaaaactgtcttggaacatcaaccagggcagagggggcgtaaaccaggaaagaagcggggccggacacccaagaccctaatttcccatcccatctctgccccatccaagacagctgaacctttgaaattcccaaagaagagaggtcccaaacctggcagcaagaggaaacctcggactttgctgaacccaccacctgcctcaccaacaaccagcactcctgaaccggataccagcactgtaccccaggatgctgccaccatccccagctcagccatgcaggccccaacagtttgtatctacttgaacaagaatggcagcacaggcccccacttagataagaagaaggtccagcaactccctgaccattttggaccagcccgtgcctctgtggtgttgcagcaggctgtccaggcctgtatcgactgtgcttatcaccagaaaaccgtcttcagcttcctcaagcaaggccatggtggtgaggttatctcagccgtgtttgaccgggaacagcataccctcaacctcccagcagtcaacagcatcacctacgtcctccgcttcctggagaaactctgccacaaccttcgtagtgacaatctgtttggcaaccagccctttacacagactcacttgtcactcactgccatagagtacagccacagccacgacaggtacctaccaggtgaaacctttgtcctggggaatagtctggcccgctccttggaaccacactcagactcaatggactctgcctcaaatcccaccaaccttgtcagcacctcccaaaggcaccggcccttgctttcatcctgtggcctcccaccaagcactgcctcagctgtgcgcaggctatgctccagggggtcggaccgatacctggagagccgcgatgcctctcgactgagtggccgggacccctcctcatggacagtcgaggatgtgatgcagtttgtccgggaagctgatcctcagcttggaccccacgctgacctgtttcgcaaacacgagatcgatggcaaggccctgctgctgctgcgcagtgacatgatgatgaagtacatgggcctgaagctggggcctgcactcaagctctcctaccacattgaccggctgaagcagggcaagttctgaaccaggagaggcagcctagacaaccaagtggcagcaggtgggggcattcttctaggaatgaggggcatcagcccaccccaggcacctcagtggggttccgggccacctcaggactccaagaggctgtgtggagccaccactcctagccacagctgccatgataagtccttccatgaaggactgaggagggagagtgggggtccagggctggtgctgctcttccctcagctctgccggggctctaaggtccctctatttatttctcaaccctggctggcctctcaccaggagtttaggctgaatgccttccacgtgatggaggaaaaggccaactctgtcctggtcttgctgtggcaccccatcgccccacagctcgtaccttctcaccagattcccctgaatccaaactcgtggtgcaaacctctaccttttttacaaaaagatcttattgttaatttattgtttctggcacttgggcaaaccctgtagttaatactcctcccacactagacactgggtttcaggaggagggagactgccctgctttggtcccagagaggccctctgcagataggcgtggcccctcttcagaggacactaccctagggcactttctctttgaggtggagagacccataaagccttgaccacatcactccatatggggaggagaaggatccctgtcaccttctcctctcttcacggggcccttttgcagccctaggcctcatctgtgggaagggagtccctggcttatactgcccccaccacagctccttgccctggccagaactgctgtcgaagaaaatcaggccggaaggccaagaaggcgctaagggggatgggagggcaggttttccaggctggagtcggttccacccactcgcctgtccacaggcttccttgtaagcaagtcagcagcacagctactcacgctgccatctggacttattttatgtcaatctgtttataaataaaaaccaatatagatacc

SEQ ID NO: 180866 - DNA, 3115 bp, Homo sapiens
  Payload ID: 15618
  Gene Symbol: SCMH1
  Gene Name: sex comb on midleg homolog 1 (Drosophila)
  Uniprot ID: Q96GD3
  ENST ID: ENST00000361705
  CDS Start-End: 346-2121
ttaatcttatactttctttccacatgactatttttctctccctctgcagtgatagactggagtgatgttagaaaacacaaatatggtcacctatcagagtctgcatcccaatatcaagaagctgctgacatcctggatctagggttgtaaagaagattacatgagctaatggatgtgaaaacatcttaaaaactctcaaatacttttcaactttggaggattattatgattttcattctgttcagcggctatactcagactttactctaaaagtcaaatcttctgacattctttgaagtgaagcattctatgaatgtgagctgaagaaatgaatgaaatgaaataatgcagtcctacacacctccaagcaacgagttcaagatcagtatgaaattggaagcacaggaccccaggaacaccacatccacctgtattgccacagtagttggactgacaggtgcccgccttcgcctgcgccttgatgggagcgacaacaaaaatgacttctggcggctggttgactcagctgaaatccagcctattgggaactgtgaaaagaatgggggtatgctacagccacctcttggatttcggctgaatgcgtcttcttggcccatgttccttttgaagacgctaaatggagcagagatggctcccatcaggattttccacaaggagccaccatcgccttcccacaacttcttcaaaatgggaatgaagctagaagctgtggacaggaagaaccctcatttcatttgcccagccactattggggaggttcggggctcagaggtgcttgtcacttttgatgggtggcgaggggcctttgactactggtgccgcttcgactcccgagacatcttccctgtgggctggtgttccttgactggagacaacctgcagcctcctggcaccaaagttgtgattccaaagaatccctatcctgcctccgatgtgaatactgagaagcccagcatccacagcagcaccaaaactgtcttggaacatcaaccagggcagagggggcgtaaaccaggaaagaagcggggccggacacccaagaccctaatttcccatcccatctctgccccatccaagacagctgaacctttgaaattcccaaagaagagaggtcccaaacctggcagcaagaggaaacctcggactttgctgaacccaccacctgcctcaccaacaaccagcactcctgaaccggataccagcactgtaccccaggatgctgccaccatccccagctcagccatgcaggccccaacagtttgtatctacttgaacaagaatggcagcacaggcccccacttagataagaagaaggtccagcaactccctgaccattttggaccagcccgtgcctctgtggtgttgcagcaggctgtccaggcctgtatcgactgtgcttatcaccagaaaaccgtcttcagcttcctcaagcaaggccatggtggtgaggttatctcagccgtgtttgaccgggaacagcataccctcaacctcccagcagtcaacagcatcacctacgtcctccgcttcctggagaaactctgccacaaccttcgtagtgacaatctgtttggcaaccagccctttacacagactcacttgtcactcactgccatagagtacagccacagccacgacaggtacctaccaggtgaaacctttgtcctggggaatagtctggcccgctccttggaaccacactcagactcaatggactctgcctcaaatcccaccaaccttgtcagcacctcccaaaggcaccggcccttgctttcatcctgtggcctcccaccaagcactgcctcagctgtgcgcaggctatgctccagggggtcggaccgatacctggagagccgcgatgcctctcgactgagtggccgggacccctcctcatggacagtcgaggatgtgatgcagtttgtccgggaagctgatcctcagcttggaccccacgctgacctgtttcgcaaacacgagatcgatggcaaggccctgctgctgctgcgcagtgacatgatgatgaagtacatgggcctgaagctggggcctgcactcaagctctcctaccacattgaccggctgaagcagggcaagttctgaaccaggagaggcagcctagacaaccaagtggcagcaggtgggggcattcttctaggaatgaggggcatcagcccaccccaggcacctcagtggggttccgggccacctcaggactccaagaggctgtgtggagccaccactcctagccacagctgccatgataagtccttccatgaaggactgaggagggagagtgggggtccagggctggtgctgctcttccctcagctctgccggggctctaaggtccctctatttatttctcaaccctggctggcctctcaccaggagtttaggctgaatgccttccacgtgatggaggaaaaggccaactctgtcctggtcttgctgtggcaccccatcgccccacagctcgtaccttctcaccagattcccctgaatccaaactcgtggtgcaaacctctaccttttttacaaaaagatcttattgttaatttattgtttctggcacttgggcaaaccctgtagttaatactcctcccacactagacactgggtttcaggaggagggagactgccctgctttggtcccagagaggccctctgcagataggcgtggcccctcttcagaggacactaccctagggcactttctctttgaggtggagagacccataaagccttgaccacatcactccatatggggaggagaaggatccctgtcaccttctcctctcttcacggggcccttttgcagccctaggcctcatctgtgggaagggagtccctggcttatactgcccccaccacagctccttgccctggccagaactgctgtcgaagaaaatcaggccggaaggccaagaaggcgctaagggggatgggagggcaggttttccaggctggagtcggttccacccactcgcctgtccacaggcttccttgtaagcaagtcagcagcacagctactcacgctgccatctggacttattttatgtcaatctgtttataaataaaaaccaatatagatacc

SEQ ID NO: 180867 - DNA, 3231 bp, Homo sapiens
  Payload ID: 15618
  Gene Symbol: SCMH1
  Gene Name: sex comb on midleg homolog 1 (Drosophila)
  Uniprot ID: Q96GD3
  ENST ID: ENST00000372595
  CDS Start-End: 440-2239
caagcagggggcatatttcagcccttttggtgttacagcaactcttttagccacgccgttcagcagatcccgagttcttgtcctgcaaccaggaagaatgaggtacgcagacaagtggagggtgagcaagatgaagaggtgctgtattgagcaatggaacagctcagagaagactcacagtgccagggcgtcccagtgagtgttcagcccctagcaggaaggatagctcctctctgcagtgatagactggagtgatgttagaaaacacaaatatggtcacctatcagagtctgcatcccaatatcaagaagctgctgacatcctggatctaggtcattttacctgggacaaatacctaaaagaaacatgttcagtcccagcgcctgtccattgcttcaagcagtcctacacacctccaagcaacgagttcaagatcagtatgaaattggaagcacaggaccccaggaacaccacatccacctgtattgccacagtagttggactgacaggtgcccgccttcgcctgcgccttgatgggagcgacaacaaaaatgacttctggcggctggttgactcagctgaaatccagcctattgggaactgtgaaaagaatgggggtatgctacagccacctcttggatttcggctgaatgcgtcttcttggcccatgttccttttgaagacgctaaatggagcagagatggctcccatcaggattttccacaaggagccaccatcgccttcccacaacttcttcaaaatgggaatgaagctagaagctgtggacaggaagaaccctcatttcatttgcccagccactattggggaggttcggggctcagaggtgcttgtcacttttgatgggtggcgaggggcctttgactactggtgccgcttcgactcccgagacatcttccctgtgggctggtgttccttgactggagacaacctgcagcctcctggcaccaaagttgtgattccaaagaatccctatcctgcctccgatgtgaatactgagaagcccagcatccacagcagcaccaaaactgtcttggaacatcaaccagggcagagggggcgtaaaccaggaaagaagcggggccggacacccaagaccctaatttcccatcccatctctgccccatccaagacagctgaacctttgaaattcccaaagaagagaggtcccaaacctggcagcaagaggaaacctcggactttgctgaacccaccacctgcctcaccaacaaccagcactcctgaaccggataccagcactgtaccccaggatgctgccaccatccccagctcagccatgcaggccccaacagtttgtatctacttgaacaagaatggcagcacaggcccccacttagataagaagaaggtccagcaactccctgaccattttggaccagcccgtgcctctgtggtgttgcagcaggctgtccaggcctgtatcgactgtgcttatcaccagaaaaccgtcttcagcttcctcaagcaaggccatggtggtgaggttatctcagccgtgtttgaccgggaacagcataccctcaacctcccagcagtcaacagcatcacctacgtcctccgcttcctggagaaactctgccacaaccttcgtagtgacaatctgtttggcaaccagccctttacacagactcacttgtcactcactgccatagagtacagccacagccacgacaggtacctaccaggtgaaacctttgtcctggggaatagtctggcccgctccttggaaccacactcagactcaatggactctgcctcaaatcccaccaaccttgtcagcacctcccaaaggcaccggcccttgctttcatcctgtggcctcccaccaagcactgcctcagctgtgcgcaggctatgctccaggggagtgttaaaaggatcaaatgaaagaagggatatggaatcattttggaaactaaatcgttccccagggtcggaccgatacctggagagccgcgatgcctctcgactgagtggccgggacccctcctcatggacagtcgaggatgtgatgcagtttgtccgggaagctgatcctcagcttggaccccacgctgacctgtttcgcaaacacgagatcgatggcaaggccctgctgctgctgcgcagtgacatgatgatgaagtacatgggcctgaagctggggcctgcactcaagctctcctaccacattgaccggctgaagcagggcaagttctgaaccaggagaggcagcctagacaaccaagtggcagcaggtgggggcattcttctaggaatgaggggcatcagcccaccccaggcacctcagtggggttccgggccacctcaggactccaagaggctgtgtggagccaccactcctagccacagctgccatgataagtccttccatgaaggactgaggagggagagtgggggtccagggctggtgctgctcttccctcagctctgccggggctctaaggtccctctatttatttctcaaccctggctggcctctcaccaggagtttaggctgaatgccttccacgtgatggaggaaaaggccaactctgtcctggtcttgctgtggcaccccatcgccccacagctcgtaccttctcaccagattcccctgaatccaaactcgtggtgcaaacctctaccttttttacaaaaagatcttattgttaatttattgtttctggcacttgggcaaaccctgtagttaatactcctcccacactagacactgggtttcaggaggagggagactgccctgctttggtcccagagaggccctctgcagataggcgtggcccctcttcagaggacactaccctagggcactttctctttgaggtggagagacccataaagccttgaccacatcactccatatggggaggagaaggatccctgtcaccttctcctctcttcacggggcccttttgcagccctaggcctcatctgtgggaagggagtccctggcttatactgcccccaccacagctccttgccctggccagaactgctgtcgaagaaaatcaggccggaaggccaagaaggcgctaagggggatgggagggcaggttttccaggctggagtcggttccacccactcgcctgtccacaggcttccttgtaagcaagtcagcagcacagctactcacgctgccatctggacttattttatgtcaatctgtttataaataaaaaccaatatagata

SEQ ID NO: 180868 - DNA, 3323 bp, Homo sapiens
  Payload ID: 15618
  Gene Symbol: SCMH1
  Gene Name: sex comb on midleg homolog 1 (Drosophila)
  Uniprot ID: Q96GD3
  ENST ID: ENST00000372596
  CDS Start-End: 598-2331
gcggaaacatggcggcgggaagagagtgagccgccccgcgcccccgccgcgccctcagatggagaaattagcatacaaagaaactgacttgtcagaagtcagagcaaggtattggtggatccagggataaatcccaaacttcttaacccctagaccggtttttagtccattgactatgcagcctaatgtgatagactggagtgatgttagaaaacacaaatatggtcacctatcagagtctgcatcccaatatcaagaagctgctgacatcctggatctagggttgtaaagaagattacatgagctaatggatgtgaaaacatcttaaaaactctcaaatacttttcaactttggaggattattatgattttcattctgttcagcggctatactcagactttactctaaaagtcaaatcttctgacattctttgaagtgaagcattctatgaatgtgagctgaagaaatgaatgaaatgaaataatgcaggtcattttacctgggacaaatacctaaaagaaacatgttcagtcccagcgcctgtccattgcttcaagcagtcctacacacctccaagcaacgagttcaagatcagtatgaaattggaagcacaggaccccaggaacaccacatccacctgtattgccacagtagttggactgacaggtgcccgccttcgcctgcgccttgatgggagcgacaacaaaaatgacttctggcggctggttgactcagctgaaatccagcctattgggaactgtgaaaagaatgggggtatgctacagccacctcttggatttcggctgaatgcgtcttcttggcccatgttccttttgaagacgctaaatggagcagagatggctcccatcaggattttccacaaggagccaccatcgccttcccacaacttcttcaaaatgggaatgaagctagaagctgtggacaggaagaaccctcatttcatttgcccagccactattggggaggttcggggctcagaggtgcttgtcacttttgatgggtggcgaggggcctttgactactggtgccgcttcgactcccgagacatcttccctgtgggctggtgttccttgactggagacaacctgcagcctcctggcaccaaagttgtgattccaaagaatccctatcctgcctccgatgtgaatactgagaagcccagcatccacagcagcaccaaaactgtcttggaacatcaaccagggcagagggggcgtaaaccaggaaagaagcggggccggacacccaagaccctaatttcccatcccatctctgccccatccaagacagctgaacctttgaaattcccaaagaagagaggtcccaaacctggcagcaagaggaaacctcggactttgctgaacccaccacctgcctcaccaacaaccagcactcctgaaccggataccagcactgtaccccaggatgctgccaccatccccagctcagccatgcaggccccaacagtttgtatctacttgaacaagaatggcagcacaggcccccacttagataagaagaaggtccagcaactccctgaccattttggaccagcccgtgcctctgtggtgttgcagcaggctgtccaggcctgtatcgactgtgcttatcaccagaaaaccgtcttcagcttcctcaagcaaggccatggtggtgaggttatctcagccgtgtttgaccgggaacagcataccctcaacctcccagcagtcaacagcatcacctacgtcctccgcttcctggagaaactctgccacaaccttcgtagtgacaatctgtttggcaaccagccctttacacagactcacttgtcactcactgccatagagtacagccacagccacgacaggtacctaccaggtgaaacctttgtcctggggaatagtctggcccgctccttggaaccacactcagactcaatggactctgcctcaaatcccaccaaccttgtcagcacctcccaaaggcaccggcccttgctttcatcctgtggcctcccaccaagcactgcctcagctgtgcgcaggctatgctccagggggtcggaccgatacctggagagccgcgatgcctctcgactgagtggccgggacccctcctcatggacagtcgaggatgtgatgcagtttgtccgggaagctgatcctcagcttggaccccacgctgacctgtttcgcaaacacgagatcgatggcaaggccctgctgctgctgcgcagtgacatgatgatgaagtacatgggcctgaagctggggcctgcactcaagctctcctaccacattgaccggctgaagcagggcaagttctgaaccaggagaggcagcctagacaaccaagtggcagcaggtgggggcattcttctaggaatgaggggcatcagcccaccccaggcacctcagtggggttccgggccacctcaggactccaagaggctgtgtggagccaccactcctagccacagctgccatgataagtccttccatgaaggactgaggagggagagtgggggtccagggctggtgctgctcttccctcagctctgccggggctctaaggtccctctatttatttctcaaccctggctggcctctcaccaggagtttaggctgaatgccttccacgtgatggaggaaaaggccaactctgtcctggtcttgctgtggcaccccatcgccccacagctcgtaccttctcaccagattcccctgaatccaaactcgtggtgcaaacctctaccttttttacaaaaagatcttattgttaatttattgtttctggcacttgggcaaaccctgtagttaatactcctcccacactagacactgggtttcaggaggagggagactgccctgctttggtcccagagaggccctctgcagataggcgtggcccctcttcagaggacactaccctagggcactttctctttgaggtggagagacccataaagccttgaccacatcactccatatggggaggagaaggatccctgtcaccttctcctctcttcacggggcccttttgcagccctaggcctcatctgtgggaagggagtccctggcttatactgcccccaccacagctccttgccctggccagaactgctgtcgaagaaaatcaggccggaaggccaagaaggcgctaagggggatgggagggcaggttttccaggctggagtcggttccacccactcgcctgtccacaggcttccttgtaagcaagtcagcagcacagctactcacgctgccatctggacttattttatgtcaatctgtttataaataaaaaccaatatagata

SEQ ID NO: 180869 - DNA, 3252 bp, Homo sapiens
  Payload ID: 15618
  Gene Symbol: SCMH1
  Gene Name: sex comb on midleg homolog 1 (Drosophila)
  Uniprot ID: Q96GD3
  ENST ID: ENST00000372597
  CDS Start-End: 485-2260
gcggaaacatggcggcgggaagagagtgagccgccccgcgcccccgccgcgccctcagatggagaaattagcatacaaagaaactgacttgtcagaagtcagagcaaggtattggtggatccagggataaatcccaaacttcttaacccctagaccggtttttagtccattgactatgcagcctaatgtgatagactggagtgatgttagaaaacacaaatatggtcacctatcagagtctgcatcccaatatcaagaagctgctgacatcctggatctagggttgtaaagaagattacatgagctaatggatgtgaaaacatcttaaaaactctcaaatacttttcaactttggaggattattatgattttcattctgttcagcggctatactcagactttactctaaaagtcaaatcttctgacattctttgaagtgaagcattctatgaatgtgagctgaagaaatgaatgaaatgaaataatgcagtcctacacacctccaagcaacgagttcaagatcagtatgaaattggaagcacaggaccccaggaacaccacatccacctgtattgccacagtagttggactgacaggtgcccgccttcgcctgcgccttgatgggagcgacaacaaaaatgacttctggcggctggttgactcagctgaaatccagcctattgggaactgtgaaaagaatgggggtatgctacagccacctcttggatttcggctgaatgcgtcttcttggcccatgttccttttgaagacgctaaatggagcagagatggctcccatcaggattttccacaaggagccaccatcgccttcccacaacttcttcaaaatgggaatgaagctagaagctgtggacaggaagaaccctcatttcatttgcccagccactattggggaggttcggggctcagaggtgcttgtcacttttgatgggtggcgaggggcctttgactactggtgccgcttcgactcccgagacatcttccctgtgggctggtgttccttgactggagacaacctgcagcctcctggcaccaaagttgtgattccaaagaatccctatcctgcctccgatgtgaatactgagaagcccagcatccacagcagcaccaaaactgtcttggaacatcaaccagggcagagggggcgtaaaccaggaaagaagcggggccggacacccaagaccctaatttcccatcccatctctgccccatccaagacagctgaacctttgaaattcccaaagaagagaggtcccaaacctggcagcaagaggaaacctcggactttgctgaacccaccacctgcctcaccaacaaccagcactcctgaaccggataccagcactgtaccccaggatgctgccaccatccccagctcagccatgcaggccccaacagtttgtatctacttgaacaagaatggcagcacaggcccccacttagataagaagaaggtccagcaactccctgaccattttggaccagcccgtgcctctgtggtgttgcagcaggctgtccaggcctgtatcgactgtgcttatcaccagaaaaccgtcttcagcttcctcaagcaaggccatggtggtgaggttatctcagccgtgtttgaccgggaacagcataccctcaacctcccagcagtcaacagcatcacctacgtcctccgcttcctggagaaactctgccacaaccttcgtagtgacaatctgtttggcaaccagccctttacacagactcacttgtcactcactgccatagagtacagccacagccacgacaggtacctaccaggtgaaacctttgtcctggggaatagtctggcccgctccttggaaccacactcagactcaatggactctgcctcaaatcccaccaaccttgtcagcacctcccaaaggcaccggcccttgctttcatcctgtggcctcccaccaagcactgcctcagctgtgcgcaggctatgctccagggggtcggaccgatacctggagagccgcgatgcctctcgactgagtggccgggacccctcctcatggacagtcgaggatgtgatgcagtttgtccgggaagctgatcctcagcttggaccccacgctgacctgtttcgcaaacacgagatcgatggcaaggccctgctgctgctgcgcagtgacatgatgatgaagtacatgggcctgaagctggggcctgcactcaagctctcctaccacattgaccggctgaagcagggcaagttctgaaccaggagaggcagcctagacaaccaagtggcagcaggtgggggcattcttctaggaatgaggggcatcagcccaccccaggcacctcagtggggttccgggccacctcaggactccaagaggctgtgtggagccaccactcctagccacagctgccatgataagtccttccatgaaggactgaggagggagagtgggggtccagggctggtgctgctcttccctcagctctgccggggctctaaggtccctctatttatttctcaaccctggctggcctctcaccaggagtttaggctgaatgccttccacgtgatggaggaaaaggccaactctgtcctggtcttgctgtggcaccccatcgccccacagctcgtaccttctcaccagattcccctgaatccaaactcgtggtgcaaacctctaccttttttacaaaaagatcttattgttaatttattgtttctggcacttgggcaaaccctgtagttaatactcctcccacactagacactgggtttcaggaggagggagactgccctgctttggtcccagagaggccctctgcagataggcgtggcccctcttcagaggacactaccctagggcactttctctttgaggtggagagacccataaagccttgaccacatcactccatatggggaggagaaggatccctgtcaccttctcctctcttcacggggcccttttgcagccctaggcctcatctgtgggaagggagtccctggcttatactgcccccaccacagctccttgccctggccagaactgctgtcgaagaaaatcaggccggaaggccaagaaggcgctaagggggatgggagggcaggttttccaggctggagtcggttccacccactcgcctgtccacaggcttccttgtaagcaagtcagcagcacagctactcacgctgccatctggacttattttatgtcaatctgtttataaataaaaaccaatatagata

SEQ ID NO: 180870 - DNA, 3186 bp, Homo sapiens
  Payload ID: 15618
  Gene Symbol: SCMH1
  Gene Name: sex comb on midleg homolog 1 (Drosophila)
  Uniprot ID: Q96GD3
  ENST ID: ENST00000397171
  CDS Start-End: 459-2192
ttaatcttatactttctttccacatgactatttttctctccctctgcagtgatagactggagtgatgttagaaaacacaaatatggtcacctatcagagtctgcatcccaatatcaagaagctgctgacatcctggatctagggttgtaaagaagattacatgagctaatggatgtgaaaacatcttaaaaactctcaaatacttttcaactttggaggattattatgattttcattctgttcagcggctatactcagactttactctaaaagtcaaatcttctgacattctttgaagtgaagcattctatgaatgtgagctgaagaaatgaatgaaatgaaataatgcaggtcattttacctgggacaaatacctaaaagaaacatgttcagtcccagcgcctgtccattgcttcaagcagtcctacacacctccaagcaacgagttcaagatcagtatgaaattggaagcacaggaccccaggaacaccacatccacctgtattgccacagtagttggactgacaggtgcccgccttcgcctgcgccttgatgggagcgacaacaaaaatgacttctggcggctggttgactcagctgaaatccagcctattgggaactgtgaaaagaatgggggtatgctacagccacctcttggatttcggctgaatgcgtcttcttggcccatgttccttttgaagacgctaaatggagcagagatggctcccatcaggattttccacaaggagccaccatcgccttcccacaacttcttcaaaatgggaatgaagctagaagctgtggacaggaagaaccctcatttcatttgcccagccactattggggaggttcggggctcagaggtgcttgtcacttttgatgggtggcgaggggcctttgactactggtgccgcttcgactcccgagacatcttccctgtgggctggtgttccttgactggagacaacctgcagcctcctggcaccaaagttgtgattccaaagaatccctatcctgcctccgatgtgaatactgagaagcccagcatccacagcagcaccaaaactgtcttggaacatcaaccagggcagagggggcgtaaaccaggaaagaagcggggccggacacccaagaccctaatttcccatcccatctctgccccatccaagacagctgaacctttgaaattcccaaagaagagaggtcccaaacctggcagcaagaggaaacctcggactttgctgaacccaccacctgcctcaccaacaaccagcactcctgaaccggataccagcactgtaccccaggatgctgccaccatccccagctcagccatgcaggccccaacagtttgtatctacttgaacaagaatggcagcacaggcccccacttagataagaagaaggtccagcaactccctgaccattttggaccagcccgtgcctctgtggtgttgcagcaggctgtccaggcctgtatcgactgtgcttatcaccagaaaaccgtcttcagcttcctcaagcaaggccatggtggtgaggttatctcagccgtgtttgaccgggaacagcataccctcaacctcccagcagtcaacagcatcacctacgtcctccgcttcctggagaaactctgccacaaccttcgtagtgacaatctgtttggcaaccagccctttacacagactcacttgtcactcactgccatagagtacagccacagccacgacaggtacctaccaggtgaaacctttgtcctggggaatagtctggcccgctccttggaaccacactcagactcaatggactctgcctcaaatcccaccaaccttgtcagcacctcccaaaggcaccggcccttgctttcatcctgtggcctcccaccaagcactgcctcagctgtgcgcaggctatgctccagggggtcggaccgatacctggagagccgcgatgcctctcgactgagtggccgggacccctcctcatggacagtcgaggatgtgatgcagtttgtccgggaagctgatcctcagcttggaccccacgctgacctgtttcgcaaacacgagatcgatggcaaggccctgctgctgctgcgcagtgacatgatgatgaagtacatgggcctgaagctggggcctgcactcaagctctcctaccacattgaccggctgaagcagggcaagttctgaaccaggagaggcagcctagacaaccaagtggcagcaggtgggggcattcttctaggaatgaggggcatcagcccaccccaggcacctcagtggggttccgggccacctcaggactccaagaggctgtgtggagccaccactcctagccacagctgccatgataagtccttccatgaaggactgaggagggagagtgggggtccagggctggtgctgctcttccctcagctctgccggggctctaaggtccctctatttatttctcaaccctggctggcctctcaccaggagtttaggctgaatgccttccacgtgatggaggaaaaggccaactctgtcctggtcttgctgtggcaccccatcgccccacagctcgtaccttctcaccagattcccctgaatccaaactcgtggtgcaaacctctaccttttttacaaaaagatcttattgttaatttattgtttctggcacttgggcaaaccctgtagttaatactcctcccacactagacactgggtttcaggaggagggagactgccctgctttggtcccagagaggccctctgcagataggcgtggcccctcttcagaggacactaccctagggcactttctctttgaggtggagagacccataaagccttgaccacatcactccatatggggaggagaaggatccctgtcaccttctcctctcttcacggggcccttttgcagccctaggcctcatctgtgggaagggagtccctggcttatactgcccccaccacagctccttgccctggccagaactgctgtcgaagaaaatcaggccggaaggccaagaaggcgctaagggggatgggagggcaggttttccaggctggagtcggttccacccactcgcctgtccacaggcttccttgtaagcaagtcagcagcacagctactcacgctgccatctggacttattttatgtcaatctgtttataaataaaaaccaatatagatacc

SEQ ID NO: 180871 - DNA, 2977 bp, Homo sapiens
  Payload ID: 15618
  Gene Symbol: SCMH1
  Gene Name: sex comb on midleg homolog 1 (Drosophila)
  Uniprot ID: Q96GD3
  ENST ID: ENST00000397174
  CDS Start-End: 1-1983
atgctggtttgctacagtgttttagcttgtgagattctctgggaccttccctgctccatcatggggtcacctctaggtcattttacctgggacaaatacctaaaagaaacatgttcagtcccagcgcctgtccattgcttcaagcagtcctacacacctccaagcaacgagttcaagatcagtatgaaattggaagcacaggaccccaggaacaccacatccacctgtattgccacagtagttggactgacaggtgcccgccttcgcctgcgccttgatgggagcgacaacaaaaatgacttctggcggctggttgactcagctgaaatccagcctattgggaactgtgaaaagaatgggggtatgctacagccacctcttggatttcggctgaatgcgtcttcttggcccatgttccttttgaagacgctaaatggagcagagatggctcccatcaggattttccacaaggagccaccatcgccttcccacaacttcttcaaaatgggaatgaagctagaagctgtggacaggaagaaccctcatttcatttgcccagccactattggggaggttcggggctcagaggtgcttgtcacttttgatgggtggcgaggggcctttgactactggtgccgcttcgactcccgagacatcttccctgtgggctggtgttccttgactggagacaacctgcagcctcctggcaccaaagttgtgattccaaagaatccctatcctgcctccgatgtgaatactgagaagcccagcatccacagcagcaccaaaactgtcttggaacatcaaccagggcagagggggcgtaaaccaggaaagaagcggggccggacacccaagaccctaatttcccatcccatctctgccccatccaagacagctgaacctttgaaattcccaaagaagagaggtcccaaacctggcagcaagaggaaacctcggactttgctgaacccaccacctgcctcaccaacaaccagcactcctgaaccggataccagcactgtaccccaggatgctgccaccatccccagctcagccatgcaggccccaacagtttgtatctacttgaacaagaatggcagcacaggcccccacttagataagaagaaggtccagcaactccctgaccattttggaccagcccgtgcctctgtggtgttgcagcaggctgtccaggcctgtatcgactgtgcttatcaccagaaaaccgtcttcagcttcctcaagcaaggccatggtggtgaggttatctcagccgtgtttgaccgggaacagcataccctcaacctcccagcagtcaacagcatcacctacgtcctccgcttcctggagaaactctgccacaaccttcgtagtgacaatctgtttggcaaccagccctttacacagactcacttgtcactcactgccatagagtacagccacagccacgacaggtacctaccaggtgaaacctttgtcctggggaatagtctggcccgctccttggaaccacactcagactcaatggactctgcctcaaatcccaccaaccttgtcagcacctcccaaaggcaccggcccttgctttcatcctgtggcctcccaccaagcactgcctcagctgtgcgcaggctatgctccaggggagtgttaaaaggatcaaatgaaagaagggatatggaatcattttggaaactaaatcgttccccagggtcggaccgatacctggagagccgcgatgcctctcgactgagtggccgggacccctcctcatggacagtcgaggatgtgatgcagtttgtccgggaagctgatcctcagcttggaccccacgctgacctgtttcgcaaacacgagatcgatggcaaggccctgctgctgctgcgcagtgacatgatgatgaagtacatgggcctgaagctggggcctgcactcaagctctcctaccacattgaccggctgaagcagggcaagttctgaaccaggagaggcagcctagacaaccaagtggcagcaggtgggggcattcttctaggaatgaggggcatcagcccaccccaggcacctcagtggggttccgggccacctcaggactccaagaggctgtgtggagccaccactcctagccacagctgccatgataagtccttccatgaaggactgaggagggagagtgggggtccagggctggtgctgctcttccctcagctctgccggggctctaaggtccctctatttatttctcaaccctggctggcctctcaccaggagtttaggctgaatgccttccacgtgatggaggaaaaggccaactctgtcctggtcttgctgtggcaccccatcgccccacagctcgtaccttctcaccagattcccctgaatccaaactcgtggtgcaaacctctaccttttttacaaaaagatcttattgttaatttattgtttctggcacttgggcaaaccctgtagttaatactcctcccacactagacactgggtttcaggaggagggagactgccctgctttggtcccagagaggccctctgcagataggcgtggcccctcttcagaggacactaccctagggcactttctctttgaggtggagagacccataaagccttgaccacatcactccatatggggaggagaaggatccctgtcaccttctcctctcttcacggggcccttttgcagccctaggcctcatctgtgggaagggagtccctggcttatactgcccccaccacagctccttgccctggccagaactgctgtcgaagaaaatcaggccggaaggccaagaaggcgctaagggggatgggagggcaggttttccaggctggagtcggttccacccactcgcctgtccacaggcttccttgtaagcaagtcagcagcacagctactcacgctgccatctggacttattttatgtcaatctgtttataaataaaaaccaatatagatacc

SEQ ID NO: 180872 - DNA, 3204 bp, Homo sapiens
  Payload ID: 15618
  Gene Symbol: SCMH1
  Gene Name: sex comb on midleg homolog 1 (Drosophila)
  Uniprot ID: Q96GD3
  ENST ID: ENST00000402904
  CDS Start-End: 411-2210
gtgatagactggagtgatgttagaaaacacaaatatggtcacctatcagagtctgcatcccaatatcaagaagctgctgacatcctggatctagggttgtaaagaagattacatgagctaatggatgtgaaaacatcttaaaaactctcaaatacttttcaactttggaggattattatgattttcattctgttcagcggctatactcagactttactctaaaagtcaaatcttctgacattctttgaagtgaagcattctatgaatgtgagctgaagaaatgaatgaaatgaaataatgcaggtcattttacctgggacaaatacctaaaagaaacatgttcagtcccagcgcctgtccattgcttcaagcagtcctacacacctccaagcaacgagttcaagatcagtatgaaattggaagcacaggaccccaggaacaccacatccacctgtattgccacagtagttggactgacaggtgcccgccttcgcctgcgccttgatgggagcgacaacaaaaatgacttctggcggctggttgactcagctgaaatccagcctattgggaactgtgaaaagaatgggggtatgctacagccacctcttggatttcggctgaatgcgtcttcttggcccatgttccttttgaagacgctaaatggagcagagatggctcccatcaggattttccacaaggagccaccatcgccttcccacaacttcttcaaaatgggaatgaagctagaagctgtggacaggaagaaccctcatttcatttgcccagccactattggggaggttcggggctcagaggtgcttgtcacttttgatgggtggcgaggggcctttgactactggtgccgcttcgactcccgagacatcttccctgtgggctggtgttccttgactggagacaacctgcagcctcctggcaccaaagttgtgattccaaagaatccctatcctgcctccgatgtgaatactgagaagcccagcatccacagcagcaccaaaactgtcttggaacatcaaccagggcagagggggcgtaaaccaggaaagaagcggggccggacacccaagaccctaatttcccatcccatctctgccccatccaagacagctgaacctttgaaattcccaaagaagagaggtcccaaacctggcagcaagaggaaacctcggactttgctgaacccaccacctgcctcaccaacaaccagcactcctgaaccggataccagcactgtaccccaggatgctgccaccatccccagctcagccatgcaggccccaacagtttgtatctacttgaacaagaatggcagcacaggcccccacttagataagaagaaggtccagcaactccctgaccattttggaccagcccgtgcctctgtggtgttgcagcaggctgtccaggcctgtatcgactgtgcttatcaccagaaaaccgtcttcagcttcctcaagcaaggccatggtggtgaggttatctcagccgtgtttgaccgggaacagcataccctcaacctcccagcagtcaacagcatcacctacgtcctccgcttcctggagaaactctgccacaaccttcgtagtgacaatctgtttggcaaccagccctttacacagactcacttgtcactcactgccatagagtacagccacagccacgacaggtacctaccaggtgaaacctttgtcctggggaatagtctggcccgctccttggaaccacactcagactcaatggactctgcctcaaatcccaccaaccttgtcagcacctcccaaaggcaccggcccttgctttcatcctgtggcctcccaccaagcactgcctcagctgtgcgcaggctatgctccaggggagtgttaaaaggatcaaatgaaagaagggatatggaatcattttggaaactaaatcgttccccagggtcggaccgatacctggagagccgcgatgcctctcgactgagtggccgggacccctcctcatggacagtcgaggatgtgatgcagtttgtccgggaagctgatcctcagcttggaccccacgctgacctgtttcgcaaacacgagatcgatggcaaggccctgctgctgctgcgcagtgacatgatgatgaagtacatgggcctgaagctggggcctgcactcaagctctcctaccacattgaccggctgaagcagggcaagttctgaaccaggagaggcagcctagacaaccaagtggcagcaggtgggggcattcttctaggaatgaggggcatcagcccaccccaggcacctcagtggggttccgggccacctcaggactccaagaggctgtgtggagccaccactcctagccacagctgccatgataagtccttccatgaaggactgaggagggagagtgggggtccagggctggtgctgctcttccctcagctctgccggggctctaaggtccctctatttatttctcaaccctggctggcctctcaccaggagtttaggctgaatgccttccacgtgatggaggaaaaggccaactctgtcctggtcttgctgtggcaccccatcgccccacagctcgtaccttctcaccagattcccctgaatccaaactcgtggtgcaaacctctaccttttttacaaaaagatcttattgttaatttattgtttctggcacttgggcaaaccctgtagttaatactcctcccacactagacactgggtttcaggaggagggagactgccctgctttggtcccagagaggccctctgcagataggcgtggcccctcttcagaggacactaccctagggcactttctctttgaggtggagagacccataaagccttgaccacatcactccatatggggaggagaaggatccctgtcaccttctcctctcttcacggggcccttttgcagccctaggcctcatctgtgggaagggagtccctggcttatactgcccccaccacagctccttgccctggccagaactgctgtcgaagaaaatcaggccggaaggccaagaaggcgctaagggggatgggagggcaggttttccaggctggagtcggttccacccactcgcctgtccacaggcttccttgtaagcaagtcagcagcacagctactcacgctgccatctggacttattttatgtcaatctgtttataaataaaaaccaatatagatacc

SEQ ID NO: 180873 - DNA, 1586 bp, Homo sapiens
  Payload ID: 15618
  Gene Symbol: SCMH1
  Gene Name: sex comb on midleg homolog 1 (Drosophila)
  Uniprot ID: Q96GD3
  ENST ID: ENST00000456518
  CDS Start-End: 142-1584
tttcaactttggaggattattatgattttcattctgttcagcggctatactcagactttactctaaaagtcaaatcttctgacattctttgaagtgaagcattctatgaatgtgagctgaagaaatgaatgaaatgaaataatgcagtcctacacacctccaagcaacgagttcaagatcagtatgaaattggaagcacaggaccccaggaacaccacatccacctgtattgccacagtagttggactgacaggtgcccgccttcgcctgcgccttgatgggagcgacaacaaaaatgacttctggcggctggttgactcagctgaaatccagcctattgggaactgtgaaaagaatgggggtatgctacagccacctcttgttgtgattccaaagaatccctatcctgcctccgatgtgaatactgagaagcccagcatccacagcagcaccaaaactgtcttggaacatcaaccagggcagagggggcgtaaaccaggaaagaagcggggccggacacccaagaccctaatttcccatcccatctctgccccatccaagacagctgaacctttgaaattcccaaagaagagaggtcccaaacctggcagcaagaggaaacctcggactttgctgaacccaccacctgcctcaccaacaaccagcactcctgaaccggataccagcactgtaccccaggatgctgccaccatccccagctcagccatgcaggccccaacagtttgtatctacttgaacaagaatggcagcacaggcccccacttagataagaagaaggtccagcaactccctgaccattttggaccagcccgtgcctctgtggtgttgcagcaggctgtccaggcctgtatcgactgtgcttatcaccagaaaaccgtcttcagcttcctcaagcaaggccatggtggtgaggttatctcagccgtgtttgaccgggaacagcataccctcaacctcccagcagtcaacagcatcacctacgtcctccgcttcctggagaaactctgccacaaccttcgtagtgacaatctgtttggcaaccagccctttacacagactcacttgtcactcactgccatagagtacagccacagccacgacaggtacctaccaggtgaaacctttgtcctggggaatagtctggcccgctccttggaaccacactcagactcaatggactctgcctcaaatcccaccaaccttgtcagcacctcccaaaggcaccggcccttgctttcatcctgtggcctcccaccaagcactgcctcagctgtgcgcaggctatgctccagggggtcggaccgatacctggagagccgcgatgcctctcgactgagtggccgggacccctcctcatggacagtcgaggatgtgatgcagtttgtccgggaagctgatcctcagcttggaccccacgctgacctgtttcgcaaacacgagatcgatggcaaggccctgctgctgctgcgcagtgacatgatgatgaagtacatgggcctgaagctggggcctgcactcaagctctcctaccacattgaccggctgaagcagggcaagttctgaac

SEQ ID NO: 180874 - DNA, 735 bp, Homo sapiens
  Payload ID: 15618
  Gene Symbol: SCMH1
  Gene Name: sex comb on midleg homolog 1 (Drosophila)
  ENST ID: ENST00000472037
  CDS Start-End: 1-426
gtcagcacctcccaaaggcaccggcccttgctttcatcctgtggcctcccaccaagcactgcctcagctgtgcgcaggctatgctccaggggagtgttaaaaggatcaaatgaaagaagggatatggaatcattttggaaactaaatcgttccccagggtcggaccgatacctggagagccgcgatgcctctcgactgagtggccgggacccctcctcatggacagtcgaggatgtgatgcagtttgtccgggaagctgatcctcagcttggaccccacgctgacctgtttcgcaaacacgagatcgatggcaaggccctgctgctgctgcgcagtgacatgatgatgaagtacatgggcctgaagctggggcctgcactcaagctctcctaccacattgaccggctgaagcagggcaagttctgaaccaggagaggcagcctagacaaccaagtggcagcagccctaggcctcatctgtgggaagggagtccctggcttatactgcccccaccacagctccttgccctggccagaactgctgtcgaagaaaatcaggccggaaggccaagaaggcgctaagggggatgggagggcaggttttccaggctggagtcggttccacccactcgcctgtccacaggcttccttgtaagcaagtcagcagcacagctactcacgctgccatctggacttattttatgtcaatctgtttataaataaaaaccaatataga

SEQ ID NO: 180875 - DNA, 1997 bp, Homo sapiens
  Payload ID: 15619
  Gene Symbol: SCML1
  Gene Name: sex comb on midleg-like 1 (Drosophila)
  Uniprot ID: Q9UN30
  ENST ID: ENST00000380041
  CDS Start-End: 329-1318
ggcgtcgcgggagctctctgatccactcaggggtcagggcatcactggtctcgcgtgcgcgtgaccaggcccggtttccggtgccaggacctttccgaagcgtcgagtggcctaacggtcacagctgtcgcccatcggagaggcaggactactgcgagcagttttaccgcgacctccggaggccggcgtgacaggctctgtcactaaaataggagtagaggtttaccactcttaggtgactaagcagtatcacaaataaaccctccagcaagtttaaaaataattaggtccaactcagaggaagtggagtttctcctgttgcacaaaaatgatgtctaacagctccagtgaaatcgatgtgataaaaacaagaatacctacttacgatgaagatgacaacactattctttatgcgtatgaaacaaaacctgaatttgtcaataaagaaccgaatattgtatctgacgcatcctgtaatactgaagagcaactgaagacagttgatgatgtccttattcattgccaggttatatatgatgctctgcaaaacctggataagaagattgatgtgattcgtagaaaggtttcaaaaatccaacgtttccatgcgagatccctgtggacaaatcataagcgatatggatataaaaagcattcttaccggcttgttaaaaagcttaaactccagaaaatgaagaaaaatgaggtttacgagacattctcctaccctgaaagttacagccccactttaccagtgtcaaggcgtgagaataattccccgagcaaccttccaaggccatccttttgcatggaagaataccagcgagctgagctggaggaggacccgatcctcagccgcactccgagtccagtgcatccctcagatttctctgagcataattgtcagccgtattatgcatctgatggtgcaacgtatggttcttcttcagggctctgccttggcaaccctcgggctgacagcatccacaacacttactcaactgaccatgcttctgcagcaccaccttcagttacaaggtcaccagttgaaaatgacggttacatagaggaaggaagcatcactaagcacccttcaacctggtcggtggaagcagtggtcctatttctaaaacaaacagatcctcttgcattatgccctcttgtcgacctcttcagaagccatgaaattgacgggaaggctctgctcctactcacgagtgacgtgttgctgaagcacttgggggtgaagctgggaacggctgtgaagctatgctactacattgaccgacttaaacaaggaaaatgctttgaaaattgaaaaaatccttgtgcaaatttagattgggccaacttctagaggcaccaatgccttcttagtgtggaatcatttttctgccctttagtcgtttttgttttgtagaaagtatctctcaaaatatattatagctagaattgtagaactatgttatagtccagtctacttctttaaaaaccatttaaactgctagatagtattagaatagtccaatagaaaattcattctttataggtctttaaaaattacttttattatattgtttacaaatatatttcatgcaagaaacagaaaaaaaaaaaaaccctttgattctggttcatctcgatacagagaaccaaaacagctaagagaggtattatcagggttgacaactcctatgattgaatctatgggaattattcctcagaagagaatttaaaggtgtacccatatatatctctttctggagtattttatctgtctgatgttgcagtattctacaagtttccagaaagagaatagccatataaattattttcctttctgctattatttctctatatgttttatttattcagatttagagtaaaaaataagcatataaacttttattatgtgctcttaacagttttaagataaactataggatagatagaatggttattttatgcaagaaatattgtaccgcaagggtggtttg

SEQ ID NO: 180876 - DNA, 2830 bp, Homo sapiens
  Payload ID: 15619
  Gene Symbol: SCML1
  Gene Name: sex comb on midleg-like 1 (Drosophila)
  Uniprot ID: Q9UN30
  ENST ID: ENST00000380043
  CDS Start-End: 329-1237
ggcgtcgcgggagctctctgatccactcaggggtcagggcatcactggtctcgcgtgcgcgtgaccaggcccggtttccggtgccaggacctttccgaagcgtcgagtggcctaacggtcacagctgtcgcccatcggagaggcaggactactgcgagcagttttaccgcgacctccggaggccggcgtgacaggctctgtcactaaaataggagtagaggtttaccactcttaggtgactaagcagtatcacaaataaaccctccagcaagtttaaaaataattaggtccaactcagaggaagtggagtttctcctgttgcacaaaaatgatgtctaacagctccagtgaaatcgatgtgcaggaaccgaatattgtatctgacgcatcctgtaatactgaagagcaactgaagacagttgatgatgtccttattcattgccaggttatatatgatgctctgcaaaacctggataagaagattgatgtgattcgtagaaaggtttcaaaaatccaacgtttccatgcgagatccctgtggacaaatcataagcgatatggatataaaaagcattcttaccggcttgttaaaaagcttaaactccagaaaatgaagaaaaatgaggtttacgagacattctcctaccctgaaagttacagccccactttaccagtgtcaaggcgtgagaataattccccgagcaaccttccaaggccatccttttgcatggaagaataccagcgagctgagctggaggaggacccgatcctcagccgcactccgagtccagtgcatccctcagatttctctgagcataattgtcagccgtattatgcatctgatggtgcaacgtatggttcttcttcagggctctgccttggcaaccctcgggctgacagcatccacaacacttactcaactgaccatgcttctgcagcaccaccttcagttacaaggtcaccagttgaaaatgacggttacatagaggaaggaagcatcactaagcacccttcaacctggtcggtggaagcagtggtcctatttctaaaacaaacagatcctcttgcattatgccctcttgtcgacctcttcagaagccatgaaattgacgggaaggctctgctcctactcacgagtgacgtgttgctgaagcacttgggggtgaagctgggaacggctgtgaagctatgctactacattgaccgacttaaacaaggaaaatgctttgaaaattgaaaaaatccttgtgcaaatttagattgggccaacttctagaggcaccaatgccttcttagtgtggaatcatttttctgccctttagtcgtttttgttttgtagaaagtatctctcaaaatatattatagctagaattgtagaactatgttatagtccagtctacttctttaaaaaccatttaaactgctagatagtattagaatagtccaatagaaaattcattctttataggtctttaaaaattacttttattatattgtttacaaatatatttcatgcaagaaacagaaaaaaaaaaaaaccctttgattctggttcatctcgatacagagaaccaaaacagctaagagaggtattatcagggttgacaactcctatgattgaatctatgggaattattcctcagaagagaatttaaaggtgtacccatatatatctctttctggagtattttatctgtctgatgttgcagtattctacaagtttccagaaagagaatagccatataaattattttcctttctgctattatttctctatatgttttatttattcagatttagagtaaaaaataagcatataaacttttattatgtgctcttaacagttttaagataaactataggatagatagaatggttattttatgcaagaaatattgtaccgcaagggtggtttggatgaagtctgactactttttttcaaacaaactattatattaaaactgtcatattttggctaagtttggacctataactacactttcattgtttgcatctctctatgaagatacgtctgtccaaacttttaaaaggcataactgtattttatgtgtttattctttatatagatagtattttatattttattctcacccgaagtattcacacaatctttttaaaaaaaatttgaaatggcattttgtattgccacagaggtaggatgagccatatattagtgaaatgttttattttgtaaaatataaatggattatttgccatcattagtacctctcaacttactttttagaggacaagaaacaatctgtagattggtttccatacagggaagttctccgtcctatgcaatgtttctaattaatttgcttaattctgagccattaatcctgctacactttgaatgatacattaattcagactaatctttgggggctttattttgtaagttagaactttcaagggaaacatgttcaacactattattttgttataaatttataactttgttattacattgtgtaacaaatataaggtttacgagctatgagaattggtgctatcaccattagctatttgctgtaatgtcaagaaaatgttcaccagatgcaagaatgtaccttttctttttagaaagccaaatgtactttagacatgaatgcaactatttaaagaatagcttcatcaatgttattccttacatgtcataagattcttacttaaacttggtcttctttcaaattgtttgtatgaagatgctgtacccacttgaacagtcctcaggtgtttacataaatactatgttttacagttttcatattttaaaatattaataaagttaaatcacaatagttca

SEQ ID NO: 180877 - DNA, 2679 bp, Homo sapiens
  Payload ID: 15619
  Gene Symbol: SCML1
  Gene Name: sex comb on midleg-like 1 (Drosophila)
  Uniprot ID: Q9UN30
  ENST ID: ENST00000380045
  CDS Start-End: 460-1086
cggcgtcgcgggagctctctgatccactcaggggtcagggcatcactggtctcgcgtgcgcgtgaccaggcccggtttccggtgccaggacctttccgaagcgtcgagtggcctaacggtcacagctgtcgcccatcggagaggcaggactactgcgagcagttttaccgcgacctccggaggccggcgtgacaggctctgtcactaaaataggaaccgaatattgtatctgacgcatcctgtaatactgaagagcaactgaagacagttgatgatgtccttattcattgccaggttatatatgatgctctgcaaaacctggataagaagattgatgtgattcgtagaaaggtttcaaaaatccaacgtttccatgcgagatccctgtggacaaatcataagcgatatggatataaaaagcattcttaccggcttgttaaaaagcttaaactccagaaaatgaagaaaaatgaggtttacgagacattctcctaccctgaaagttacagccccactttaccagtgtcaaggcgtgagaataattccccgagcaaccttccaaggccatccttttgcatggaagaataccagcgagctgagctggaggaggacccgatcctcagccgcactccgagtccagtgcatccctcagatttctctgagcataattgtcagccgtattatgcatctgatggtgcaacgtatggttcttcttcagggctctgccttggcaaccctcgggctgacagcatccacaacacttactcaactgaccatgcttctgcagcaccaccttcagttacaaggtcaccagttgaaaatgacggttacatagaggaaggaagcatcactaagcacccttcaacctggtcggtggaagcagtggtcctatttctaaaacaaacagatcctcttgcattatgccctcttgtcgacctcttcagaagccatgaaattgacgggaaggctctgctcctactcacgagtgacgtgttgctgaagcacttgggggtgaagctgggaacggctgtgaagctatgctactacattgaccgacttaaacaaggaaaatgctttgaaaattgaaaaaatccttgtgcaaatttagattgggccaacttctagaggcaccaatgccttcttagtgtggaatcatttttctgccctttagtcgtttttgttttgtagaaagtatctctcaaaatatattatagctagaattgtagaactatgttatagtccagtctacttctttaaaaaccatttaaactgctagatagtattagaatagtccaatagaaaattcattctttataggtctttaaaaattacttttattatattgtttacaaatatatttcatgcaagaaacagaaaaaaaaaaaaaccctttgattctggttcatctcgatacagagaaccaaaacagctaagagaggtattatcagggttgacaactcctatgattgaatctatgggaattattcctcagaagagaatttaaaggtgtacccatatatatctctttctggagtattttatctgtctgatgttgcagtattctacaagtttccagaaagagaatagccatataaattattttcctttctgctattatttctctatatgttttatttattcagatttagagtaaaaaataagcatataaacttttattatgtgctcttaacagttttaagataaactataggatagatagaatggttattttatgcaagaaatattgtaccgcaagggtggtttggatgaagtctgactactttttttcaaacaaactattatattaaaactgtcatattttggctaagtttggacctataactacactttcattgtttgcatctctctatgaagatacgtctgtccaaacttttaaaaggcataactgtattttatgtgtttattctttatatagatagtattttatattttattctcacccgaagtattcacacaatctttttaaaaaaaatttgaaatggcattttgtattgccacagaggtaggatgagccatatattagtgaaatgttttattttgtaaaatataaatggattatttgccatcattagtacctctcaacttactttttagaggacaagaaacaatctgtagattggtttccatacagggaagttctccgtcctatgcaatgtttctaattaatttgcttaattctgagccattaatcctgctacactttgaatgatacattaattcagactaatctttgggggctttattttgtaagttagaactttcaagggaaacatgttcaacactattattttgttataaatttataactttgttattacattgtgtaacaaatataaggtttacgagctatgagaattggtgctatcaccattagctatttgctgtaatgtcaagaaaatgttcaccagatgcaagaatgtaccttttctttttagaaagccaaatgtactttagacatgaatgcaactatttaaagaatagcttcatcaatgttattccttacatgtcataagattcttacttaaacttggtcttctttcaaattgtttgtatgaagatgctgtacccacttgaacagtcctcaggtgtttacataaatactatgttttacagttttcatattttaaaatattaataaagttaaatcacaatagttca

SEQ ID NO: 180878 - DNA, 2704 bp, Homo sapiens
  Payload ID: 15619
  Gene Symbol: SCML1
  Gene Name: sex comb on midleg-like 1 (Drosophila)
  Uniprot ID: Q9UN30
  ENST ID: ENST00000398080
  CDS Start-End: 482-1108
aaccgcgagtgtgggaattcggcgtcgcgggagctctctgatccactcaggggtcagggcatcactggtctcgcgtgcgcgtgaccaggcccggtttccggtgccaggacctttccgaagcgtcgagtggcctaacggtcacagctgtcgcccatcggagaggcaggactactgcgagcagttttaccgcgacctccggaggccggcgtgacaggctctgtcactaaaatagcaggaaccgaatattgtatctgacgcatcctgtaatactgaagagcaactgaagacagttgatgatgtccttattcattgccaggttatatatgatgctctgcaaaacctggataagaagattgatgtgattcgtagaaaggtttcaaaaatccaacgtttccatgcgagatccctgtggacaaatcataagcgatatggatataaaaagcattcttaccggcttgttaaaaagcttaaactccagaaaatgaagaaaaatgaggtttacgagacattctcctaccctgaaagttacagccccactttaccagtgtcaaggcgtgagaataattccccgagcaaccttccaaggccatccttttgcatggaagaataccagcgagctgagctggaggaggacccgatcctcagccgcactccgagtccagtgcatccctcagatttctctgagcataattgtcagccgtattatgcatctgatggtgcaacgtatggttcttcttcagggctctgccttggcaaccctcgggctgacagcatccacaacacttactcaactgaccatgcttctgcagcaccaccttcagttacaaggtcaccagttgaaaatgacggttacatagaggaaggaagcatcactaagcacccttcaacctggtcggtggaagcagtggtcctatttctaaaacaaacagatcctcttgcattatgccctcttgtcgacctcttcagaagccatgaaattgacgggaaggctctgctcctactcacgagtgacgtgttgctgaagcacttgggggtgaagctgggaacggctgtgaagctatgctactacattgaccgacttaaacaaggaaaatgctttgaaaattgaaaaaatccttgtgcaaatttagattgggccaacttctagaggcaccaatgccttcttagtgtggaatcatttttctgccctttagtcgtttttgttttgtagaaagtatctctcaaaatatattatagctagaattgtagaactatgttatagtccagtctacttctttaaaaaccatttaaactgctagatagtattagaatagtccaatagaaaattcattctttataggtctttaaaaattacttttattatattgtttacaaatatatttcatgcaagaaacagaaaaaaaaaaaaaccctttgattctggttcatctcgatacagagaaccaaaacagctaagagaggtattatcagggttgacaactcctatgattgaatctatgggaattattcctcagaagagaatttaaaggtgtacccatatatatctctttctggagtattttatctgtctgatgttgcagtattctacaagtttccagaaagagaatagccatataaattattttcctttctgctattatttctctatatgttttatttattcagatttagagtaaaaaataagcatataaacttttattatgtgctcttaacagttttaagataaactataggatagatagaatggttattttatgcaagaaatattgtaccgcaagggtggtttggatgaagtctgactactttttttcaaacaaactattatattaaaactgtcatattttggctaagtttggacctataactacactttcattgtttgcatctctctatgaagatacgtctgtccaaacttttaaaaggcataactgtattttatgtgtttattctttatatagatagtattttatattttattctcacccgaagtattcacacaatctttttaaaaaaaatttgaaatggcattttgtattgccacagaggtaggatgagccatatattagtgaaatgttttattttgtaaaatataaatggattatttgccatcattagtacctctcaacttactttttagaggacaagaaacaatctgtagattggtttccatacagggaagttctccgtcctatgcaatgtttctaattaatttgcttaattctgagccattaatcctgctacactttgaatgatacattaattcagactaatctttgggggctttattttgtaagttagaactttcaagggaaacatgttcaacactattattttgttataaatttataactttgttattacattgtgtaacaaatataaggtttacgagctatgagaattggtgctatcaccattagctatttgctgtaatgtcaagaaaatgttcaccagatgcaagaatgtaccttttctttttagaaagccaaatgtactttagacatgaatgcaactatttaaagaatagcttcatcaatgttattccttacatgtcataagattcttacttaaacttggtcttctttcaaattgtttgtatgaagatgctgtacccacttgaacagtcctcaggtgtttacataaatactatgttttacagttttcatattttaaaatattaataaagttaaatcacaatagttcattg

SEQ ID NO: 180879 - DNA, 817 bp, Homo sapiens
  Payload ID: 15619
  Gene Symbol: SCML1
  Gene Name: sex comb on midleg-like 1 (Drosophila)
  ENST ID: ENST00000419185
  CDS Start-End: 375-817
gggaatacacgatttggcttaggggccggggctctcctgaggagagagggtttgctttgcggggaagagcgagtcttgacttcgcagcctccaatttcagccgcggtgtggaggggggtgctttgggtggtccccacagcctttccggagtgcccgcgcgtgtaagcttttgagatttgacaatttgtgaagtgcttggtgctgactttcggggacgacaggatccttttacagtcattctcctgtcaggggaggcaggagtagaggtttaccactcttaggtgactaagcagtatcacaaataaaccctccagcaagtttaaaaataattaggtccaactcagaggaagtggagtttctcctgttgcacaaaaatgatgtctaacagctccagtgaaatcgatgtgcaggaaccgaatattgtatctgacgcatcctgtaatactgaagagcaactgaagacagttgatgatgtccttattcattgccaggttatatatgatgctctgcaaaacctggataagaagattgatgtgattcgtagaaaggtttcaaaaatccaacgtttccatgcgagatccctgtggacaaatcataagcgatatggatataaaaagcattcttaccggcttgttaaaaagcttaaactccagaaaatgaagaaaaatgaggtttacgagacattctcctaccctgaaagttacagccccactttaccagtgtcaaggcgtgagaataattccccgagcaaccttccaaggccatccttttgcatggaagaataccagcgagctgagctggaggaggacccgatcct

SEQ ID NO: 180880 - DNA, 4200 bp, Homo sapiens
  Payload ID: 15620
  Gene Symbol: SCML2
  Gene Name: sex comb on midleg-like 2 (Drosophila)
  Uniprot ID: Q9UQR0
  ENST ID: ENST00000251900
  CDS Start-End: 161-2263
ggcggcagtggcggttgcggggcatgcgcggctccgcgcgcggcttctcaaacatggcggcggcggtgtgaagctcggtgccggctcgcgcgatcggtgggacagaatttcgttgttttcaccgacgagactggaggaaacaacaccaaatagggataccatgggacaaacagtgaatgaagattccatggatgtcaagaaggagaatcaagagaaaactcctcagtcaagtacatcttctgtacaaagggatgatttccactgggaggagtatttgaaagagactgggtctataagtgctccttcagagtgcttccgtcagtctcagattccacctgtgaatgatttcaaagttggtatgaaattggaagcccgtgaccctcgcaatgccacttcagtatgtattgctacggttattggaattactggggccaggttacggttacgactggatggtagtgacaacagaaatgatttttggaggcttgtcgattccccagacatacaacctgttgggacatgtgaaaaggaaggagacttacttcaacctccactagggtaccagatgaatacatcctcctggccgatgttcctcttaaagacactaaatgggtctgaaatggcatctgccacattatttaagaaggaaccaccaaagcccccactaaataattttaaagtggggatgaaactggaagctattgacaaaaagaacccgtatctcatctgtcctgcgaccattggagatgttaaaggggatgaagttcatatcacatttgatggctggagtggagcttttgattactggtgcaagtatgattctcgagatattttcccagctgggtggtgtcgcctgacaggagatgtattacaacccccaggaactagtgttcctattgtaaagaatatagcaaaaacagagtcttctccttccgaagcaagccagcattcaatgcagtctccacagaaaactactctaatattaccaacacagcaggtcaggagatcaagtcgaattaaaccacctggacctactgcagtccccaaaaggagcagttctgttaaaaatatcacaccaaggaaaaaaggtccaaactcaggaaaaaaggaaaaacctttgcccgtgatatgttctacatctgcagcttctctaaaatcgctgaccagagaccgtggcatgttatataaagatgtcgcttctgggccatgtaaaatagtgatgtctacagtctgtgtctatgtaaacaaacatggaaactttggccctcatctggatcccaagagaatccagcagctgcctgaccacttcggcccgggcccggtgaatgtggtgcttcgccggattgtgcaggcctgtgtggattgtgcccttgaaactaaaactgtttttggatacctgaagccagataatcgtggaggagaagtgataactgcctcctttgatggggaaactcattccatccagctccctccagtgaacagtgcatcatttgctcttcgctttcttgagaacttctgccacagtctgcagtgtgataaccttttgagtagccagccttttagttcttccaggggtcatactcacagctctgcagagcatgataaaaatcagtcagcaaaagaagatgtaacagaaaggcaaagcaccaaacgatctcctcagcaaactgtaccatatgttgttcctctctctcctaagctccccaaaacaaaggagtatgcgtctgaaggagaaccattgtttgctgggggaagtgccattcccaaagaggagaatctttcagaagattctaagagctcatcactaaattcaggaaattatttgaatcctgcctgtagaaatcctatgtatattcatacttcagtctcccaggatttttctcgaagtgtgccaggcaccacaagttcaccactagttggggacatatcccccaagagcagtccccatgaagttaaattccaaatgcagaggaaaagtgaagctccaagttatatagctgtacctgatcccagtgtcctgaaacaaggcttctctaaggacccttcaacctggtctgtggatgaagtgatacagtttatgaaacatacagatcctcagatatcaggccccctcgccgacctcttcaggcaacatgaaattgatgggaaggctctgttcctactcaagagtgatgtgatgatgaagtatatggggctgaagctggggccagcattaaagctgtgttactacattgaaaagcttaaagaaggaaaatacagttaaaaaaatgtgtaagtttagattggacataattctcaggtgtactgttaacattttaatttaaaagtatttctcttagcagtttttgttttgtagacagttcccataaaaatattttatcagaattgcagaactgtagtaacagttcagtcaactttgtttttttcctggagtcaccaaccagctttgggagacacagccgccactcccccagtctacttctttaaaaagcatttaacaggttagtattggcatattcaaattggcagttctttatgtctttttaaattttcattgtacagtttacaaatatacttaatgtagttaacagagaaaaacctttgattttggttaacctttatatctagaaccaaaacagctaaatcccaaaggggaaaatatcagggattgacaacttctataattaaatccatgagaatttttcctcactagagaatttaaaggtgcacctgtagatatcatcttttctcagatattttgtgtgatactctgtggtgttctgttcatgttctatcagtatatctagaaagggaatagccatataaattattttccttttattatttctctgtatgttgtatttgatcatatttaaaggaaaaaagcaagcttataagctttcatgaagtgttcttaccagtttttgataaattttttaaattataggatagaattgtcattttatgcaggagatatttatactacgagggttgtttggatggagtcagattaaattttttcagtgaaattcctattattttaaaactttccatattttcactacgcttggacatttaactaggcattcttttcttacatctctatatgaagatacctgtgtccaaaatttttgaagatatatattgtatgtgtttattcttcatatggtactttaccatatttatatattgttttatacctgtaggtttacacacaagtaaatcttttttttcttgaatttaatctggcactttgcactgccacagaggtgacgatgaactatgtatatagttagatgttttgatttcgtaaaaaatatatgtccatcgtttgctatcaccagtacctctcagcttactcttcaggggatatgaaacaatctgtagattggtttccatacagggaagttctctgtcctatgcaatgtttctaattaatttgcttagttctgagccatttattctgctacactttgaaagatatattagttctgacttattgtttggggctttattttatttttatttttttgagatggagtttcactcttgttgcccaggctggagtgcaatagctcgatctcggctcactgcaacctcgcctccctggttcaagcaattctcctgcctcagcgattacaggaatgcaccaccacgcccagctaattttgtagagatggggtttctccatgttggtcaggctggtctcaaactcctgacctcaggtgatccgcccacctcggccttgcaaaatgctgggattacaggcatgagccaccatgcccagccatgtttggggctttattttataagttagaactttgaagaggaaatggtgctatatgtttattgttattactttgtgtaactttgatgtaatgtttataagctatgagaatcagttataaaagtattagccatttgttgtaaatgccaataaaatattcaccaggggcaagaatgtacattttctttttagaaaaccaaatgtactttagacatgaatgcaactatttaaagaatagcttcatttatgttattccttacatgtcataagattcttacttaaacttggtcttctttcaagttgtttgtatgaagatgctgtacccacttgaacagtcctcaggtgtttacataaatactatgttttacagttttcatattttaaaatattaataaagttaatcgcaacgattc

SEQ ID NO: 180881 - DNA, 1334 bp, Homo sapiens
  Payload ID: 15620
  Gene Symbol: SCML2
  Gene Name: sex comb on midleg-like 2 (Drosophila)
  Uniprot ID: Q9UQR0
  ENST ID: ENST00000398048
  CDS Start-End: 44-460
actaaattcaggaaattatttgaatcctgcctgtagaaatcctatgtatattcatacttcagtctcccaggatttttctcgaagtgtgccaggcaccacaagttcaccactagttggggacatatcccccaagagcagtccccatgaagttaaattccaaatgcagaggaaaagtgaagctccaagttatatagctgtacctgatcccagtgtcctgaaacaaggcttctctaaggacccttcaacctggtctgtggatgaagtgatacagtttatgaaacatacagatcctcagatatcaggccccctcgccgacctcttcaggcaacatgaaattgatgggaaggctctgttcctactcaagagtgatgtgatgatgaagtatatggggctgaagctggggccagcattaaagctgtgttactacattgaaaagcttaaagaaggaaaatacagttaaaaaaatgtgtaagtttagattggacataattctcaggtgtactgttaacattttaatttaaaagtatttctcttagcagtttttgttttgtagacagttcccataaaaatattttatcagaattgcagaactgtagtaacagttcagtcaactttgtttttttcctggagtcaccaaccagctttgggagacacagccgccactcccccagtctacttctttaaaaagcatttaacaggctggagtgcaatagctcgatctcggctcactgcaacctcgcctccctggttcaagcaattctcctgcctcagcgattacaggaatgcaccaccacgcccagctaattttgtagagatggggtttctccatgttggtcaggctggtctcaaactcctgacctcaggtgatccgcccacctcggccttgcaaaatgctgggattacaggcatgagccaccatgcccagccatgtttggggctttattttataagttagaactttgaagaggaaatggtgctatatgtttattgttattactttgtgtaactttgatgtaatgtttataagctatgagaatcagttataaaagtattagccatttgttgtaaatgccaataaaatattcaccaggggcaagaatgtacattttctttttagaaaaccaaatgtactttagacatgaatgcaactatttaaagaatagcttcatttatgttattccttacatgtcataagattcttacttaaacttggtcttctttcaagttgtttgtatgaagatgctgtacccacttgaacagtcctcaggtgtttacataaatactatgttttacagttttcatattttaaaatattaataaagttaatcgcaacg

SEQ ID NO: 180882 - DNA, 2435 bp, Homo sapiens
  Payload ID: 15620
  Gene Symbol: SCML2
  Gene Name: sex comb on midleg-like 2 (Drosophila)
  ENST ID: ENST00000420857
  CDS Start-End: 1-377
cagcaaaagaagatgtaacagaaaggcaaagcaccaaacgatctcctcagcaaactgtaccatatgttgttcctctctctcctaagctccccaaaacaaaggagtatgcgtctgaaggagaaccattgtttgctgggggaagtgccattcccaaagaggagaatctttcagaagattctaagagctcatcactaaattcaggaaattatttgaatcctgcctgtagaaatcctatgtatattcatacttcagtctcccaggatttttctcgaagtgtgccaggcaccacaagttcaccactagttggggacatatcccccaagagcagtccccatgaagttaaattccaaatgcagaggaaaagtgaaggaaattgatgggaaggctctgttcctactcaagagtgatgtgatgatgaagtatatggggctgaagctggggccagcattaaagctgtgttactacattgaaaagcttaaagaaggaaaatacagttaaaaaaatgtgtaagtttagattggacataattctcaggtgtactgttaacattttaatttaaaagtatttctcttagcagtttttgttttgtagacagttcccataaaaatattttatcagaattgcagaactgtagtaacagttcagtcaactttgtttttttcctggagtcaccaaccagctttgggagacacagccgccactcccccagtctacttctttaaaaagcatttaacaggttagtattggcatattcaaattggcagttctttatgtctttttaaattttcattgtacagtttacaaatatacttaatgtagttaacagagaaaaacctttgattttggttaacctttatatctagaaccaaaacagctaaatcccaaaggggaaaatatcagggattgacaacttctataattaaatccatgagaatttttcctcactagagaatttaaaggtgcacctgtagatatcatcttttctcagatattttgtgtgatactctgtggtgttctgttcatgttctatcagtatatctagaaagggaatagccatataaattattttccttttattatttctctgtatgttgtatttgatcatatttaaaggaaaaaagcaagcttataagctttcatgaagtgttcttaccagtttttgataaattttttaaattataggatagaattgtcattttatgcaggagatatttatactacgagggttgtttggatggagtcagattaaattttttcagtgaaattcctattattttaaaactttccatattttcactacgcttggacatttaactaggcattcttttcttacatctctatatgaagatacctgtgtccaaaatttttgaagatatatattgtatgtgtttattcttcatatggtactttaccatatttatatattgttttatacctgtaggtttacacacaagtaaatcttttttttcttgaatttaatctggcactttgcactgccacagaggtgacgatgaactatgtatatagttagatgttttgatttcgtaaaaaatatatgtccatcgtttgctatcaccagtacctctcagcttactcttcaggggatatgaaacaatctgtagattggtttccatacagggaagttctctgtcctatgcaatgtttctaattaatttgcttagttctgagccatttattctgctacactttgaaagatatattagttctgacttattgtttggggctttattttatttttatttttttgagatggagtttcactcttgttgcccaggctggagtgcaatagctcgatctcggctcactgcaacctcgcctccctggttcaagcaattctcctgcctcagcgattacaggaatgcaccaccacgcccagctaattttgtagagatggggtttctccatgttggtcaggctggtctcaaactcctgacctcaggtgatccgcccacctcggccttgcaaaatgctgggattacaggcatgagccaccatgcccagccatgtttggggctttattttataagttagaactttgaagaggaaatggtgctatatgtttattgttattactttgtgtaactttgatgtaatgtttataagctatgagaatcagttataaaagtattagccatttgttgtaaatgccaataaaatattcaccaggggcaagaatgtacattttctttttagaaaaccaaatgtactttagacatgaatgcaactatttaaagaatagcttcatttatgttattccttacatgtcataagattcttacttaaacttggtcttctttcaagttgtttgtatgaagatgctgtacccacttgaacagtcctcaggtgtttacataaatactatgttttacagttttcatattttaaaatattaataaagttaatcgcaacgattc

SEQ ID NO: 180883 - DNA, 1491 bp, Homo sapiens
  Payload ID: 15621
  Gene Symbol: SCML4
  Gene Name: sex comb on midleg-like 4 (Drosophila)
  Uniprot ID: Q8N228
  ENST ID: ENST00000369020
  CDS Start-End: 247-1491
cattagtctaatgagatgtttgcagctggagcgcagggctgctggagactaactgtgagctactaacacgggtggaagatagcttttgcaatactcggtttgcatgtgctgaaagtcatctgtcttctgagtcaacactcccgacctggtaaacaacctgctcagggctctggtgaacaagctgtagcacctcttctgcctgtgagcgatttgtcacctcattctgtaagactggcaccagcagaaatgcagtctcaaaggatcccggggagaaagcgaggccgaccctcacttcactccacgcctatgaagatggcagttcataacctttattctgcttcagctggctctttaccagcagtgaagatcccaaagaaaagagggcggaaacccgggtacaagatcaagtctcgggttctcatgactcccttagccctctcacctccgcggagtaccccagagcccgacctcagctccatccctcaggacgcagccacggtccccagcttggcggccccacaggctctcacagtctgcctctacatcaacaagcaggccaatgcggggccctatctggagaggaagaaggtgcagcagctcccggagcattttgggcccgagcggccatcggcggtgctgcagcaggccgtccaagcctgcatcgactgcgcccaccagcagaagctggtcttctccctggtcaagcagggctatggtggtgagatggtgtcagtctcggcttcctttgatggcaaacagcacctgcggagcctgcctgtggtgaacagcatcggctatgtcctccgcttcctcgccaagctgtgccgaagcctcctgtgcgatgacctcttcagccaccagcccttccccaggggctgcagtgcctctgagaaagtccaggagaaagaggaagggaggatggaatcagtcaagacagtcaccaccgaagagtacctggtgaaccctgtgggcatgaaccgctacagcgtggacacctccgcctccacctttaaccacaggggctccttgcacccctcctcctcgctgtactgcaagaggcagaactctggagacagccaccttgggggtggtcctgctgccaccgctggtggtccccgcactagccccatgtcttctggtggcccctcggcacctgggctgaggcctccagcctccagccccaagagaaacacgacctctcttgaaggaaacagatgtgcctcaagcccttctcaggatgcgcaggatgccaggcggccacggagcaggaacccctccgcctggactgtggaggacgtggtgtggtttgtgaaggacgccgacccacaggctctggggcctcacgtggagctcttcagaaagcacgagattgatggcaacgctctgctgttgctgaagagtgacatggtcatgaagtacctgggcctgaagctgggacctgcactgaaactctgctaccacattgacaaactgaagcaagccaagttctga

SEQ ID NO: 180884 - DNA, 2056 bp, Homo sapiens
  Payload ID: 15621
  Gene Symbol: SCML4
  Gene Name: sex comb on midleg-like 4 (Drosophila)
  Uniprot ID: Q8N228
  ENST ID: ENST00000369021
  CDS Start-End: 106-1023
ataacctttattctgcttcagctggctctttaccagcagtgaagatcccaaagaaaagagggcggaaacccgggtacaagaaacctaaggcaacaacaaagacaaatgccctgccagagaacagcttggataggttgcgacaggcagagaacccccccattccactggagagagatcaagtctcgggttctcatgactcccttagccctctcacctccgcggagtaccccagagcccgacctcagctccatccctcaggacgcagccacggtccccagcttggcggccccacaggctctcacagtctgcctctacatcaacaagcaggccaatgcggggccctatctggagaggaagaaggtgcagcagctcccggagcattttgggcccgagcggccatcggcggtgctgcagcaggccgtccaagcctgcatcgactgcgcccaccagcagaagctggtcttctccctggtcaagcagggctatggtggtgagatggtgtcagtctcggcttcctttgatggcaaacagcacctgcggagcctgcctgtggtgaacagcatcggctatgtcctccgcttcctcgccaagctgtgccgaagcctcctgtgcgatgacctcttcagccaccagcccttccccaggggctgcagtgcctctgagaaagtccaggagaaagaggaagggaggatggaatcagtcaagacagtcaccaccgaagagtacctggtgaaccctgtgggcatgaaccgctacagcgtggacacctccgcctccacctttaaccacaggggctccttgcacccctcctcctcgctgtactgcaagaggcagaactctggagacagccaccttgggggtggtcctgctgccaccgctggtggtccccgcactagccccatgtcttctggtggcccctcggcacctgggctgaggcctccagcctccagccccaagagaaacacgacctctcttgaaggaaacagatgtggtaatgtaatgcatgcatcagcttcccactgacttaacatcccttgcccttgcgcggggagcacagcatctggggaagggggagtgtggctgtttaaacgtgggactgctgggagatcagaaatttccacaagtcctttcatggatcttgaggttctcaaaaacagccaaactcaacctttgataagcaaagaaaatcgtgtattagggcaggctaggccacaggatacgtagactccaaaatgtacacaggctcaaataccatagaaatttttgttcgagagccaaaggtgaatgttcctgattcatggatgcatctcaatatagggacataggctccatctattttgtggctctgccaccctctacagccttcatgccccatgcattagggaatagaaagggaaagaaggtgtggagaagacacaggtgcttccctgcaatctgaaagtgatgctcatcacttccactcacatctcattggcaaaagctggtcattttgccacacttaaccataagggactctggaagctgtaggttagctctgcccaggagaaaggagaaccagaccttggtaaagaattgtctcttgcataggaagtgtcaccttcaggatacaaatacatgagcagaggcagagttaggcaaaattcccccaatgctggttgtaatgccacttctgtctcatccactaaagaaagcttgttggaatgcagtctacaaaagcgctataagggctaaaggattatagtaatagcttgaaggcccttctgattgatgttttaaaaaatcattttcaagcttcagtattttgatagtgcctaaaggccatagagtatagtggataatcactgggactagagccagacagcctgggctgagatgctggatctgctgcttcctgcctaccttttgcaagtcttaacttacctgtgcttcagtttcctcacctataaaattgtgataataataatgggcagccttgatttcataggtttgtccccagtgttagcttaatatctggcatgtggtaggtgttcaataaacatgcatcatgtctgtgccc

SEQ ID NO: 180885 - DNA, 2377 bp, Homo sapiens
  Payload ID: 15621
  Gene Symbol: SCML4
  Gene Name: sex comb on midleg-like 4 (Drosophila)
  Uniprot ID: Q8N228
  ENST ID: ENST00000369022
  CDS Start-End: 211-1281
gaatgcattagtctaatgagatgtttgcagctggagcgcagggctgctggagactaactgtgagctactaacacgggtggaagatagcttttgcaatactcggtttgcatgtgctgaaagtcatctgtcttctgagtcaacactcccgacctggtaaacaacctgctcagggctctggtgaacaagctgtagatcaagtctcgggttctcatgactcccttagccctctcacctccgcggagtaccccagagcccgacctcagctccatccctcaggacgcagccacggtccccagcttggcggccccacaggctctcacagtctgcctctacatcaacaagcaggccaatgcggggccctatctggagaggaagaaggtgcagcagctcccggagcattttgggcccgagcggccatcggcggtgctgcagcaggccgtccaagcctgcatcgactgcgcccaccagcagaagctggtcttctccctggtcaagcagggctatggtggtgagatggtgtcagtctcggcttcctttgatggcaaacagcacctgcggagcctgcctgtggtgaacagcatcggctatgtcctccgcttcctcgccaagctgtgccgaagcctcctgtgcgatgacctcttcagccaccagcccttccccaggggctgcagtgcctctgagaaagtccaggagaaagaggaagggaggatggaatcagtcaagacagtcaccaccgaagagtacctggtgaaccctgtgggcatgaaccgctacagcgtggacacctccgcctccacctttaaccacaggggctccttgcacccctcctcctcgctgtactgcaagaggcagaactctggagacagccaccttgggggtggtcctgctgccaccgctggtggtccccgcactagccccatgtcttctggtggcccctcggcacctgggctgaggcctccagcctccagccccaagagaaacacgacctctcttgaaggaaacagatgtgcctcaagcccttctcaggatgcgcaggatgccaggcggccacggagcaggaacccctccgcctggactgtggaggacgtggtgtggtttgtgaaggacgccgacccacaggctctggggcctcacgtggagctcttcagaaagcacgagattgatggcaacgctctgctgttgctgaagagtgacatggtcatgaagtacctgggcctgaagctgggacctgcactgaaactctgctaccacattgacaaactgaagcaagccaagttctgacttttttaaaaagacagaagcgaaacccaaaacaacagatcccaagattatcttctgccttaccaatatcccgccaacatcacaaactagactctcctcttaaaattaacagccacagagacgtggtctttttataaaacttgtgaatctttgccttttgaagaatttaacatggaccttttcgagaggctcctctgtgttcataatttgccaaaaaattacaaaagcctgtgatttttaacatccctgttatgctggtttctcttaaagtgggtcctatttgcataacgagagagtggggaactgaatgcttatgcccaaggagagttctggagggttcaaaggatgaaagaaggacctttgtccctgcggtctctgcagggacaaccccctcagcaccatctgcctctaactctgacctggggacctatccatgtgagccttgtttgcctcagctctggaagctgacttctgaagatgactgcctcaccttgcactgtctggaaaacttgaattattttacgccgtgaaagaaaaaggaaaaaaaaaaaaatcttttctgttcctagaaaatctgaagtactgtgtttctccgctagagggcagactgctaatgaaatttcaggaccctcactgactgcagtagcaggattgttcagtactgagtggatgggttagggtgtctgtgaacaagatctagcccacacagaaacaggggatttattccacagttagcaccacagattgcgacttgggaagaaaccatcagctagaggggtctagttcgtatccaatcattattgactgactgactgatactcaactagcaaaggcaagaatttggaagcacgctctacccagatgggactttggagttccttcccttccagagtccttattgaggtgttgaagtgttggcatgccgaagaatcttagtgacatttagccatgggtgtttctttaaaaaaggaaaagaaaatgtctcaacgaagctttgaaatgggagagtgttgatttctagttacattgctgggttatgtagttgtatctgtggctaatttttctagtcctcaacaaatacacagacatgctatta

SEQ ID NO: 180886 - DNA, 1534 bp, Homo sapiens
  Payload ID: 15621
  Gene Symbol: SCML4
  Gene Name: sex comb on midleg-like 4 (Drosophila)
  ENST ID: ENST00000369025
  CDS Start-End: 467-985
atctgaactgcagagacaaccttagagagaaaatccatactggccagagaccaagttaatggaaaatttaattgaagcaaatgaaatgctcagcctcataggtagtatggccctgtgccctttgaaccagaaaggctgggccaggaggccacagagggccctaagggaaaactcccttatctgcaagaacaaggggcgggactgagtttgagaaaagaaaatctgcaaacctccacaggagcctcagtgaaaggctgcatgcaggggaggaaaccttcaggttttggtcaccaggaagtccgttagagattcacagcagaaggcccctctgcatcccacagcaccaagcacgtgctggaaaccggcggtcccccagaggacagtgggagaggctgccgggtggcagagacacaaccaccaagtcaagacagtcaccaccgaagagtacctggtgaaccctgtgggcatgaaccgctacagcgtggacacctccgcctccacctttaaccacaggggctccttgcacccctcctcctcgctgtactgcaagaggcagaactctggagacagccaccttgggggtggtcctgctgccaccgctggtggtccccgcactagccccatgtcttctggtggcccctcggcacctgggctgaggcctccagcctccagccccaagagaaacacgacctctcttgaaggaaacagatgtgcctcaagcccttctcaggatgcgcaggatgccaggcggccacggagcaggaacccctccgcctggactgtggaggacgtggtgtggtttgtgaaggacgccgacccacaggctctggggcctcacgtggagctcttcagaaagcacgagattgatggcaacgctctgctgttgctgaagagtgacatggtcatgaagtacctgggcctgaagctgggacctgcactgaaactctgctaccacattgacaaactgaagcaagccaagttctgacttttttaaaaagacagaagcgaaacccaaaacaacagatcccaagattatcttctgccttaccaatatcccgccaacatcacaaactagactctcctcttaaaattaacagccacagagacgtggtctttttataaaacttgtgaatctttgccttttgaagaatttaacatggaccttttcgagaggctcctctgtgttcataatttgccaaaaaattacaaaagcctgtgatttttaacatccctgttatgctggtttctcttaaagtgggtcctatttgcataacgagagagtggggaactgaatgcttatgcccaaggagagttctggagggttcaaaggatgaaagaaggacctttgtccctgcggtctctgcagggacaaccccctcagcaccatctgcctctaactctgacctggggacctatccatgtgagccttgtttgcctcagctctggaagctgacttctgaagatgactgcctcaccttgcactgtctggaaaacttgaattattttacgccgtgaaagaaaaaggaaaaaaaaa

SEQ ID NO: 180887 - DNA, 779 bp, Homo sapiens
  Payload ID: 15621
  Gene Symbol: SCML4
  Gene Name: sex comb on midleg-like 4 (Drosophila)
  ENST ID: ENST00000426221
  CDS Start-End: 180-695
tggagcgcagggctgctggagactaactgtgagctactaacacgggtggaagatagcttttgcaatactcggtttgcatgtgctgaaagtcatctgtcttctgagtcaacactcccgacctggtaaacaacctgctcagggctctggtgaacaagctgtagatcaagtctcgggttctcatgactcccttagccctctcacctccgcggagtaccccagagcccgacctcagctccatccctcaggacgcagccacggtccccagcttggcggccccacaggctctcacagtctgcctctacatcaacaagcaggccaatgcggggccctatctggagaggaagaaggtgcagcagctcccggagcattttgggcccgagcggccatcggcggtgctgcagcaggccgtccaagcctgcatcgactgcgcccaccagcagaagctggtcttctccctggtcaagcagggctatggtggtgagatggtgtcagtctcggcttcctttgatggcaaacagcacctgcggagcctgcctgtggtgaacagcatcggctatgtcctccgcttcctcgccaagctgtgccgaagcctcctgtgcgatgacctcttcagccaccagcccttccccaggggctgcagtgcctctgagaaagtccaggagaaagaggaagggaggatggaatcaggaggatgacagccttccttcctaaaagctgatgtccccatctgaaagctggttttcctcccagtcagctgggaggtttggaagtaatgaccc

SEQ ID NO: 180888 - DNA, 700 bp, Homo sapiens
  Payload ID: 15621
  Gene Symbol: SCML4
  Gene Name: sex comb on midleg-like 4 (Drosophila)
  ENST ID: ENST00000440927
  CDS Start-End: 106-700
ataacctttattctgcttcagctggctctttaccagcagtgaagatcccaaagaaaagagggcggaaacccgggtacaagaaacctaaggcaacaacaaagacaaatgccctgccagagaacagcttggataggttgcgacaggcagagaacccccccattccactggagagagatcaagtctcgggttctcatgactcccttagccctctcacctccgcggagtaccccagagcccgacctcagctccatccctcaggacgcagccacggtccccagcttggcggccccacaggctctcacagtctgcctctacatcaacaagcaggccaatgcggggccctatctggagaggaagaaggtgcagcagctcccggagcattttgggcccgagcggccatcggcggtgctgcagcaggccgtccaagcctgcatcgactgcgcccaccagcagaagctggtcttctccctggtcaagcagggctatggtggtgagatggtgtcagtctcggcttcctttgatggcaaacagcacctgcggagcctgcctgtggtgaacagcatcggctatgtcctccgcttcctcgccaagctgtgccgaagcctcctgtgcgatgacctcttcagccaccagcccttccccaggggctgcagtgcctctgagaaagtccaggagaaagaggaagggaggatggaatcag

SEQ ID NO: 180889 - DNA, 845 bp, Homo sapiens
  Payload ID: 15622
  Gene Symbol: SRY
  Gene Name: sex determining region Y
  Uniprot ID: Q05066
  ENST ID: ENST00000383070
  CDS Start-End: 97-711
gtaacaaagaatctggtagaagtgagttttggatagtaaaataagtttcgaactctggcacctttcaattttgtcgcactctccttgtttttgacaatgcaatcatatgcttctgctatgttaagcgtattcaacagcgatgattacagtccagctgtgcaagagaatattcccgctctccggagaagctcttccttcctttgcactgaaagctgtaactctaagtatcagtgtgaaacgggagaaaacagtaaaggcaacgtccaggatagagtgaagcgacccatgaacgcattcatcgtgtggtctcgcgatcagaggcgcaagatggctctagagaatcccagaatgcgaaactcagagatcagcaagcagctgggataccagtggaaaatgcttactgaagccgaaaaatggccattcttccaggaggcacagaaattacaggccatgcacagagagaaatacccgaattataagtatcgacctcgtcggaaggcgaagatgctgccgaagaattgcagtttgcttcccgcagatcccgcttcggtactctgcagcgaagtgcaactggacaacaggttgtacagggatgactgtacgaaagccacacactcaagaatggagcaccagctaggccacttaccgcccatcaacgcagccagctcaccgcagcaacgggaccgctacagccactggacaaagctgtaggacaatcgggtaacattggctacaaagacctacctagatgctcctttttacgataacttacagccctcactttcttatgtttagtttcaatattgttttcttttctctggctaataaaggccttattcatttca

SEQ ID NO: 180890 - DNA, 1311 bp, Homo sapiens
  Payload ID: 15623
  Gene Symbol: SHBG
  Gene Name: sex hormone-binding globulin
  ENST ID: ENST00000340624
  CDS Start-End: 247-1281
gtgactgggctcctgggtagagttcaaggttggagtgaagcggcttccttgcggttgtgtgggtgtcccaacctgggtcgagataccccgcggttcaaaggctcccccgcagtgctttttaaattgacatatgcagtgataacctgctttagcctcaggctcactcacccgcccagaccctggagtgcccacgaccctccggctgtccacctcagcaatggcccaggacaagagcctatcgctgtcatgacctttgacctcaccaagatcacaaaaacctcctcctcctttgaggttcgaacctgggacccagagggagtgattttttatggggataccaaccctaaggatgactggtttatgctgggacttcgagacggcaggcctgagatccaactgcacaatcactgggcccagcttacggtgggtgctggaccacggctggatgatgggagatggcaccaggtggaagtcaagatggagggggactctgtgctgctggaggtggatggggaggaggtgctgcgcctgagacaggtctctgggcccctgaccagcaaacgccatcccatcatgaggattgcgcttggggggctgctcttccccgcttccaaccttcggttgccgctggttcctgccctggatggctgcctgcgccgggattcctggctggacaaacaggccgagatctcagcatctgcccccactagcctcagaagctgtgatgtagaatcaaatcccgggatatttctccctccagggactcaggcagaattcaatctccgagacattccccagcctcatgcagagccctgggccttctctttggacctgggactcaagcaggcagcaggctcaggccacctccttgctcttgggacaccagagaacccatcttggctcagtctccacctccaagatcaaaaggtggtgttgtcttctgggtcggggccagggctggatctgcccctggtcttgggactccctcttcagctgaagctgagtatgtccagggtggtcttgagccaagggtcgaagatgaaggcccttgccctgcctcccttaggcctggctcccctccttaacctctgggccaagcctcaagggcgtctcttcctgggggctttaccaggagaagactcttccacctctttttgcctgaatggcctttgggcacaaggtcagaggctggatgtggaccaggccctgaacagaagccatgagatctggactcacagctgcccccagagcccaggcaatggcactgacgcttcccattaaagctccacctaagaaccccctttgaaagtt

SEQ ID NO: 180891 - DNA, 1271 bp, Homo sapiens
  Payload ID: 15623
  Gene Symbol: SHBG
  Gene Name: sex hormone-binding globulin
  Uniprot ID: P04278
  ENST ID: ENST00000380450
  CDS Start-End: 32-1240
gtctgagccgccgagtggacagtggctgattatggagagcagaggcccactggctacctcgcgcctgctgctgttgctgctgttgctactactgcgtcacacccgccagggatgggccctgagacctgttctccccacccagagtgcccacgaccctccggctgtccacctcagcaatggcccaggacaagagcctatcgctgtcatgacctttgacctcaccaagatcacaaaaacctcctcctcctttgaggttcgaacctgggacccagagggagtgattttttatggggataccaaccctaaggatgactggtttatgctgggacttcgagacggcaggcctgagatccaactgcacaatcactgggcccagcttacggtgggtgctggaccacggctggatgatgggagatggcaccaggtggaagtcaagatggagggggactctgtgctgctggaggtggatggggaggaggtgctgcgcctgagacaggtctctgggcccctgaccagcaaacgccatcccatcatgaggattgcgcttggggggctgctcttccccgcttccaaccttcggttgccgctggttcctgccctggatggctgcctgcgccgggattcctggctggacaaacaggccgagatctcagcatctgcccccactagcctcagaagctgtgatgtagaatcaaatcccgggatatttctccctccagggactcaggcagaattcaatctccgagacattccccagcctcatgcagagccctgggccttctctttggacctgggactcaagcaggcagcaggctcaggccacctccttgctcttgggacaccagagaacccatcttggctcagtctccacctccaagatcaaaaggtggtgttgtcttctgggtcggggccagggctggatctgcccctggtcttgggactccctcttcagctgaagctgagtatgtccagggtggtcttgagccaagggtcgaagatgaaggcccttgccctgcctcccttaggcctggctcccctccttaacctctgggccaagcctcaagggcgtctcttcctgggggctttaccaggagaagactcttccacctctttttgcctgaatggcctttgggcacaaggtcagaggctggatgtggaccaggccctgaacagaagccatgagatctggactcacagctgcccccagagcccaggcaatggcactgacgcttcccattaaagctccacctaagaaccccctttgaaagtta

SEQ ID NO: 180892 - DNA, 1042 bp, Homo sapiens
  Payload ID: 15623
  Gene Symbol: SHBG
  Gene Name: sex hormone-binding globulin
  Uniprot ID: P04278
  ENST ID: ENST00000416273
  CDS Start-End: 22-903
ccgagtggacagtggctgattatggagagcagaggcccactggctacctcgcgcctgctgctgttgctgctgttgctactactgcgtcacacccgccagggatgggccctgagacctgttctccccacccagagtgcccacgaccctccggctgtccacctcagcaatggcccaggacaagagcctatcgctgtcatgacctttgacctcaccaagatcacaaaaacctcctcctcctttgaggttcgaacctgggacccagagggagtgattttttatggggataccaaccctaaggatgactggtttatgctgggacttcgagacggcaggcctgagatccaactgcacaatcactgggcccagcttacggtgggtgctggaccacggctggatgatgggagatggcaccaggtggaagtcaagatggagggggactctgtgctgctggaggtggatggggaggaggtgctgcgcctgagacaggtctctgggcccctgaccagcaaacgccatcccatcatgaggattgcgcttggggggctgctcttccccgcttccaaccttcggttgccgctggttcctgccctggatggctgcctgcgccgggattcctggctggacaaacaggccgagatctcagcatctgcccccactagcctcagaagctgtgatgtagaatcaaatcccgggatatttctccctccagggactcaggcagaattcaatctccgagacattccccagcctcatgcagagccctgggccttctctttggacctgggactcaagcaggcagcaggctcaggccacctccttgctcttgggacaccagagaacccatcttggctcagtctccacctccaagatcaagagaagactcttccacctctttttgcctgaatggcctttgggcacaaggtcagaggctggatgtggaccaggccctgaacagaagccatgagatctggactcacagctgcccccagagcccaggcaatggcactgacgcttcccattaaagctccacctaagaaccccc

SEQ ID NO: 180893 - DNA, 973 bp, Homo sapiens
  Payload ID: 15623
  Gene Symbol: SHBG
  Gene Name: sex hormone-binding globulin
  Uniprot ID: P04278
  ENST ID: ENST00000441599
  CDS Start-End: 80-943
accgcccacacgcaaggctgcctgcctctacacattctcccaagagttgtctgagccgccgagtggacagtggctgattatggagagcagaggcccactggctacctcgcgcctgctgctgttgctgctgttgctactactgcgtcacacccgccagggatgggccctgagacctgttctccccacccagagtgcccacgaccctccggctgtccacctcagcaatggcccaggacaagagcctatcgctgtcatgacctttgacctcaccaagatcacaaaaacctcctcctcctttgaggttcgaacctgggacccagagggagtgattttttatggggataccaaccctaaggatgactggtttatgctgggacttcgagacggcaggcctgagatccaactgcacaatcactgggcccagcttacggtgggtgctggaccacggctggatgatgggagatggcaccaggtggaagtcaagatggagggggactctgtgctgctggaggtggatggggaggaggtgctgcgcctgagacaggtctctgggcccctgaccagcaaacgccatcccatcatgaggattgcgcttggggggctgctcttccccgcttccaaccttcggttgccgctggttcctgccctggatggctgcctgcgccgggattcctggctggacaaacaggccgagatctcagcatctgcccccactagcctcagaagctgtgatgtagaatcaaatcccgggatatttctccctccagggactcaggcagaattcaatctccgaggagaagactcttccacctctttttgcctgaatggcctttgggcacaaggtcagaggctggatgtggaccaggccctgaacagaagccatgagatctggactcacagctgcccccagagcccaggcaatggcactgacgcttcccattaaagctccacctaagaaccccctttgaaagtt

SEQ ID NO: 180894 - DNA, 938 bp, Homo sapiens
  Payload ID: 15623
  Gene Symbol: SHBG
  Gene Name: sex hormone-binding globulin
  ENST ID: ENST00000574539
  CDS Start-End: 110-817
aattctccatgtgcttggatcgtggggaagatgtgattaaggtctaagtgcccacgaccctccggctgtccacctcagcaatggcccaggacaagagcctatcgctgtcatgacctttgacctcaccaagatcacaaaaacctcctcctcctttgaggttcgaacctgggacccagagggagtgattttttatggggataccaaccctaaggatgactggtttatgctgggacttcgagacggcaggcctgagatccaactgcacaatcactgggcccagcttacggtgggtgctggaccacggctggatgatgggagatggcaccaggtggaagtcaagatggagggggactctgtgctgctggaggtggatggggaggaggtgctgcgcctgagacaggtctctgggcccctgaccagcaaacgccatcccatcatgaggattgcgcttggggggctgctcttccccgcttccaaccttcggttgccgctggttcctgccctggatggctgcctgcgccgggattcctggctggacaaacaggccgagatctcagcatctgcccccactagcctcagaagctgtgatgtagaatcaaatcccgggatatttctccctccagggactcaggcagaattcaatctccgagacattccccagcctcatgcagagccctgggccttctctttggacctgggactcaagcaggcagcaggctcaggccacctccttgctcttgggacaccagagaacccatcttggctcagtctccacctccaagatcaagagaagactcttccacctctttttgcctgaatggcctttgggcacaaggtcagaggctggatgtggaccaggccctgaacagaagccatgagatctggactcacagctgcccccagagcccaggcaatggcactgacgcttcccattaaag

SEQ ID NO: 180895 - DNA, 1158 bp, Homo sapiens
  Payload ID: 15623
  Gene Symbol: SHBG
  Gene Name: sex hormone-binding globulin
  ENST ID: ENST00000570353
  CDS Start-End: 22-567
ccgagtggacagtggctgattatggagagcagaggcccactggctacctcgcgcctgctgctgttgctgctgttgctactactgcgtcacacccgccagggatgggccctgagacctgttctccccacccagagtgcccacgaccctccggctgtccacctcagcaatggcccaggacaagagcctatcgctgtcatgacctttgacctcaccaagatcacaaaaacctcctcctcctttgaggttcgaacctgggacccagagggagtgattttttatggggataccaaccctaaggatgactggtttatgctgggacttcgagacggcaggcctgagatccaactgcacaatcactgggcccagcttacggtgggtgctgcgcctgagacaggtctctgggcccctgaccagcaaacgccatcccatcatgaggattgcgcttggggggctgctcttccccgcttccaaccttcggttgccgctggttcctgccctggatggctgcctgcgccgggattcctggctggacaaacaggccgagatctcagcatctgcccccactagcctcagaagctgtgatgtagaatcaaatcccgggatatttctccctccagggactcaggcagaattcaatctccgagacattccccagcctcatgcagagccctgggccttctctttggacctgggactcaagcaggcagcaggctcaggccacctccttgctcttgggacaccagagaacccatcttggctcagtctccacctccaagatcaaaaggtggtgttgtcttctgggtcggggccagggctggatctgcccctggtcttgggactccctcttcagctgaagctgagtatgtccagggtggtcttgagccaagggtcgaagatgaaggcccttgccctgcctcccttaggcctggctcccctccttaacctctgggccaagcctcaagggcgtctcttcctgggggctttaccaggagaagactcttccacctctttttgcctgaatggcctttgggcacaaggtcagaggctggatgtggaccaggccctgaacagaagccatgagatctggactcacagctgcccccagagcccaggcaatggcactgacgcttcccattaaagctccacctaagaaccccc

SEQ ID NO: 180896 - DNA, 1146 bp, Homo sapiens
  Payload ID: 15623
  Gene Symbol: SHBG
  Gene Name: sex hormone-binding globulin
  ENST ID: ENST00000575314
  CDS Start-End: 110-1144
aattctccatgtgcttggatcgtggggaagatgtgattaaggtctaagtgcccacgaccctccggctgtccacctcagcaatggcccaggacaagagcctatcgctgtcatgacctttgacctcaccaagatcacaaaaacctcctcctcctttgaggttcgaacctgggacccagagggagtgattttttatggggataccaaccctaaggatgactggtttatgctgggacttcgagacggcaggcctgagatccaactgcacaatcactgggcccagcttacggtgggtgctggaccacggctggatgatgggagatggcaccaggtggaagtcaagatggagggggactctgtgctgctggaggtggatggggaggaggtgctgcgcctgagacaggtctctgggcccctgaccagcaaacgccatcccatcatgaggattgcgcttggggggctgctcttccccgcttccaaccttcggttgccgctggttcctgccctggatggctgcctgcgccgggattcctggctggacaaacaggccgagatctcagcatctgcccccactagcctcagaagctgtgatgtagaatcaaatcccgggatatttctccctccagggactcaggcagaattcaatctccgagacattccccagcctcatgcagagccctgggccttctctttggacctgggactcaagcaggcagcaggctcaggccacctccttgctcttgggacaccagagaacccatcttggctcagtctccacctccaagatcaaaaggtggtgttgtcttctgggtcggggccagggctggatctgcccctggtcttgggactccctcttcagctgaagctgagtatgtccagggtggtcttgagccaagggtcgaagatgaaggcccttgccctgcctcccttaggcctggctcccctccttaacctctgggccaagcctcaagggcgtctcttcctgggggctttaccaggagaagactcttccacctctttttgcctgaatggcctttgggcacaaggtcagaggctggatgtggaccaggccctgaacagaagccatgagatctggactcacagctgcccccagagcccaggcaatggcactgacgcttcccattaaag

SEQ ID NO: 180897 - DNA, 526 bp, Homo sapiens
  Payload ID: 15623
  Gene Symbol: SHBG
  Gene Name: sex hormone-binding globulin
  ENST ID: ENST00000575729
  CDS Start-End: 247-526
gtgactgggctcctgggtagagttcaaggttggagtgaagcggcttccttgcggttgtgtgggtgtcccaacctgggtcgagataccccgcggttcaaaggctcccccgcagtgctttttaaattgacatatgcagtgataacctgctttagcctcaggctcactcacccgcccagaccctggagtgcccacgaccctccggctgtccacctcagcaatggcccaggacaagagcctatcgctgtcatgacctttgacctcaccaagatcacaaaaacctcctcctcctttgaggttcgaacctgggacccagagggagtgattttttatggggataccaaccctaaggatgactggtttatgctgggacttcgagacggcaggcctgagatccaactgcacaatcactgggcccagcttacggtgggtgctggaccacggctggatgatgggagatggcaccaggtggaagtcaagatggagggggactctgtgctgctggaggtggatggggaggaggtgctgc

SEQ ID NO: 180898 - DNA, 479 bp, Homo sapiens
  Payload ID: 15623
  Gene Symbol: SHBG
  Gene Name: sex hormone-binding globulin
  ENST ID: ENST00000572182
  CDS Start-End: 110-358
aattctccatgtgcttggatcgtggggaagatgtgattaaggtctaagtgcccacgaccctccggctgtccacctcagcaatggcccaggacaagagcctatcgctgtcatgacctttgacctcaccaagatcacaaaaacctcctcctcctttgaggttcgaacctgggacccagagggagtgattttttatggggataccaaccctaaggatgactggtttatgctgggacttcgagacggcaggcctgagatccaactgcacaatcactgggcccagcttacggtgggtgctggaccacggctggatgatgggagatggcaccaggagaagactcttccacctctttttgcctgaatggcctttgggcacaaggtcagaggctggatgtggaccaggccctgaacagaagccatgagatctggactcacagctgcccccagagcccaggcaatggcactgacgcttcccattaaag

SEQ ID NO: 180899 - DNA, 760 bp, Homo sapiens
  Payload ID: 15623
  Gene Symbol: SHBG
  Gene Name: sex hormone-binding globulin
  ENST ID: ENST00000571153
  CDS Start-End: 1-639
tgggccctgagacctgttctccccacccagagtgcccacgaccctccggctgtccacctcagcaatggcccaggacaagagcctatcgctgtcatgacctttgacctcaccaagatcacaaaaacctcctcctcctttgaggttcgaacctgggacccagagggagtgattttttatggggataccaaccctaaggatgactggtttatgctgggacttcgagacggcaggcctgagatccaactgcacaatcactgggcccagcttacggtgggtgctggaccacggctggatgatgggagatggcaccagctggttcctgccctggatggctgcctgcgccgggattcctggctggacaaacaggccgagatctcagcatctgcccccactagcctcagaagctgtgatgtagaatcaaatcccgggatatttctccctccagggactcaggcagaattcaatctccgagacattccccagcctcatgcagagccctgggccttctctttggacctgggactcaagcaggcagcaggctcaggccacctccttgctcttgggacaccagagaacccatcttggctcagtctccacctccaagatcaagagaagactcttccacctctttttgcctgaatggcctttgggcacaaggtcagaggctggatgtggaccaggccctgaacagaagccatgagatctggactcacagctgcccccagagcccaggcaatggcactgacgcttcccattaaag

SEQ ID NO: 180900 - DNA, 801 bp, Homo sapiens
  Payload ID: 15623
  Gene Symbol: SHBG
  Gene Name: sex hormone-binding globulin
  ENST ID: ENST00000570547
  CDS Start-End: 110-799
aattctccatgtgcttggatcgtggggaagatgtgattaaggtctaagtgcccacgaccctccggctgtccacctcagcaatggcccaggacaagagcctatcgctgtcatgacctttgacctcaccaagatcacaaaaacctcctcctcctttgaggttcgaacctgggacccagagggagtgattttttatggggataccaaccctaaggatgactggtttatgctgggacttcgagacggcaggcctgagatccaactgcacaatcactgggcccagcttacggtgggtgctggaccacggctggatgatgggagatggcaccaggtggaagtcaagatggagggggactctgtgctgctggaggtggatggggaggaggtgctgcgcctgagacaggtctctgggcccctgaccagcaaacgccatcccatcatgaggattgcgcttggggggctgctcttccccgcttccaaccttcggttgccgctggttcctgccctggatggctgcctgcgccgggattcctggctggacaaacaggccgagatctcagcatctgcccccactagcctcagaagctgtgatgtagaatcaaatcccgggatatttctccctccagggactcaggcagaattcaatctccgaggagaagactcttccacctctttttgcctgaatggcctttgggcacaaggtcagaggctggatgtggaccaggccctgaacagaagccatgagatctggactcacagctgcccccagagcccaggcaatggcactgacgcttcccattaaag

SEQ ID NO: 180901 - DNA, 1196 bp, Homo sapiens
  Payload ID: 15623
  Gene Symbol: SHBG
  Gene Name: sex hormone-binding globulin
  Uniprot ID: P04278
  ENST ID: ENST00000575903
  CDS Start-End: 22-1176
ccgagtggacagtggctgattatggagagcagaggcccactggctacctcgcgcctgctgctgttgctgctgttgctactactgcgtcacacccgccagggatgggccctgagacctgttctccccacccagagtgcccacgaccctccggctgtccacctcagcaatggcccaggacaagagcctatcgctgtcatgacctttgacctcaccaagatcacaaaaacctcctcctcctttgaggttcgaacctgggacccagagggagtgattttttatggggataccaaccctaaggatgactggtttatgctgggacttcgagacggcaggcctgagatccaactgcacaatcactgggcccagcttacggtgggtgctggaccacggctggatgatgggagatggcaccaggtggaagtcaagatggagggggactctgtgctgctggaggtggatggggaggaggtgctgcgcctgagacaggtctctgggcccctgaccagcaaacgccatcccatcatgaggattgcgcttggggggctgctcttccccgcttccaaccttcggttgccggccgagatctcagcatctgcccccactagcctcagaagctgtgatgtagaatcaaatcccgggatatttctccctccagggactcaggcagaattcaatctccgagacattccccagcctcatgcagagccctgggccttctctttggacctgggactcaagcaggcagcaggctcaggccacctccttgctcttgggacaccagagaacccatcttggctcagtctccacctccaagatcaaaaggtggtgttgtcttctgggtcggggccagggctggatctgcccctggtcttgggactccctcttcagctgaagctgagtatgtccagggtggtcttgagccaagggtcgaagatgaaggcccttgccctgcctcccttaggcctggctcccctccttaacctctgggccaagcctcaagggcgtctcttcctgggggctttaccaggagaagactcttccacctctttttgcctgaatggcctttgggcacaaggtcagaggctggatgtggaccaggccctgaacagaagccatgagatctggactcacagctgcccccagagcccaggcaatggcactgacgcttcccattaaagctccacctaagaaccccc

SEQ ID NO: 180902 - DNA, 776 bp, Homo sapiens
  Payload ID: 15623
  Gene Symbol: SHBG
  Gene Name: sex hormone-binding globulin
  ENST ID: ENST00000576728
  CDS Start-End: 110-655
aattctccatgtgcttggatcgtggggaagatgtgattaaggtctaagtgcccacgaccctccggctgtccacctcagcaatggcccaggacaagagcctatcgctgtcatgacctttgacctcaccaagatcacaaaaacctcctcctcctttgaggttcgaacctgggacccagagggagtgattttttatggggataccaaccctaaggatgactggtttatgctgggacttcgagacggcaggcctgagatccaactgcacaatcactgggcccagcttacggtgggtgctggaccacggctggatgatgggagatggcaccagctggttcctgccctggatggctgcctgcgccgggattcctggctggacaaacaggccgagatctcagcatctgcccccactagcctcagaagctgtgatgtagaatcaaatcccgggatatttctccctccagggactcaggcagaattcaatctccgagacattccccagcctcatgcagagccctgggccttctctttggacctgggactcaagcaggcagcaggctcaggccacctccttgctcttgggacaccagagaacccatcttggctcagtctccacctccaagatcaagagaagactcttccacctctttttgcctgaatggcctttgggcacaaggtcagaggctggatgtggaccaggccctgaacagaagccatgagatctggactcacagctgcccccagagcccaggcaatggcactgacgcttcccattaaag

SEQ ID NO: 180903 - DNA, 463 bp, Homo sapiens
  Payload ID: 15623
  Gene Symbol: SHBG
  Gene Name: sex hormone-binding globulin
  ENST ID: ENST00000575618
  CDS Start-End: 1-342
tgggccctgagacctgttctccccacccagagtgcccacgaccctccggctgtccacctcagcaatggcccaggacaagagcctatcgctgtcatgacctttgacctcaccaagatcacaaaaacctcctcctcctttgaggttcgaacctgggacccagagggagtgattttttatggggataccaaccctaaggatgactggtttatgctgggacttcgagacggcaggcctgagatccaactgcacaatcactgggcccagcttacggtgggtgctggaccacggctggatgatgggagatggcaccaggagaagactcttccacctctttttgcctgaatggcctttgggcacaaggtcagaggctggatgtggaccaggccctgaacagaagccatgagatctggactcacagctgcccccagagcccaggcaatggcactgacgcttcccattaaag

SEQ ID NO: 180904 - DNA, 984 bp, Homo sapiens
  Payload ID: 15623
  Gene Symbol: SHBG
  Gene Name: sex hormone-binding globulin
  ENST ID: ENST00000572262
  CDS Start-End: 110-982
aattctccatgtgcttggatcgtggggaagatgtgattaaggtctaagtgcccacgaccctccggctgtccacctcagcaatggcccaggacaagagcctatcgctgtcatgacctttgacctcaccaagatcacaaaaacctcctcctcctttgaggttcgaacctgggacccagagggagtgattttttatggggataccaaccctaaggatgactggtttatgctgggacttcgagacggcaggcctgagatccaactgcacaatcactgggcccagcttacggtgggtgctggaccacggctggatgatgggagatggcaccagctggttcctgccctggatggctgcctgcgccgggattcctggctggacaaacaggccgagatctcagcatctgcccccactagcctcagaagctgtgatgtagaatcaaatcccgggatatttctccctccagggactcaggcagaattcaatctccgagacattccccagcctcatgcagagccctgggccttctctttggacctgggactcaagcaggcagcaggctcaggccacctccttgctcttgggacaccagagaacccatcttggctcagtctccacctccaagatcaaaaggtggtgttgtcttctgggtcggggccagggctggatctgcccctggtcttgggactccctcttcagctgaagctgagtatgtccagggtggtcttgagccaagggtcgaagatgaaggcccttgccctgcctcccttaggcctggctcccctccttaacctctgggccaagcctcaagggcgtctcttcctgggggctttaccaggagaagactcttccacctctttttgcctgaatggcctttgggcacaaggtcagaggctggatgtggaccaggccctgaacagaagccatgagatctggactcacagctgcccccagagcccaggcaatggcactgacgcttcccattaaag

SEQ ID NO: 180905 - DNA, 785 bp, Homo sapiens
  Payload ID: 15623
  Gene Symbol: SHBG
  Gene Name: sex hormone-binding globulin
  ENST ID: ENST00000576830
  CDS Start-End: 1-783
tgggccctgagacctgttctccccacccagagtgcccacgaccctccggctgtccacctcagcaatggcccaggacaagagcctatcgctgtcatgacctttgacctcaccaagatcacaaaaacctcctcctcctttgaggttcgaacctgggacccagagggagtgattttttatggggataccaaccctaaggatgactggtttatgctgggacttcgagacggcaggcctgagatccaactgcacaatcactgggcccagcttacggtgggtgctggaccacggctggatgatgggagatggcaccaggtggaagtcaagatggagggggactctgtgctgctggaggtggatggggaggaggtgctgcgcctgagacaggtctctgggcccctgaccagcaaacgccatcccatcatgaggattgcgcttggggggctgctcttccccgcttccaaccttcggttgccgctggttcctgccctggatggctgcctgcgccgggattcctggctggacaaacaggccgagatctcagcatctgcccccactagcctcagaagctgtgatgtagaatcaaatcccgggatatttctccctccagggactcaggcagaattcaatctccgaggagaagactcttccacctctttttgcctgaatggcctttgggcacaaggtcagaggctggatgtggaccaggccctgaacagaagccatgagatctggactcacagctgcccccagagcccaggcaatggcactgacgcttcccattaaag

SEQ ID NO: 180906 - DNA, 639 bp, Homo sapiens
  Payload ID: 15623
  Gene Symbol: SHBG
  Gene Name: sex hormone-binding globulin
  ENST ID: ENST00000576478
  CDS Start-End: 110-637
aattctccatgtgcttggatcgtggggaagatgtgattaaggtctaagtgcccacgaccctccggctgtccacctcagcaatggcccaggacaagagcctatcgctgtcatgacctttgacctcaccaagatcacaaaaacctcctcctcctttgaggttcgaacctgggacccagagggagtgattttttatggggataccaaccctaaggatgactggtttatgctgggacttcgagacggcaggcctgagatccaactgcacaatcactgggcccagcttacggtgggtgctggaccacggctggatgatgggagatggcaccagctggttcctgccctggatggctgcctgcgccgggattcctggctggacaaacaggccgagatctcagcatctgcccccactagcctcagaagctgtgatgtagaatcaaatcccgggatatttctccctccagggactcaggcagaattcaatctccgaggagaagactcttccacctctttttgcctgaatggcctttgggcacaaggtcagaggctggatgtggaccaggccctgaacagaagccatgagatctggactcacagctgcccccagagcccaggcaatggcactgacgcttcccattaaag

SEQ ID NO: 180907 - DNA, 1382 bp, Homo sapiens
  Payload ID: 15623
  Gene Symbol: SHBG
  Gene Name: sex hormone-binding globulin
  ENST ID: ENST00000570527
  CDS Start-End: 22-195
ccgagtggacagtggctgattatggagagcagaggcccactggctacctcgcgcctgctgctgttgctgctgttgctactactgcgtcacacccgccagggatgggccctgagacctgttctccccacccaggtgcaggagcgggacagggcactcagctcatgcagtcttcccttctctcctctggccctgtagcagggcctctccctctgtctgtctctgacatgtccctactcagctttgtttgttttctctttctgatagagtgcccacgaccctccggctgtccacctcagcaatggcccaggacaagagcctatcgctgtcatgacctttgacctcaccaagatcacaaaaacctcctcctcctttgaggttcgaacctgggacccagagggagtgattttttatggggataccaaccctaaggatgactggtttatgctgggacttcgagacggcaggcctgagatccaactgcacaatcactgggcccagcttacggtgggtgctggaccacggctggatgatgggagatggcaccaggtggaagtcaagatggagggggactctgtgctgctggaggtggatggggaggaggtgctgcgcctgagacaggtctctgggcccctgaccagcaaacgccatcccatcatgaggattgcgcttggggggctgctcttccccgcttccaaccttcggttgccgctggttcctgccctggatggctgcctgcgccgggattcctggctggacaaacaggccgagatctcagcatctgcccccactagcctcagaagctgtgatgtagaatcaaatcccgggatatttctccctccagggactcaggcagaattcaatctccgagacattccccagcctcatgcagagccctgggccttctctttggacctgggactcaagcaggcagcaggctcaggccacctccttgctcttgggacaccagagaacccatcttggctcagtctccacctccaagatcaaaaggtggtgttgtcttctgggtcggggccagggctggatctgcccctggtcttgggactccctcttcagctgaagctgagtatgtccagggtggtcttgagccaagggtcgaagatgaaggcccttgccctgcctcccttaggcctggctcccctccttaacctctgggccaagcctcaagggcgtctcttcctgggggctttaccaggagaagactcttccacctctttttgcctgaatggcctttgggcacaaggtcagaggctggatgtggaccaggccctgaacagaagccatgagatctggactcacagctgcccccagagcccaggcaatggcactgacgcttcccattaaagctccacctaagaaccccc

SEQ ID NO: 180908 - DNA, 623 bp, Homo sapiens
  Payload ID: 15623
  Gene Symbol: SHBG
  Gene Name: sex hormone-binding globulin
  ENST ID: ENST00000576152
  CDS Start-End: 1-621
tgggccctgagacctgttctccccacccagagtgcccacgaccctccggctgtccacctcagcaatggcccaggacaagagcctatcgctgtcatgacctttgacctcaccaagatcacaaaaacctcctcctcctttgaggttcgaacctgggacccagagggagtgattttttatggggataccaaccctaaggatgactggtttatgctgggacttcgagacggcaggcctgagatccaactgcacaatcactgggcccagcttacggtgggtgctggaccacggctggatgatgggagatggcaccagctggttcctgccctggatggctgcctgcgccgggattcctggctggacaaacaggccgagatctcagcatctgcccccactagcctcagaagctgtgatgtagaatcaaatcccgggatatttctccctccagggactcaggcagaattcaatctccgaggagaagactcttccacctctttttgcctgaatggcctttgggcacaaggtcagaggctggatgtggaccaggccctgaacagaagccatgagatctggactcacagctgcccccagagcccaggcaatggcactgacgcttcccattaaag

SEQ ID NO: 180909 - DNA, 4002 bp, Homo sapiens
  Payload ID: 15624
  Gene Symbol: SFI1
  Gene Name: SFI1 centrin binding protein
  Uniprot ID: A8K8P3
  ENST ID: ENST00000400288
  CDS Start-End: 106-3834
aagaagcaggtcccggatcgccgtataccgccgggttttctcccaacgtcaggcccgatggctcggcttccccagttagaaggggaagataaaagactttgattcatgaagaatctgctcactgagaagtgtatatcaagccacaatttccatcaaaaagtgattaagcagagaatggagaagaaggttgattccaggtattttaaggatggtgcagttaagaaaccttattctgcaaagacactgtccaacaagaagtcttctgcatcctttgggatccggagggagttacctagtaccagtcatctagtgcagtatcgtggcacacatacttgtacccgacagggccggttaagagaactgcgcatcagatgcgtggccagaaagttcttatatttatggattcgaatgacttttggaagagtatttccctctaaagccagattttactatgagcagcgattactacggaaggtcttcgaagaatggaaagaggagtggtgggttttccagcacgagtggaaactctgtgttcgagctgactgtcactacaggtattacctgtacaacctgatgttccagacgtggaagacctatgtgcgtcagcagcaggagatgaggaacaagtacattagagccgaggttcatgatgcaaagcaaaagatgcgacaggcctggaagtcctggttgatctacgtggttgttcgtaggaccaaacttcagatgcagactacagctctggagtttaggcaacggattatcttacgggtgtggtggagcacgtggaggcagcgactaggacaggtccgtgtgagccgtgccctccatgcctctgctttgaagcacagggccctgagcctccaggtgcaggcttggtcacagtggcgggaacagctcctgtatgtccagaaggagaaacaaaaggttgtctctgcagtgaaacatcatcagcactggcaaaaacggagatttctaaaggcctggcttgaatacctgcaagtccgcagagtgaagagacagcagaatgagatggctgagcgattccatcatgtcactgtgctccagatatacttctgtgactggcagcaggcctgggagcggagggagagcttgtacgctcaccatgcccaggtggagaaactggccaggaagatggccctgcggcgcgcctttactcactggaaacactacatgctgctgtgtgcagaagaagctgcccagtttgagatggcagaagagcaccacaggcacagccagctgtatttttgctttagagccctaaaagacaatgtgacccacgctcatctccagcaaataagaaggaatcttgctcaccagcagcatggtgtcacgctgctgcacaggttctggaacctctggcggtctcagattgagcagaaaaaggaaagagagctgctccccttactgcatgctgcctgggaccactacagaatagcactgctgtgcaaatgtatcgaattgtggctacagtatactcagaagaggcggtacaagcagctgctacaggccagagcggatggtcatttccagcagagagccctgcctgctgccttccacacatggaacagactctggcgatggcgccaccaggaaaatgtcctcagtgcaagagcaacacgtttccacagggagacattagagaagcaagtattttctctctggaggcagaagatgtttcagcatcgagaaaaccgcctggcagagagaatggccatccttcacgcagagcgacagcttctgtataggtcttggttcatgtggcaccagcaggcagcagcacgtcaccaggagcaggagtggcaaacagtggcctgtgcccaccaccgccacgggcggctcaagaaagctttctgcctctggagggaaagtgcccaagggctcagaacagagaggacgggcagggtgcgggcagcagaattccacatggcccagctcctgcgttgggcctggagccagtggagggagtgcctggccctgcggggagcggagcggcagaagctgatgcgagcagacctgcaccaccagcacagcgtgctgcacagggcgctgcaggcatgggtgacttaccagggcagggtgcgaagcatcctccgggaggtggcagccagggagagccagcacaacaggcagctgctgcgcggggcattacgtcgctggaaagagaacaccatggcccgagtggatgaagccaaaaaaacctttcaagcaagtactcattacagaaggaccatatgttccaaggtcctggtccagtggcgggaagctgtgtcagtgcagatgtattaccgacagcaggaggactgtgccatctgggaggcccagaaggtgctggacaggggctgtctgcggacctggtttcagcgctggtgggactgcagccggaggtcagcccagcagagactgcagctggagagggcagtgcaacaccaccaccggcagctgctgctggaggggctggcccggtggaagacgcaccatctgcagtgtgtcaggaagaggctcctgcacaggcagagcacccaactgctggcacagagactcagccggacctgcttccgccagtggagacaacagctggcagccaggaggcaggagcagcgggcgacagtgcgggccctgtggttctgggccttctcgctgcaggcaaaggtgtgggccacgtggctggcctttgtactggaaaggaggagaaagaaggcgcggctgcagtgggcgctccaggcctaccaggggcagctcctccaggagggtgccacgcggctcctgcgctttgcagccagcatgaaggcctcccggcagcagctgcaggcccagcagcaggtccaggcggctcacagtctccatcgtgccgtccgccgctgtgccacgctctggaaacagaaagtgctgggccggggcgggaagcctcagcccctggcagccatcgcacccagcaggaaagtgacgtttgagggtccccttctcaaccgcattgctgctggggctggggatggcacccttgagaccaagaggccacaggcttctcggcctctgggagctctgggccgcctggctgctgaggagccccacgccctggagctcaacactgcccactcagcgaggaagcagccgcgacgcccacacttcctgttggagcctgcgcagagccagaggcctcagaagccacaggaacatggcctaggcatggctcagccagcagccccctccctgacgcggcccttcctggcagaggccccgacagcactggtcccacacagccccctgcctggggccctgtcaagcgcccctggcccgaagcagcccccgacggcaagcacaggcccggagctgctgctgctgcctctttcctccttcatgccctgcggggcggctgcaccagccagggtgtcagcacagcgggctactcctagggataagcccccggtcccctcatccctggccagtgtccctgacccccatctactccttcctggggacttctcagccaccagggctgggcctggactttcaactgcaggcagcctggaccttgaggctgaacttgaggagatccagcagcaactactgcactaccagaccaccaagcagaacctctggtcctgtcggcggcaagcgagcagcctgcgcaggtggctggagctgaacagagaggagccggggcctgaggaccaggaagtagagcagcaggtgcagaaagagctggaacaggtggaaatgcagatccagctgctggcagaggagctccaggctcagcgccagcccattggcgcctgcgttgcccgcatccaggccctgcggcaggccctgtgctagcgtgttcgcaccaggaacgcaggtgctgggctgtcggggaggcctcaggccacctccaggaacagaacacagttttaagtttgattttttttatttcaaaatgctttgcaattaaatgaattactgttcagaagtctcccacttttcatacaaaaatactgtgctact

SEQ ID NO: 180910 - DNA, 3739 bp, Homo sapiens
  Payload ID: 15624
  Gene Symbol: SFI1
  Gene Name: SFI1 centrin binding protein
  Uniprot ID: A8K8P3
  ENST ID: ENST00000400289
  CDS Start-End: 127-3609
ggcgggcgtggaccgcgcgggagttaagaagcaggtcccggatcgccgtataccgccgggttttctcccaacgtcaggcccgatggctcggcttccccagaaggggaagataaaagactttgattcatgaagaatctgctcactgagaagtgtatatcaagccacaatttccatcaaaaagtgattaagcagagaatggagaagaaggttgattccagattttactatgagcagcgattactacggaaggtcttcgaagaatggaaagaggagtggtgggttttccagcacgagtggaaactctgtgttcgagctgactgtcactacaggtattacctgtacaacctgatgttccagacgtggaagacctatgtgcgtcagcagcaggagatgaggaacaagtacattagagccgaggttcatgatgcaaagcaaaagatgcgacaggcctggaagtcctggttgatctacgtggttgttcgtaggaccaaacttcagatgcagactacagctctggagtttaggcaacggattatcttacgggtgtggtggagcacgtggaggcagcgactaggacaggtccgtgtgagccgtgccctccatgcctctgctttgaagcacagggccctgagcctccaggtgcaggcttggtcacagtggcgggaacagctcctgtatgtccagaaggagaaacaaaaggttgtctctgcagtgaaacatcatcagcactggcaaaaacggagatttctaaaggcctggcttgaatacctgcaagtccgcagagtgaagagacagcagaatgagatggctgagcgattccatcatgtcactgtgctccagatatacttctgtgactggcagcaggcctgggagcggagggagagcttgtacgctcaccatgcccaggtggagaaactggccaggaagatggccctgcggcgcgcctttactcactggaaacactacatgctgctgtgtgcagaagaagctgcccagtttgagatggcagaagagcaccacaggcacagccagctgtatttttgctttagagccctaaaagacaatgtgacccacgctcatctccagcaaataagaaggaatcttgctcaccagcagcatggtgtcacgctgctgcacaggttctggaacctctggcggtctcagattgagcagaaaaaggaaagagagctgctccccttactgcatgctgcctgggaccactacagaatagcactgctgtgcaaatgtatcgaattgtggctacagtatactcagaagaggcggtacaagcagctgctacaggccagagcggatggtcatttccagcagagagccctgcctgctgccttccacacatggaacagactctggcgatggcgccaccaggaaaatgtcctcagtgcaagagcaacacgtttccacagggagacattagagaagcaagtattttctctctggaggcagaagatgtttcagcatcgagaaaaccgcctggcagagagaatggccatccttcacgcagagcgacagcttctgtataggtcttggttcatgtggcaccagcaggcagcagcacgtcaccaggagcaggagtggcaaacagtggcctgtgcccaccaccgccacgggcggctcaagaaagctttctgcctctggagggaaagtgcccaagggctcagaacagagaggacgggcagggtgcgggcagcagaattccacatggcccagctcctgcgttgggcctggagccagtggagggagtgcctggccctgcggggagcggagcggcagaagctgatgcgagcagacctgcaccaccagcacagcgtgctgcacagggcgctgcaggcatgggtgacttaccagggcagggtgcgaagcatcctccgggaggtggcagccagggagagccagcacaacaggcagctgctgcgcggggcattacgtcgctggaaagagaacaccatggcccgagtggatgaagccaaaaaaacctttcaagcaagtactcattacagaaggaccatatgttccaaggtcctggtccagtggcgggaagctgtgtcagtgcagatgtattaccgacagcaggaggactgtgccatctgggaggcccagaaggtgctggacaggggctgtctgcggacctggtttcagcgctggtgggactgcagccggaggtcagcccagcagagactgcagctggagagggcagtgcaacaccaccaccggcagctgctgctggaggggctggcccggtggaagacgcaccatctgcagtgtgtcaggaagaggctcctgcacaggcagagcacccaactgctggcacagagactcagccggacctgcttccgccagtggagacaacagctggcagccaggaggcaggagcagcgggcgacagtgcgggccctgtggttctgggccttctcgctgcaggcaaaggtgtgggccacgtggctggcctttgtactggaaaggaggagaaagaaggcgcggctgcagtgggcgctccaggcctaccaggggcagctcctccaggagggtgccacgcggctcctgcgctttgcagccagcatgaaggcctcccggcagcagctgcaggcccagcagcaggtccaggcggctcacagtctccatcgtgccgtccgccgctgtgccacgctctggaaacagaaagtgctgggccggggcgggaagcctcagcccctggcagccatcgcacccagcaggaaagtgacgtttgagggtccccttctcaaccgcattgctgctggggctggggatggcacccttgagaccaagaggccacaggcttctcggcctctgggagctctgggccgcctggctgctgaggagccccacgccctggagctcaacactgcccactcagcgaggaagcagccgcgacgcccacacttcctgttggagcctgcgcagagccagaggcctcagaagccacaggaacatggcctaggcatggctcagccagcagccccctccctgacgcggcccttcctggcagaggccccgacagcactggtcccacacagccccctgcctggggccctgtcaagcgcccctggcccgaagcagcccccgacggcaagcacaggcccggagctgctgctgctgcctctttcctccttcatgccctgcggggcggctgcaccagccagggtgtcagcacagcgggctactcctagggataagcccccggtcccctcatccctggccagtgtccctgacccccatctactccttcctggggacttctcagccaccagggctgggcctggactttcaactgcaggcagcctggaccttgaggctgaacttgaggagatccagcagcaactactgcactaccagaccaccaagcagaacctctggtcctgtcggcggcaagcgagcagcctgcgcaggtggctggagctgaacagagaggagccggggcctgaggaccaggaagtagagcagcaggtgcagaaagagctggaacaggtggaaatgcagatccagctgctggcagaggagctccaggctcagcgccagcccattggcgcctgcgttgcccgcatccaggccctgcggcaggccctgtgctagcgtgttcgcaccaggaacgcaggtgctgggctgtcggggaggcctcaggccacctccaggaacagaacacagttttaagtttgattttttttatttcaaaatgctttgcaattaaatgaattactgttca

SEQ ID NO: 180911 - DNA, 448 bp, Homo sapiens
  Payload ID: 15624
  Gene Symbol: SFI1
  Gene Name: SFI1 centrin binding protein
  ENST ID: ENST00000450787
  CDS Start-End: 1-448
aagaagtcttctgcatcctttgggatccggagggagttacctagtaccagtcatctagtgcagtatcgtggcacacatacttgtacccgacagggccggttaagagaactgcgcatcagatgcgtggccagaaagttcttatatttatggattcgaatgacttttggaagagtatttccctctaaagccaggtattacctgtacaacctgatgttccagacgtggaagacctatgtgcgtcagcagcaggagatgaggaacaagtacattagagccgaggttcatgatgcaaagcaaaagatgcgacaggcctggaagtcctggttgatctacgtggttgttcgtaggaccaaacttcagatgcagactacagctctggagtttaggcaacggattatcttacgggtgtggtggagcacgtggaggcagcgactaggacaggtccgtg

SEQ ID NO: 180912 - DNA, 656 bp, Homo sapiens
  Payload ID: 15624
  Gene Symbol: SFI1
  Gene Name: SFI1 centrin binding protein
  ENST ID: ENST00000411518
  CDS Start-End: 150-458
gaggcgcgcgaagcgctgaggcgggcgtggaccgcgcgggagttaagaagcaggtcccggatcgccgtataccgccgggttttctcccaacgtcaggcccgatggctcggcttccccagttagaaggggaagataaaagactttgattcatgaagaatctgctcactgagaagtgtatatcaagccacaatttccatcaaaaagtgattaagcagagaatggagaagaaggttgattccaggtattttaaggatggtgcagttaagaaaccttattctgcaaagacactgtccaacaagaagtcttctgcatcctttgggatccggagggagttacctagtaccagtcatctagtgcagtatcgtggcacacatacttgtacccgacagggccggttaagagaactgcgcatcaggggctcacagtgcagagggaatgacagacaccctgtgagctgatctctgtgatatggtgtcataacattacaggaggggtttgaacagagtgctgagagtacacagctactcactctgtttacattggagaaggttcaggcatttgccggccattttaggcaggaagaataatatgaacaaaagaattattatatgcgtggccagaaagttcttatatttatggattcgaatgacttttgg

SEQ ID NO: 180913 - DNA, 1817 bp, Homo sapiens
  Payload ID: 15624
  Gene Symbol: SFI1
  Gene Name: SFI1 centrin binding protein
  ENST ID: ENST00000417682
  CDS Start-End: 1-1817
tatttttgctttagagccctaaaagacaatgtgacccacgctcatctccagcaaataagaaggaatcttgctcaccagcagcatggtgtcacgctgctgcacaggttctggaacctctggcggtctcagattgagcagaaaaaggaaagagagctgctccccttactgcatgctgcctgggaccactacagaatagcactgctgtgcaaatgtatcgaattgtggctacagtatactcagaagaggcggtacaagcagctgctacaggccagagcggatggtcatttccagcagagagccctgcctgctgccttccacacatggaacagactctggcgatggcgccaccaggaaaatgtcctcagtgcaagagcaacacgtttccacagggagacattagagaagcaagtattttctctctggaggcagaagatgtttcagcatcgagaaaaccgcctggcagagagaatggccatccttcacgcagagcgacagcttctgtataggtcttggttcatgtggcaccagcaggcagcagcacgtcaccaggagcaggagtggcaaacagtggcctgtgcccaccaccgccacgggcggctcaagaaagctttctgcctctggagggaaagtgcccaagggctcagaacagagaggacgggcagggtgcgggcagcagaattccacatggcccagctcctgcgttgggcctggagccagtggagggagacttaccagggcagggtgcgaagcatcctccgggaggtggcagccagggagagccagcacaacaggcagctgctgcgcggggcattacgtcgctggaaagagaacaccatggcccgagtggatgaagccaaaaaaacctttcaagcaagtactcattacagaaggaccatatgttccaaggtcctggtccagtggcgggaagctgtgtcagtgcagatgtattaccgacagcaggaggactgtgccatctgggaggcccagaaggtgctggacaggggctgtctgcggacctggtttcagcgctggtgggactgcagccggaggtcagcccagcagagactgcagctggagagggcagtgcaacaccaccaccggcagctgctgctggaggggctggcccggtggaagacgcaccatctgcagtgtgtcaggaagaggctcctgcacaggcagagcacccaactgctggcacagagactcagccggacctgcttccgccagtggagacaacagctggcagccaggaggcaggagcagcgggcgacagtgcgggccctgtggttctgggccttctcgctgcaggcaaaggtgtgggccacgtggctggcctttgtactggaaaggaggagaaagaaggcgcggctgcagtgggcgctccaggcctaccaggggcagctcctccaggagggtgccacgcggctcctgcgctttgcagccagcatgaaggcctcccggcagcagctgcaggcccagcagcaggtccaggcggctcacagtctccatcgtgccgtccgccgctgtgccacgctctggaaacagaaagtgctgggccggggcgggaagcctcagcccctggcagccatcgcacccagcaggaaagtgacgtttgagggtccccttctcaaccgcattgctgctggggctggggatggcacccttgagaccaagaggccacaggcttctcggcctctgggagctctgggccgcctggctgctgaggagccccacgccctggagctcaacactgcccactcagcgaggaagcagccgcgacgcccacacttcctgttggagcctgcgcagagccagag

SEQ ID NO: 180914 - DNA, 3579 bp, Homo sapiens
  Payload ID: 15624
  Gene Symbol: SFI1
  Gene Name: SFI1 centrin binding protein
  ENST ID: ENST00000443011
  CDS Start-End: 282-3551
gctgcaaagcaacccgaagtgcgccacctacccgactgaggctgcgcaagccccggggtctgggcggggtggtcctcgtgcgcgccgcgtcgccgtggagacgagggcgggcccgcgcgagactggcgtctagaggcgcgcgaagcgctgaggcgggcgtggaccgcgcgggagttaagaagcaggtcccggatcgccgtataccgccgggttttctcccaacgtcaggcccgatggctcggcttccccagttagaaggggaagataaaagactttgattcatgaagaatctgctcactgagaagtgtatatcaagccacaatttccatcaaaaagtgattaagcagagaatggagaagaaggttgattccagattttactatgagcagcgattactacggaaggtcttcgaagaatggaaagaggagtggtgggttttccagcacgagtggaaactctgtgttcgagctgactgtcactacagggtgtggtggagcacgtggaggcagcgactaggacaggtccgtgtgagccgtgccctccatgcctctgctttgaagcacagggccctgagcctccaggtgcaggcttggtcacagtggcgggaacagctcctgtatgtccagaaggagaaacaaaaggttgtctctgcagtgaaacatcatcagcactggcaaaaacggagatttctaaaggcctggcttgaatacctgcaagtccgcagagtgaagagacagcagaatgagatggctgagcgattccatcatgtcactgtgctccagatatacttctgtgactggcagcaggcctgggagcggagggagagcttgtacgctcaccatgcccaggtggagaaactggccaggaagatggccctgcggcgcgcctttactcactggaaacactacatgctgctgtgtgcagaagaagctgcccagtttgagatggcagaagagcaccacaggcacagccagctgtatttttgctttagagccctaaaagacaatgtgacccacgctcatctccagcaaataagaaggaatcttgctcaccagcagcatggtgtcacgctgctgcacaggttctggaacctctggcggtctcagattgagcagaaaaaggaaagagagctgctccccttactgcatgctgcctgggaccactacagaatagcactgctgtgcaaatgtatcgaattgtggctacagtatactcagaagaggcggtacaagcagctgctacaggccagagcggatggtcatttccagcagagagccctgcctgctgccttccacacatggaacagactctggcgatggcgccaccaggaaaatgtcctcagtgcaagagcaacacgtttccacagggagacattagagaagcaagtattttctctctggaggcagaagatgtttcagcatcgagaaaaccgcctggcagagagaatggccatccttcacgcagagcgacagcttctgtataggtcttggttcatgtggcaccagcaggcagcagcacgtcaccaggagcaggagtggcaaacagtggcctgtgcccaccaccgccacgggcggctcaagaaagctttctgcctctggagggaaagtgcccaagggctcagaacagagaggacgggcagggtgcgggcagcagaattccacatggcccagctcctgcgttgggcctggagccagtggagggagtgcctggccctgcggggagcggagcggcagaagctgatgcgagcagacctgcaccaccagcacagcgtgctgcacagggcgctgcaggcatgggtgacttaccagggcagggtgcgaagcatcctccgggaggtggcagccagggagagccagcacaacaggcagctgctgcgcggggcattacgtcgctggaaagagaacaccatggcccgagtggatgaagccaaaaaaacctttcaagcaagtactcattacagaaggaccatatgttccaaggtcctggtccagtggcgggaagctgtgtcagtgcagatgtattaccgacagcaggaggactgtgccatctgggaggcccagaaggtgctggacaggggctgtctgcggacctggtttcagcgctggtgggactgcagccggaggtcagcccagcagagactgcagctggagagggcagtgcaacaccaccaccggcagctgctgctggaggggctggcccggtggaagacgcaccatctgcagtgtgtcaggaagaggctcctgcacaggcagagcacccaactgctggcacagagactcagccggacctgcttccgccagtggagacaacagctggcagccaggaggcaggagcagcgggcgacagtgcgggccctgtggttctgggccttctcgctgcaggcaaaggtgtgggccacgtggctggcctttgtactggaaaggaggagaaagaaggcgcggctgcagtgggcgctccaggcctaccaggggcagctcctccaggagggtgccacgcggctcctgcgctttgcagccagcatgaaggcctcccggcagcagctgcaggcccagcagcaggtccaggcggctcacagtctccatcgtgccgtccgccgctgtgccacgctctggaaacagaaagtgctgggccggggcgggaagcctcagcccctggcagccatcgcacccagcaggaaagtgacgtttgagggtccccttctcaaccgcattgctgctggggctggggatggcacccttgagaccaagaggccacaggcttctcggcctctgggagctctgggccgcctggctgctgaggagccccacgccctggagctcaacactgcccactcagcgaggaagcagccgcgacgcccacacttcctgttggagcctgcgcagagccagaggcctcagaagccacaggaacatggcctaggcatggctcagccagcagccccctccctgacgcggcccttcctggcagaggccccgacagcactggtcccacacagccccctgcctggggccctgtcaagcgcccctggcccgaagcagcccccgacggcaagcacaggcccggagctgctgctgctgcctctttcctccttcatgccctgcggggcggctgcaccagccagggtgtcagcacagcgggctactcctagggataagcccccggtcccctcatccctggccagtgtccctgacccccatctactccttcctggggacttctcagccaccagggctgggcctggactttcaactgcaggcagcctggaccttgaggctgaacttgaggagatccagcagcaactactgcactaccagaccaccaagcagaacctctggtcctgtcggcggcaagcgagcagcctgcgcaggtggctggagctgaacagagaggagccggggcctgaggaccaggaagtagagcagcaggtgcagaaagagctggaacaggtggaaatgcagatccagctgctggcagaggagctccaggctcagcgccagcccattggcgcctgcgttgcccgcatccaggccctgcggcaggccctgtgctagcgtgttcgcaccaggaacgcaggtgctg

SEQ ID NO: 180915 - DNA, 4162 bp, Homo sapiens
  Payload ID: 15624
  Gene Symbol: SFI1
  Gene Name: SFI1 centrin binding protein
  Uniprot ID: A8K8P3
  ENST ID: ENST00000432498
  CDS Start-End: 394-4029
agcaagctgagctcagagcgaagctggcgagccaaggagataaagaaccctcggtggggatgcccagagggtgcatgctccacgcccctcgaaaccgattctcattgctgctgctgcaaagcaacccgaagtgcgccacctacccgactgaggctgcgcaagccccggggtctgggcggggtggtcctcgtgcgcgccgcgtcgccgtggagacgagggcgggcccgcgcgagactggcgtctagaggcgcgcgaagcgctgaggcgggcgtggaccgcgcgggagttaagaagcaggtcccggatcgccgtataccgccgggttttctcccaacgtcaggcccgatggctcggcttccccagttagaaggggaagataaaagactttgattcatgaagaatctgctcactgagaagtgtatatcaagccacaatttccatcaaaaagtgattaagcagagaatggagaagaaggttgattccaggtattttaaggatggtgcagttaagaaaccttattctgcaaagacactgtccaacaagaagtcttctgcatcctttgggatccggagggagttacctagtaccagtcatctagtgcagtatcgtggcacacatacttgtacccgacagggccggttaagagaactgcgcatcagatgcgtggccagaaagttcttatatttatggattcgaatgacttttggaagagtatttccctctaaagccagattttactatgagcagcgattactacggaaggtcttcgaagaatggaaagaggagtggtgggttttccagcacgagtggaaactctgtgttcgagctgactgtcactacaggtattacctgtacaacctgatgttccagacgtggaagacctatgtgcgtcagcagcaggagatgaggaacaagtacattagagccgaggttcatgatgcaaagcaaaagatgcgacaggcctggaagtcctggttgatctacgtggttgttcgtaggaccaaacttcagatgcagactacagctctggagtttaggcaacggattatcttacgggtgtggtggagcacgtggaggcagcgactaggacaggtccgtgtgagccgtgccctccatgcctctgctttgaagcacagggccctgagcctccaggtgcaggcttggtcacagtggcgggaacagctcctgtatgtccagaaggagaaacaaaaggttgtctctgcagtgaaacatcatcagcactggcaaaaacggagatttctaaaggcctggcttgaatacctgcaagtccgcagagtgaagagacagcagaatgagatggctgagcgattccatcatgtcactgtgctccagatatacttctgtgactggcagcaggcctgggagcggagggagagcttgtacgctcaccatgcccaggtggagaaactggccaggaagatggccctgcggcgcgcctttactcactggaaacactacatgctgctgtgtgcagaagaagctgcccagtttgagatggcagaagagcaccacaggcacagccagctgctgctgcacaggttctggaacctctggcggtctcagattgagcagaaaaaggaaagagagctgctccccttactgcatgctgcctgggaccactacagaatagcactgctgtgcaaatgtatcgaattgtggctacagtatactcagaagaggcggtacaagcagctgctacaggccagagcggatggtcatttccagcagagagccctgcctgctgccttccacacatggaacagactctggcgatggcgccaccaggaaaatgtcctcagtgcaagagcaacacgtttccacagggagacattagagaagcaagtattttctctctggaggcagaagatgtttcagcatcgagaaaaccgcctggcagagagaatggccatccttcacgcagagcgacagcttctgtataggtcttggttcatgtggcaccagcaggcagcagcacgtcaccaggagcaggagtggcaaacagtggcctgtgcccaccaccgccacgggcggctcaagaaagctttctgcctctggagggaaagtgcccaagggctcagaacagagaggacgggcagggtgcgggcagcagaattccacatggcccagctcctgcgttgggcctggagccagtggagggagtgcctggccctgcggggagcggagcggcagaagctgatgcgagcagacctgcaccaccagcacagcgtgctgcacagggcgctgcaggcatgggtgacttaccagggcagggtgcgaagcatcctccgggaggtggcagccagggagagccagcacaacaggcagctgctgcgcggggcattacgtcgctggaaagagaacaccatggcccgagtggatgaagccaaaaaaacctttcaagcaagtactcattacagaaggaccatatgttccaaggtcctggtccagtggcgggaagctgtgtcagtgcagatgtattaccgacagcaggaggactgtgccatctgggaggcccagaaggtgctggacaggggctgtctgcggacctggtttcagcgctggtgggactgcagccggaggtcagcccagcagagactgcagctggagagggcagtgcaacaccaccaccggcagctgctgctggaggggctggcccggtggaagacgcaccatctgcagtgtgtcaggaagaggctcctgcacaggcagagcacccaactgctggcacagagactcagccggacctgcttccgccagtggagacaacagctggcagccaggaggcaggagcagcgggcgacagtgcgggccctgtggttctgggccttctcgctgcaggcaaaggtgtgggccacgtggctggcctttgtactggaaaggaggagaaagaaggcgcggctgcagtgggcgctccaggcctaccaggggcagctcctccaggagggtgccacgcggctcctgcgctttgcagccagcatgaaggcctcccggcagcagctgcaggcccagcagcaggtccaggcggctcacagtctccatcgtgccgtccgccgctgtgccacgctctggaaacagaaagtgctgggccggggcgggaagcctcagcccctggcagccatcgcacccagcaggaaagtgacgtttgagggtccccttctcaaccgcattgctgctggggctggggatggcacccttgagaccaagaggccacaggcttctcggcctctgggagctctgggccgcctggctgctgaggagccccacgccctggagctcaacactgcccactcagcgaggaagcagccgcgacgcccacacttcctgttggagcctgcgcagagccagaggcctcagaagccacaggaacatggcctaggcatggctcagccagcagccccctccctgacgcggcccttcctggcagaggccccgacagcactggtcccacacagccccctgcctggggccctgtcaagcgcccctggcccgaagcagcccccgacggcaagcacaggcccggagctgctgctgctgcctctttcctccttcatgccctgcggggcggctgcaccagccagggtgtcagcacagcgggctactcctagggataagcccccggtcccctcatccctggccagtgtccctgacccccatctactccttcctggggacttctcagccaccagggctgggcctggactttcaactgcaggcagcctggaccttgaggctgaacttgaggagatccagcagcaactactgcactaccagaccaccaagcagaacctctggtcctgtcggcggcaagcgagcagcctgcgcaggtggctggagctgaacagagaggagccggggcctgaggaccaggaagtagagcagcaggtgcagaaagagctggaacaggtggaaatgcagatccagctgctggcagaggagctccaggctcagcgccagcccattggcgcctgcgttgcccgcatccaggccctgcggcaggccctgtgctagcgtgttcgcaccaggaacgcaggtgctgggctgtcggggaggcctcaggccacctccaggaacagaacacagttttaagtttgattttttttatttcaaaatgctttgcaattaaatgaattactgttcagaa

SEQ ID NO: 180916 - DNA, 2625 bp, Homo sapiens
  Payload ID: 15624
  Gene Symbol: SFI1
  Gene Name: SFI1 centrin binding protein
  ENST ID: ENST00000452250
  CDS Start-End: 1-1468
tgaatacctgcaagtccgcagagtgaagagacagcagaatgagatggctgagcgattccatcatgtcactgtgctccagatatacttctgtgactggcagcaggcctgggagcggagggagagcttgtacgctcaccatgcccaggtggagaaactggccaggaagatggccctgcggcgcgcctttactcactggaaacactacatgctgctgtgtgcagaagaagctgcccagtttgagatggcagaagagcaccacaggcacagccagctgtatttttgctttagagccctaaaagacaatgtgacccacgctcatctccagcaaataagaaggaatcttgctcaccagcagcatggtgtcacgctgctgcacaggttctggaacctctggcggtctcagattgagcagaaaaaggaaagagagctgctccccttactgcatgctgcctgggaccactacagaatagcactgctgtgcaaatgtatcgaattgtggctacagtatactcagaagaggcggtacaagcagctgctacaggccagagcggatggtcatttccagcagagagccctgcctgctgccttccacacatggaacagactctggcgatggcgccaccaggaaaatgtcctcagtgcaagagcaacacgtttccacagggagacattagagaagcaagtattttctctctggaggcagaagatgtttcagcatcgagaaaaccgcctggcagagagaatggccatccttcacgcagagcgacagcttctgtataggtcttggttcatgtggcaccagcaggcagcagcacgtcaccaggagcaggagtggcaaacagtggcctgtgcccaccaccgccacgggcggctcaagaaagctttctgcctctggagggaaagtgcccaagggctcagaacagagtcctggtccagtggcgggaagctgtgtcagtgcagatgtattaccgacagcaggaggactgtgccatctgggaggcccagaaggtgctggacaggggctgtctgcggacctggtttcagcgctggtgggactgcagccggaggtcagcccagcagagactgcagctggagagggcagtgcaacaccaccaccggcagctgctgctggaggggctggcccggtggaagacgcaccatctgcagtgtgtcaggaagaggctcctgcacaggcagagcacccaactgctggcacagagactcagccggacctgcttccgccagtggagacaacagctggcagccaggaggcaggagcagcgggcgacagtgcgggccctgtggttctgggccttctcgctgcaggcaaaggtgtgggccacgtggctggcctttgtactggaaaggaggagaaagaaggcgcggctgcagtgggcgctccaggcctaccaggggcagctcctccaggagggtgccacgcggctcctgcgctttgcagccagcatgaaggcctcccggcagcagctgcaggcccagcagcaggtccaggcggctcacagtctccatcgtgccgtccgccgctgtgccacgctctggaaacagaaagtgctgggccggggcgggaagcctcagcccctggcagccatcgcacccagcaggaaagtgacgtttgagggtccccttctcaaccgcattgctgctggggctggggatggcacccttgagaccaagaggccacaggcttctcggcctctgggagctctgggccgcctggctgctgaggagccccacgccctggagctcaacactgcccactcagcgaggaagcagccgcgacgcccacacttcctgttggagcctgcgcagagccagaggcctcagaagccacaggaacatggcctaggcatggctcagccagcagccccctccctgacgcggcccttcctggcagaggccccgacagcactggtcccacacagccccctgcctggggccctgtcaagcgcccctggcccgaagcagcccccgacggcaagcacaggcccggagctgctgctgctgcctctttcctccttcatgccctgcggggcggctgcaccagccagggtgtcagcacagcgggctactcctagggataagcccccggtcccctcatccctggccagtgtccctgacccccatctactccttcctggggacttctcagccaccagggctgggcctggactttcaactgcaggcagcctggaccttgaggctgaacttgaggagatccagcagcaactactgcactaccagaccaccaagcagaacctctggtcctgtcggcggcaagcgagcagcctgcgcaggtggctggagctgaacagagaggagccggggcctgaggaccaggaagtagagcagcaggtgcagaaagagctggaacaggtggaaatgcagatccagctgctggcagaggagctccaggctcagcgccagcccattggcgcctgcgttgcccgcatccaggccctgcggcaggccctgtgctagcgtgttcgcaccaggaacgcaggtgctgggctgtcggggaggcctcaggccacctccaggaacagaacacagttttaagtttgattttttttatttcaaaatgctttgcaattaaatgaattactgttc

SEQ ID NO: 180917 - DNA, 449 bp, Homo sapiens
  Payload ID: 15624
  Gene Symbol: SFI1
  Gene Name: SFI1 centrin binding protein
  ENST ID: ENST00000444859
  CDS Start-End: 212-449
gagttaagaagcaggtcccggatcgccgtataccgccgggttttctcccaacgtcaggcccgatggctcggcttccccagataccgtgttttttacaaattgaaagtttgtagcaagcagccctgcaccgagcaactattttttcaacagcatgtgcccacttcctgtcacttacactttgttagaaggggaagataaaagactttgattcatgaagaatctgctcactgagaagtgtatatcaagccacaatttccatcaaaaagtgattaagcagagaatggagaagaaggttgattccaggtattttaaggatggtgcagttaagaaaccttattctgcaaagacactgtccaacaagaagtcttctgcatcctttgggatccggagggagttacctagtaccagtcatctagtgcagtatcgtggcacacatacttgtacccgac

SEQ ID NO: 180918 - DNA, 719 bp, Homo sapiens
  Payload ID: 15624
  Gene Symbol: SFI1
  Gene Name: SFI1 centrin binding protein
  ENST ID: ENST00000425671
  CDS Start-End: 1-173
ctcagattgagcagaaaaaggaaagagagctgctccccttactgcatgctgcctgggaccactacagaatagcactgctgtgcaaatgtatcgaattgtggctacagtatactcagaagaggcggtacaagcaggtttcactttgtcacccaggctggagtacagtggcatgatcttggctcactgcagcctcactctccccaggctcaagcgattctcctgcctcagcctcccaagtagctgggactacaggtgcaagccaccacgcccagctaatgtttgtgttttgtttttttttttgtagaggtggggtgccaccatgttacccaggctggtctcaaactcccaagctctgcctgcctcagcatcccaaagtgctgggattacaggcatgagccactgcacccggcctgctataccattttatataagatacttgagtatccatggattttggtatctgagaggggccctggaaccagtcccccacaaataccaaaggatggctctttgcagaatggcgaatgtttgctaactgttgaagcttgatggtagggtcatgggtattcattatactgtcggcttctacttttgtttacatttgaaaatgcccataataaaaaatagaaaagcaatgtgtagatattatagaaaatttaggaagtataaaaagatataaagaagaaaaaataaaaccattcatgacatttgatgggtaa

SEQ ID NO: 180919 - DNA, 2108 bp, Homo sapiens
  Payload ID: 15624
  Gene Symbol: SFI1
  Gene Name: SFI1 centrin binding protein
  ENST ID: ENST00000524296
  CDS Start-End: 31-1200
ttagaaggggaagataaaagactttgattcatgaagaatctgctcactgagaagtgtatatcaagccacaatttccatcaaaaagtgattaagcagagaatggagaagaaggttgattccaggtattttaaggatggtgcagttaagaaaccttattctgcaaagacactgtccaacaagaagtcttctgcatcctttgggatccggagggagttacctagtaccagtcatctagtgcagtatcgtggcacacatacttgtacccgacagggccggttaagagaactgcgcatcagatgcgtggccagaaagttcttatatttatggattcgaatgacttttggaagagtatttccctctaaagccagattttactatgagcagcgattactacggaaggtcttcgaagaatggaaagaggagtggtgggttttccagcacgagtggaaactctgtgttcgagctgactgtcactacaggtattacctgtacaacctgatgttccagacgtggaagacctatgtgcgtcagcagcaggagatgaggaacaagtacattagagccgaggttcatgatgcaaagcaaaagatgcgacaggcctggaagtcctggttgatctacgtggttgttcgtaggaccaaacttcagatgcagactacagctctggagtttaggcaacggattatcttacgggtgtggtggagcacgtggaggcagcgactaggacaggtccgtgtgagccgtgccctccatgcctctgctttgaagcacagggccctgagcctccaggtgcaggcttggtcacagtggcgggaacagctcctgtatgtccagaaggagaaacaaaaggttgtctctgcagtgaaacatcatcagcactggcaaaaacggagatttctaaaggcctggcttgaatacctgcaagtccgcagagtgaagagacagcagaatgctgctacaggccagagcggatggtcatttccagcagagagccctgcctgctgccttccacacatggaacagactctggcgatggcgccaccaggaaaatgtcctcagtgcaagagcaacacgtttccacagggagacattagagaagcaagtattttctctctggaggcagaagatgtttcagcatcgagaaaaccgcctggcagagagaatggccatccttcacgcagagcgacagcttctgtataggtcttggttcatgtggcaccagcaggcagcagcacgtcaccaggagcaggagtggcaaacagtggcctgtgcccaccaccgccacgggcggctcaagaaagctttctgcctctggagggaaagtgcccaagggctcagaacagagaggacgggcagggtgcgggcagcagaattccacatggcccagctcctgcgttgggcctggagccagtggagggagacttaccagggcagggtgcgaagcatcctccgggaggtggcagccagggagagccagcacaacaggcagctgctgcgcggggcattacgtcgctggaaagagaacaccatggcccgagtggatgaagccaaaaaaacctttcaagcaagtactcattacagaaggaccatatgttccaaggtcctggtccagtggcgggaagctgtgtcagtgcagatgtattaccgacagcaggaggactgtgccatctgggaggcccagaaggtgctggacaggggctgtctgcggacctggtttcagcgctggtgggactgcagccggaggtcagcccagcagagactgcagctggagagggcagtgcaacaccaccaccggcagctgctgctggaggggctggcccggtggaagacgcaccatctgcagtgtgtcaggaagaggctcctgcacaggcagagcacccaactgctggcacagagactcagccggacctgcttccgccagtggagacaacagctggcagccaggaggcaggagcagcgggcgacagtgcgggccctgtggttctgggccttctcgctgcaggcaaaggtgtgggccacgtggctggcctttgtactggaaaggaggagaaagaaggcgcggctgcagtgggcgctccaggcctaccaggggcagctcctccaggagg

SEQ ID NO: 180920 - DNA, 4226 bp, Homo sapiens
  Payload ID: 15624
  Gene Symbol: SFI1
  Gene Name: SFI1 centrin binding protein
  Uniprot ID: A8K8P3
  ENST ID: ENST00000540643
  CDS Start-End: 530-4093
ggaagtgagggagggaggactttcgtacgcagccgcctcccagctggaacctcatctttagtgctcggccgcgggcggcgtaactcggggttccgcctcggaatacctcccacttctcttgtctaagaggagcagtagcaagctgagctcagagcgaagctggcgagccaaggagataaagaaccctcggtggggatgcccagagggtgcatgctccacgcccctcgaaaccgattctcattgctgctgctgcaaagcaacccgaagtgcgccacctacccgactgaggctgcgcaagccccggggtctgggcggggtggtcctcgtgcgcgccgcgtcgccgtggagacgagggcgggcccgcgcgagactggcgtctagaggcgcgcgaagcgctgaggcgggcgtggaccgcgcgggagttaagaagcaggtcccggatcgccgtataccgccgggttttctcccaacgtcaggcccgatggctcggcttccccagttagaaggggaagataaaagactttgattcatgaagaatctgctcactgagaagtgtatatcaagccacaatttccatcaaaaagtgattaagcagagaatggagaagaaggttgattccaggtattttaaggatggtgcagttaagaaaccttattctgcaaagacactgtccaacaagaagtcttctgcatcctttgggatccggagggagttacctagtaccagtcatctagtgcagtatcgtggcacacatacttgtacccgacagggccggttaagagaactgcgcatcagattttactatgagcagcgattactacggaaggtcttcgaagaatggaaagaggagtggtgggttttccagcacgagtggaaactctgtgttcgagctgactgtcactacaggtattacctgtacaacctgatgttccagacgtggaagacctatgtgcgtcagcagcaggagatgaggaacaagtacattagagccgaggttcatgatgcaaagcaaaagatgcgacaggcctggaagtcctggttgatctacgtggttgttcgtaggaccaaacttcagatgcagactacagctctggagtttaggcaacggattatcttacgggtgtggtggagcacgtggaggcagcgactaggacaggtccgtgtgagccgtgccctccatgcctctgctttgaagcacagggccctgagcctccaggtgcaggcttggtcacagtggcgggaacagctcctgtatgtccagaaggagaaacaaaaggttgtctctgcagtgaaacatcatcagcactggcaaaaacggagatttctaaaggcctggcttgaatacctgcaagtccgcagagtgaagagacagcagaatgagatggctgagcgattccatcatgtcactgtgctccagatatacttctgtgactggcagcaggcctgggagcggagggagagcttgtacgctcaccatgcccaggtggagaaactggccaggaagatggccctgcggcgcgcctttactcactggaaacactacatgctgctgtgtgcagaagaagctgcccagtttgagatggcagaagagcaccacaggcacagccagctgctgctgcacaggttctggaacctctggcggtctcagattgagcagaaaaaggaaagagagctgctccccttactgcatgctgcctgggaccactacagaatagcactgctgtgcaaatgtatcgaattgtggctacagtatactcagaagaggcggtacaagcagctgctacaggccagagcggatggtcatttccagcagagagccctgcctgctgccttccacacatggaacagactctggcgatggcgccaccaggaaaatgtcctcagtgcaagagcaacacgtttccacagggagacattagagaagcaagtattttctctctggaggcagaagatgtttcagcatcgagaaaaccgcctggcagagagaatggccatccttcacgcagagcgacagcttctgtataggtcttggttcatgtggcaccagcaggcagcagcacgtcaccaggagcaggagtggcaaacagtggcctgtgcccaccaccgccacgggcggctcaagaaagctttctgcctctggagggaaagtgcccaagggctcagaacagagaggacgggcagggtgcgggcagcagaattccacatggcccagctcctgcgttgggcctggagccagtggagggagtgcctggccctgcggggagcggagcggcagaagctgatgcgagcagacctgcaccaccagcacagcgtgctgcacagggcgctgcaggcatgggtgacttaccagggcagggtgcgaagcatcctccgggaggtggcagccagggagagccagcacaacaggcagctgctgcgcggggcattacgtcgctggaaagagaacaccatggcccgagtggatgaagccaaaaaaacctttcaagcaagtactcattacagaaggaccatatgttccaaggtcctggtccagtggcgggaagctgtgtcagtgcagatgtattaccgacagcaggaggactgtgccatctgggaggcccagaaggtgctggacaggggctgtctgcggacctggtttcagcgctggtgggactgcagccggaggtcagcccagcagagactgcagctggagagggcagtgcaacaccaccaccggcagctgctgctggaggggctggcccggtggaagacgcaccatctgcagtgtgtcaggaagaggctcctgcacaggcagagcacccaactgctggcacagagactcagccggacctgcttccgccagtggagacaacagctggcagccaggaggcaggagcagcgggcgacagtgcgggccctgtggttctgggccttctcgctgcaggcaaaggtgtgggccacgtggctggcctttgtactggaaaggaggagaaagaaggcgcggctgcagtgggcgctccaggcctaccaggggcagctcctccaggagggtgccacgcggctcctgcgctttgcagccagcatgaaggcctcccggcagcagctgcaggcccagcagcaggtccaggcggctcacagtctccatcgtgccgtccgccgctgtgccacgctctggaaacagaaagtgctgggccggggcgggaagcctcagcccctggcagccatcgcacccagcaggaaagtgacgtttgagggtccccttctcaaccgcattgctgctggggctggggatggcacccttgagaccaagaggccacaggcttctcggcctctgggagctctgggccgcctggctgctgaggagccccacgccctggagctcaacactgcccactcagcgaggaagcagccgcgacgcccacacttcctgttggagcctgcgcagagccagaggcctcagaagccacaggaacatggcctaggcatggctcagccagcagccccctccctgacgcggcccttcctggcagaggccccgacagcactggtcccacacagccccctgcctggggccctgtcaagcgcccctggcccgaagcagcccccgacggcaagcacaggcccggagctgctgctgctgcctctttcctccttcatgccctgcggggcggctgcaccagccagggtgtcagcacagcgggctactcctagggataagcccccggtcccctcatccctggccagtgtccctgacccccatctactccttcctggggacttctcagccaccagggctgggcctggactttcaactgcaggcagcctggaccttgaggctgaacttgaggagatccagcagcaactactgcactaccagaccaccaagcagaacctctggtcctgtcggcggcaagcgagcagcctgcgcaggtggctggagctgaacagagaggagccggggcctgaggaccaggaagtagagcagcaggtgcagaaagagctggaacaggtggaaatgcagatccagctgctggcagaggagctccaggctcagcgccagcccattggcgcctgcgttgcccgcatccaggccctgcggcaggccctgtgctagcgtgttcgcaccaggaacgcaggtgctgggctgtcggggaggcctcaggccacctccaggaacagaacacagttttaagtttgattttttttatttcaaaatgctttgcaattaaatgaattactgttcagaa

SEQ ID NO: 180921 - DNA, 309 bp, Homo sapiens
  Payload ID: 15624
  Gene Symbol: SFI1
  Gene Name: SFI1 centrin binding protein
  ENST ID: ENST00000629688
  CDS Start-End: 1-309
atgaagaatctgctcactgagaagtgtatatcaagccacaatttccatcaaaaagtgattaagcagagaatggagaagaaggttgattccaggtattttaaggatggtgcagttaagaaaccttattctgcaaagacactgtccaacaagaagtcttctgcatcctttgggatccggagggagttacctagtaccagtcatctagtgcagtatcgtggcacacatacttgtacccgacagggccggttaagagaactgcgcatcaggggctcacagtgcagagggaatgacagacaccctgtgagctga

SEQ ID NO: 180922 - DNA, 1079 bp, Homo sapiens
  Payload ID: 15625
  Gene Symbol: SFT2D1
  Gene Name: SFT2 domain containing 1
  Uniprot ID: Q8WV19
  ENST ID: ENST00000361731
  CDS Start-End: 111-590
gggcgggaccggacttccggctggtctgtggggtttcgggttcggggtttcctggtgggcgtcaggggcaggcaacagagtggcggccgctacggccctgtaacagggccatggagaagctgcggcgagtcctgagcggccaggacgacgaggagcagggcctgactgcgcaggtcctggatgcctcatcccttagtttcaacaccagattgaaatggtttgccatctgcttcgtatgtggcgttttcttttctattcttggaactggattgctgtggcttccgggcggcataaagctttttgcagtgttttataccctcggcaatcttgctgcgttagccagtacatgctttttaatgggacctgtgaagcaactgaagaaaatgtttgaagcaacaagattgcttgcaacaattgttatgcttttgtgtttcatatttaccctgtgtgctgctctttggtggcataagaagggactggctgtgttattctgcatattgcagttcttgtcaatgacctggtatagcctgtcgtacatcccatatgcaagggatgcagttattaaatgctgttcttctctcctaagttgaaaatcagaaacttgtggaaaagagcacttgaatgttggtactctatgtttggtgaagtttgcttttccccataaaacactccaggaacaactgacgtgacagttgaagaccgttttgtactaagtctcattttgtatactggtaaaaactacatgcttgattaaaccattaaatgcttgtaactttaaattcattatgtgtcattaatatacttttccaaagataagatttttaatcactgccagttgtaaattatttttagccaatttttaaatcttttcaaagcagctttgaaatgtgaatatttaaaggtagacctgtgctgcaagataattaaacttttttgcttttaaaaaatgtctgcatttttaagattttttttactttaaatgtgaaacttattttaagctaaaaattgcttattatatgtaataaaaataatatataaatctttacaattttgaaataaacccatccttggaaaaataa

SEQ ID NO: 180923 - DNA, 11040 bp, Homo sapiens
  Payload ID: 15626
  Gene Symbol: SFT2D2
  Gene Name: SFT2 domain containing 2
  Uniprot ID: O95562
  ENST ID: ENST00000271375
  CDS Start-End: 73-555
ggaagagccgtcaacttagcgagcgcaacaggctgccgctgaggagctggagctggtggggactgggccgcaatggacaagctgaagaaggtgctgagcgggcaggacacggaggaccggagcggcctgtccgaggttgttgaggcatcttcattaagctggagtaccaggataaaaggcttcattgcgtgttttgctataggaattctctgctcactgctgggtactgttctgctgtgggtgcccaggaagggactacacctcttcgcagtgttttatacctttggtaatatcgcatcaattgggagtaccatcttcctcatgggaccagtgaaacagctgaagcgaatgtttgagcctactcgtttgattgcaactatcatggtgctgttgtgttttgcacttaccctgtgttctgccttttggtggcataacaagggacttgcacttatcttctgcattttgcagtctttggcattgacgtggtacagcctttccttcataccatttgcaagggatgctgtgaagaagtgttttgccgtgtgtcttgcataattcatggccagttttatgaagctttggaaggcactatggacagaagctggtggacagttttgtaactatcttcgaaacctctgtcttacagacatgtgccttttatcttgcagcaatgtgttgcttgtgattcgaacatttgagggttacttttggaagcaacaatacattctcgaacctgaatgtcagtagcacaggatgagaagtgggttctgtatcttgtggagtggaatcttcctcatgtacctgtttcctctctggatgttgtcccactgaattcccatgaatacaaacctattcagcaacagcacataagccttgggtgcaagtgattcccaggtggcaaaaggcagccccatcagagatcacgggagcaacagtaagggacagagttttggggtccacttgtccctcagcatggaagccatcaccgtggtcctgcatagagtgagtctgcttctactctggcatctgagaacaagtgactctgctttagacaagcccctggagagcctggccatggagtgaggtagaaaagaagcactttttggtggtatatgctgtttctgaatttgaatctaagcattcttggtgttctgattctgcgcctgactgtggaatgtattttctgacattaggtgcagactctttttctcttgggttttatttcccatccctccctccctctccctgcatatctttctttatgacctcctggcactagatggggaaagaacagagcagcagcagaaaatgctgctgttttttttttggacgagagcccataggagttgaaaaatcctgctgctctcagctatatttttttctccattatttataaatgtttgcttttaaactgattttattttccattctcccctggagttgggccaggggagagtggggtgggaagacagatccctgctgtgcagccagcaggaagtaggcacgcctgcccagtgacctttaaatagtcccagtgtttgcacttagcctgtgctggggacactggggataaactgcaggtggtctcatgtcagcctgatgcctaacctacaaagtgcttttgtgtccacgatcttacctggttcttatggagagccttgtgaggaagcagggattgttataccactgtgcagtcaagggaatcaaggcccacactggtttttggatccacccaaagccacagcttcagcctccttcatgaccccagagtttcctggcctgtttctggttgtgcctcctgtaactgcctgtgactgtttccctcgttttcatcagccaagccatctcctccctggccctccctgcccatctcttttggaagcttcttcctggatctgcaggatgttcactgtcccttgtgttccctttcagctcctccttgttgcctgactacgattagtgccctgtcttgtcagccagcattcctggccctccaggacctccagagtcatcctacaaatgacgtttatctggattgcctttctgttctttgcacagggccaactggtccactagggctcctcctctgtcactgctaaaccaaaggaagtggcctgctggttgtcccctttcttgtggctaattgctgaacctttctttgtcctactgtggctaagaactctgactggtttttttttttttttctttttgagatggagtctcactccgtcgcccaggctggagtgcagtggcgtgatctctgctcactgcaacctccacctcccgggttcaagcaattctcctgcctcagccttccaagtagctgggattacaggtgcccgccaccacgcccgtgctaatttttgtgtttttagtggagacagggtttcaccatgttggccaagctggtctggaactcctgacctcaggtaatccgcccaccttgacctcccaaagtgctgggattacaggtgtgagccactgtgccctgctgatcttttcttctgaggctggggaggtgtgaacaagcctgacggggccagagagaggagctagtcttcccaggttctttctaggctattgatgacatccagtcatctgctcaggtcactaacctgtcctcagccaggaaaggaaattttatgctacccctctggcttttgtgggattctttcacatcccaggtgcctcttggagacagatctcagaagggctgtggtgtcagaagggacatggaggaggtcaggagggctcatggttccttttctttagaactgatacgaggcttggctagtcactgtgagctccagcagctccagcagcctggaataagacacctagaaggctcatccctccatgtccatgtcctttttttttttttagattgaacaaccatgctttgtttaaaaaataatctcagcaaactagggatacaagagaatttcctcaacctgtcgaagggcatctttaaaatatctactgctaacatcctatgtaatgatgaaaggctgaatgttttcccctaagattgagaataagacagagatgtcaactcttaccacttctattcaacgttgtactgaaaattctagccactgcaatcatgttttaattgggagtagggggaaagagggagggaaggagaaaaatgaaaggcctttagattgaaaagaaatgagtaaaactgtctattcacagatattatcatctatgtagaaaaccaaatcaaatccattactaagttactgaaaccagcaagtgagtttcgcaacacagcaggatatataattgatatacacaaatcaattgtgtttctccatgttagaagtaaagaattaggaattgaaaatttaaaaataataccatttacaatagcattaaaatataaaattcttgggaataaacccgacaaactatgtggattatctgtacactgataactaaaaagcattgctaagaaaaattaagacctaagtaaatatcttgttgataggttgagagactcaacattgttgatgttaattctttcccatattaatctatagatataatgcagtccccatccaaagccaagcaggcttttttttttttttttttgtagaaattaaaaactggttttaagattcacatggcatgcagatgatctagaagatccacagtaactctcctgctgtgcagctggttcctaacaggtcatggacctgtccatggcctgtaggttgggaacctctgctacagaggatccagatttaaattcagaagaagcttcatctatttctgtagtttcattttcttgcaataactgctgcatcaaacttgaacttcgcaggattttctgaagctgctcaatttggccatcttgctttttaattgtatttcttaacactagaattttctatttcaagtttttgtacgtggccttgcgtctccttagtacattttatagtcgctgtaagttgattccatttttcttgaaattgaattctcatctgacctaatttcttccttgaatcctacatctcactttctcaatggacgcagtgacgcaatgaagcatccagcaaagcttttgttgttgattgtttaggacgtcaccctgtttttgttgaagttgtctcacaactacttctctttctgctttctctctttcatattgacattgtttttctttcaaatgattaactttattgatcatcctcttgttcttctagcaaaagacggtgctttatgcactcagcttgaagattttgtgctgtagcatcacatttggcttgactatcaattactgttttttcttgattgtcagctttgttgtgaacatcatccagttgctgttgaagcaacatattttgtcttcgtagttgacataatcttacttgcttttctgtgcatttttctactttatcttggccacttgtgtacattttttcaatgtccttcatttgacaccgtttggtttagctctctttgtatgtgttcaaaaaccaaagcgttttctttcagagcctctcttgtgttatggagctcagttttgaggcacctggacttactctcagctttagaaagttgctgagaaagaatcagaacatgagaattcaaattttcctgtaaatgacgcaatttatctactgtgccctggaaatcaagctcttggtctctttctgttgagtgactttgatcatgatcatgtagagcaacattcagtctacgatggtatgattccatttcgtcagtctttgcctgctttgtttttccttctccagtttagaacggagcattgtgttctcatctgtcagagcagtaagctgtccactataatgggctatcgtttttgttgatttttccccattctgttttagagccttttgaaggtcttcatgctttctttttataatttcaatgtcttttaagtatttcttttccaggatttgattttttattgtgtgtatttccagcctgagcctggcaatttcatcttgcatcaaatggtttttatgcaacaggtcttcttctttttcatgactatcagaaatctcaaactgcagagttcttgttcccattcaagtttttgatattctgtgatatttcttttttttcagatagtctcttttgtagtacactagtctttttcattttttaatttttactgtaagtcactcagtgattatctttaagttccactgatcttttacataaataaactgcatttttaattttctttttttatatgagattctggaaatacttctttttttaaattatactttaagttctggggtacatgtgcagaacatgcgggtttgttacataggtatacatgtaatgttatccctcccctagcccccacccccggacaggccccggtatgtgatgttcccctcccttttccatgtgttctcattgttcaactcccacttatgagtgagaacatgtggtgtttggttttctgttcttgtgttagtttgctgagaatgatggtttccagcttcatccatgtccctacaaaggacatgaactcatcctttttttatggctgaatactattccatgggtgtatatatgccacattttctttatccagtctataattgatggacatttgggttggttccaagtctttgctgttgtgaacaatgctgcagtaaacatacatgtgcatgtgtctttatagtagaatgatttataaccctttgggtatatacccagtaatgagattgctgggttaaatggtatttctagttctagatccttgaggaatcgccacactgtctttcacaatggttgaactaatttacactcccaccaacagtgtaaaagtattcctatttctccctgtcctttccagcatctgtggccaccatgccactttttaatgattgccattctaactggcatgagatggcatctgatggtggttttgatttgcatttccctaatgaccagtgatgatgagcattttttcatatgtttgttggctgcataaatatcttcttttgagaagtgtctatccttcgcccacttttcgatggggttgttttgctcttataaatttgtttaagttctatgtagattctggatcttagccctttgtcagatggatagattgcaaaaattttctcccattctgtaggttgcctgttcactctgatgatagtttcttttgctgtgcagaagctctttggtttaattagatctcattttgtctattttggcttttgttgccattgcttttggtgttttagtcgtgaagtctttgcctatgcctatgtcctgaatggtattgcctaggttttcttctagggtttttatggttttgggtcttacgtttaagacttcctcttttcctaattgaataccctttatttctttctcttgcctgattgccctggccagaacttccagtactatgttgagtaggaatggtgagagagggcatccttgtcttgtgctggttttccaagggaatgcctctagtttttgcccattcagtatgatattggctgtgggtttgtcataaatagctcttcttattttgagatgcgttccatcaatacctggtttattgagagtttttagcatgaagggctgttgaattttgttgaatgccttttctgcatctattgagttagggaggattccctctttttctattgtttggaatagtttcagaaggaatggtaccagctcccttttgtacctctggtagaattcggctgtgaatccatctggtcctggactttttatggttggtaggctattaattactgcctcaatttcagaacttgttattggtctattcaggaactcgacttcttcctggtttagtcttgggagggtgtatatgtccaggaatttatccatttcttctagattttctactttatttgcgtagagttgtttatagtattctctaatggtagtttgtatttctgtggtatcggtggtgatatcccctgtatcattttttattgcatttatttgattcttctctcttttcttctttattagtctggctagcagtctatctattttgttgatcttttcaaaaaaccagctcctggattcattgtttttttcgtggtctctatctccttcagtcctgctctaatcttagttatttcttgtcttctgctagcttttgaatttgtttgctcttgcttctctaggtcttttaattgtgatgttagggtgttgattttagatctttcctgctttctcttgtgggcatttagtgctataaatttccctctacacactgctttaattttgaaatggagttttgctcagtttcccaggctagagtgcggtggcatgatctcagctcactgcaacctctgccttctgggttcaagtgattcttgtgcctcagcctcccaagaaactgggactacaggcatgtgccaccacacccggctaatttttgtatttttagtagaaacagggtttcaccatgttggccaggctggtctcgaactcctgacctcaagtgatcctcctgcctcggcctcccaaagtgctgggattacaggcgtgagccaccatgcccagccccatgtcctttttaatgcctggattgactttgtgggacatgaggccaaggtaccttttaagatgtcacctgtatagcatactagtagtgaatgtaggctttgaagtcagatgcatctggctgtgagctgtgactagtcatatactagttgtgtcattttgaacaggttacctaacctctggctcctcagtttgttcatctgtttaaaaattgtgggaataacagttcctgctgggtcattgcaagatgtcagtgagacgtgtcaagtgcttagaatagggcttggcataagtagagtctcagtagggtaggtgttatttaatcccagaaataactgacaactttggaagatgagagtgaatgtctccgatcattaatttatttaacaaatacttatctagtactatgtgcccggcgctgtagacactgccatgttttatctcattcaatattcacagtgactgcccagtgaatggtattgcctccatcctctgagaaggtaaagagcctatcccagaccccacgagtggaggcgtcagggaggggttcttggcaggagatgggtcttgtagaaaggcttctgctttgctttcactcacggcctgtggccagtttgctcagacagctcccatcaggacaccattggcagcttttgcatgaccctgcctcccagggtcttcctgcgtttttccttaagttgccttattctttggttgtttccctacttgtttttgttagactgtgggaggaagaaatccatttcaaatctgctgaaacctgttaccaagcaacagcagtgattaaaagcaacctgatgagtgagtaaagaattagggtttcagacctgtagttaatgatggtctctgtctccctgctgccctgcattcccttcccttccgttcactgctgggtgaaggagggcttgctgcattttggaagttaagggaaccaataaggtgactcttttgcagattggaatatggtgctcagccagccatatggaagcactgtcctggcgtgatctgccctgggctgttggctctctgagtgctgtcttgggaggagcactgcccttcagaacagaagagatggcttccagtcccctctcccccttctcccagtctctctgaggctgcttgttgggtattgggcgtgctgtgtactaactcactcccgtctcttgtctcattatctgaaatgcatccccttttgcagaaagggctcaaacggagccttcagttctgctcctctgcatagccgtagctcagatcctagctcaagatgtcttgtctgggaagggcaaaacatggtccccagtgtagcattttcactgggttgattatctcagtggtggatcatctatcacccttgtgtggtgactttgtgaattatctgcctgagtgccacttcccttccaccctaatcactgcaggctcagggagcaagaaataaaatcatgaaatgcattccaaataaaattaccttttggctgggtgcagtggctcacacctgtaatctgagcactttgggaggctgaggtgggtggatcgcttgaggtcaggagttcaagaccagcctggccaacatggcaaaaccccatctctacaaaaaatacaacagcaaaaaaatcagccaggctagctggtgtgcgcctataatcccagctacttgggagggaggctgaggcacaagaattgcttgaacccaggaggtggaagttcagtgagccgagatcgcacccctgcactccagcctgagcaacagagtgagactctgtctcaaaaataaataaaaaaaaaaatcactttttgatacttctgttaaaatagataataaggaaccatatcttaaagtgtggaggatctggcttggcttctgtttttgatagctctatgaaagtgacagatttgcatcatgagacttagtggaatgaattgggaaattgaagggcagcccagtggctatggattctattttctatgggactgtctacgccaggctttattttctctttgctcagataacttctgactagagtcgacggtaggattataaatggtttaaaatacgtattctcaaacctcattttcagcatataaatttttaagaatcagtgtttaaaggtacgtgaaaccatttgctagatttttgtcctagttttttttttttaatttaaaaatcttaagttttttttagtaagcttaagatgtccagtagtttatttgcagacagcatttttaaaaagtgaatagatgtttaactgaagttaaatacaaatttatgtctgtgtaactcttggtaagatataacaaaacctagacatctaaattttttggaaatttttattttaaaagtttgttgggaggtaaaattgtgtgactttaccttctggttaatagttttatagttaagaagaaagtccagcgaagtttacttgatctcagttgcactcaagaataggggatttagttccactttggttattttcacttctaccctaaattcatagtccctgatacttaagctttacccttggcttaccagttttcattgcagcgagtaaatggggagtagcagagcctttgttaatgtaaattgacaaaaagtatgtccttttctagcaggagcagataaactgataatggtcttagaaatgtagaaaatgattttttgtagacaggatgatctgtctagattgtagcaaatgatggtacatattcacaacaaagttgtgccactacatttaataaacagccacaaacaacaaaaggacaactggtccccgatataaatggactagctacctggacataatatccttgtgaggcatccttaaaggacaaattgcagctggtatttgggtgaatgttgttgctctgtgcctgttgaatgtccatgctacaagaagttatgagccttgttctaagtacagatgaaccttgtatttgtgtaatctcccaagggagagctatggtttacattcaattttttggtctttctgctatgaaacgtgtttattttgcctctgtcaatgtgtttgcaaccttaagtaaggaaagggaaaaaaaaaatagccctctgaactctgatcttttgccgcttctgtagattttgattgtgaagttgggagtgaggacattcaaaagcccatggtgaatgcatatgcctttagaatattgtgcctgttttaaaatgtttgagcttttaaaatacgttgttaaaacatgaatccatttttgtaattgtataaatactcataactaattttgaatgctactgattgtgtaactgaatttttgtatccaaaaatacattcttgagtactacttttcctaccttgaaaatctatttcatttactaaatattgttttctttatgctaacttaactttaaaaggaatgttgccaagctgtctctcctcccccatcacaattgttagttttttttgctttctttcttcaataaatgatagcattatgatctttaataaa

SEQ ID NO: 180924 - DNA, 491 bp, Homo sapiens
  Payload ID: 15626
  Gene Symbol: SFT2D2
  Gene Name: SFT2 domain containing 2
  ENST ID: ENST00000367829
  CDS Start-End: 131-457
gcctgggcggggcgcgccgcggttggcgcctgggcggctgggcggctgcctagcacccggaagagccgtcaacttagcgagcgcaacaggctgccgctgaggagctggagctggtggggactgggccgcaatggacaagctgaagaaggtgctgagcgggcaggacacggaggaccggagcggcctgtccgaggttgttgaggcatcttcattaagctggagtaccaggataaaaggcttcattgcgtgttttgctataggaattctctgctcactgctgggtactgttctgctgtgggtgcccaggaagggactacacctcttcgcagtgttttatacctttggtaatatcgcatcaattgggagttgtgttttgcacttaccctgtgttctgccttttggtggcataacaagggacttgcacttatcttctgcattttgcagtctttggcattgacgtggtacagcctttccttcataccatttgcaag

SEQ ID NO: 180925 - DNA, 1073 bp, Homo sapiens
  Payload ID: 15626
  Gene Symbol: SFT2D2
  Gene Name: SFT2 domain containing 2
  ENST ID: ENST00000630869
  CDS Start-End: 73-399
ggaagagccgtcaacttagcgagcgcaacaggctgccgctgaggagctggagctggtggggactgggccgcaatggacaagctgaagaaggtgctgagcgggcaggacacggaggaccggagcggcctgtccgaggttgttgaggcatcttcattaagctggagtaccaggataaaaggcttcattgcgtgttttgctataggaattctctgctcactgctgggtactgttctgctgtgggtgcccaggaagggactacacctcttcgcagtgttttatacctttggtaatatcgcatcaattgggagttgtgttttgcacttaccctgtgttctgccttttggtggcataacaagggacttgcacttatcttctgcattttgcagtctttggcattgacgtggtacagcctttccttcataccatttgcaagggatgctgtgaagaagtgttttgccgtgtgtcttgcataattcatggccagttttatgaagctttggaaggcactatggacagaagctggtggacagttttgtaactatcttcgaaacctctgtcttacagacatgtgccttttatcttgcagcaatgtgttgcttgtgattcgaacatttgagggttacttttggaagcaacaatacattctcgaacctgaatgtcagtagcacaggatgagaagtgggttctgtatcttgtggagtggaatcttcctcatgtacctgtttcctctctggatgttgtcccactgaattcccatgaatacaaacctattcagcaacagcacataagccttgggtgcaagtgattcccaggtggcaaaaggcagccccatcagagatcacgggagcaacagtaagggacagagttttggggtccacttgtccctcagcatggaagccatcaccgtggtcctgcatagagtgagtctgcttctactctggcatctgagaacaagtgactctgctttagacaagcccctggagagcctggccatggagtgaggtagaaaagaagcactttttggtggtatatgctgtttctgaatttgaatctaagcattcttggtgttctga

SEQ ID NO: 180926 - DNA, 3735 bp, Homo sapiens
  Payload ID: 15627
  Gene Symbol: SFT2D3
  Gene Name: SFT2 domain containing 3
  Uniprot ID: Q587I9
  ENST ID: ENST00000310981
  CDS Start-End: 22-669
tctgccaccgccttgtccaagatggcggacctccaccgccagctgcaggagtacctggcgcaggggaaagctggcggcccggcggccgcggagccgctgctcgccgcggagaaggcggaggagcccggggaccggccggcggaggagtggctgggccgcgcgggcttgcgctggacgtgggcgcggagccctgcggagtcggcagcggccggcctgacgtgcctcccgagcgtgacgcgcgggcagcggctggcggcgggcggcgggtgcctgctgctggctgcactgtgtttcggcctagccgcgctctacgcaccggtgttgctgctgcgcgcgcgcaagttcgcgctgctctggtcactgggctcggcgctggcgttggcgggaagcgcgctgctgcggggcggcgcggcgtgcggacgcctgctgcgctgcgaagaagcgccgtcccggcccgcgctgctctacatggcagcgctgggcgccacgctgttcgccgcgctgggccttcgcagcacgctgctcacggtgctgggcgcgggcgcgcaggtggccgcgctgctggccgcgctggttgggctgctgccctggggcggcggcaccgcgctgcgcctcgcactgggtcgcctgggccgcggcgccggcctcgccaaggtgctgcccgtgtgaggacctcgcgccctcgccgctggggaagtacgcggagccagcgccgtcggagaccgcgccggccgagctgaggactgcacgccgctgtgcggaagcccgtggcgaaggccctgccctaacagcctgcgagtctaatccgggagcggctgctgccagcggaggcgacagcagcgttgggagctcctcgatgtcagctttttgtgctggacttggcacacgctctgaaaactgagattttgtcattgaactggtgacaggatgtgagacggttattagaagttgctttcgaagtaactgtggtcttaggttcggctgagtaaagaaaaaggatttttcttcgagttagctgctcttgtgatttttctcaggctgttttgtcattttaaaatccagtggtagatgtagcttagcgacggtagttttttgttttggctatactaagacttggaaattattctctccagtgtcagcgaatccagaagggtatcagattaaacaccgaattcagccactggacttttaaaagtacttaagatggtttatctcgggttttttcttcagttaacaaaatcataaatatggtgccttataacatgaaaggaaaattagttgtgtatttcacgacgaaagcgacggaccaaaagaaatttcctgccccaagaagcatgggatccaggaaggggcgcgtagatgcttaacggtctcttcggaaatcctgcaaatagaaagataattctagatccggaatacctgtatctggtggaaaccatggatttctacaagctcgaattattcctcattgtatagcctgctttgtaaactagtttacaatttgcaggctgatcttaagatttttttatatctaattgctgctgccttcattttaggttcagcagttacttttaactaccttaatttattgccagaaggtatgagcctaacattctgatgagtccagaaaactacgttttgtcagtagcaatacactaggaagtaaaatatatttagaatttaaacattgtgtgccagtggtcctcgcgcttgactgcacatcagttacttgaagagccacacctcagatcaatgcagtcagaacctgggaagtaggtcccagacatcaggacctttttaaagctccccaagtgattctacgttccccaagtttgaggaccacttttctgtgcattggcttgcacaatttgaaagtaatgcttttcctgagctggatcccagtgttgccttaacagggtgtctgtcgtgccgcagtagagcactgctgcttcctccaaccccaaaatttatgttcctaagtaagtcaggtccctaagccccgtcccaagaagtgacacaagtggccaacatccacactgtaggcttgcaggctacccgccctgagatttggtaaagaacactgccttgttccccatcagtaaacaaggttacctacctcaggaggctgcttgtgagagagcaaatgcagtatcttcagaatgatttatttttttaattaattgtaaagacttgtgccattggctgctctttctagtcccctaaatttctgttctagttttaaatttctctagaacttgcaatagttgggggttttataatgatgttttacaatgtttatttcttaaataaaaacttaaaaattcaacatttctcagctggtggctcacacctgtaatcccagcattttgggaggccaaggcgggaggatcacttgaggccaggagttcaagaccagcctgggcaacacagttaaaccccatcgccacagaaaatcttcaaaaaatttgccagatatggtggcacacaactgtgatcccagctacttggggtggggctgaggtgggaagatcacttgagcccaggaggttgaggctgcagtgaactgtgatcacaccactgcaccacagcctaggcaacagcgagaccttgtctcaaaaattttttctcaaatcaaacatcattgaaaatctactttttataagcttcaaatcacaacatctagtatgtatgctgacagtgatgtttttaaatgccatatatatttaataagtataatgtagaggtttattgtttaaatgaattcactctcaaaatgtgatctgtcaagtccagtagagcttcaaggtaaaatgaaaatttttaaatgtgatctggttatctgcttactgagatactatgtttctaaagttaaagcccaaaataatgaaaatttttccactagaatctcagggaaaaaaagtctaatcttgatatgggtttggtctctggatccggttttagcttcatgaaatttgattacagtttctctctctttaagctataccagttgggggtgagtgaagaaatacccataacctaaagcaatcttgagcctcctaatagcatgtttatggtggagcgctgattaaataagctgtaatttcaaagttaaaaaaaaaatagtctctagattctaacactgaaaagcagtgtatatggctgacattttctcactccacagaaatcaattagcttttgctgttttttacattcatagagaaccagttaaattttcatatcctgttaaactatatcagtatgccttttctaagcaaccattgaaacttccagcaccagcggccaggtactgtggctcagatctgcaatcccagcactttgggaggccacagcaggtggaccgcttgagcccaggagtttgaaaccagcatagacaaagtggtgaaactccatctctacaaaaaacacacacacaaaaaattagctgggcatggtggcatatgcctgtagtcctagctactagggaggctgaggcagggtcaaagctgaagtgagccgtgattgcaccactgcactcctggctgggtgacagagcaagactctgtcaaaaaaggaaaagaaaaaaagaaacttccagcaccactaaatttgccaaataaatttgactgatgccaaaactgaagctgccaatgtaatgaaatgttaaggtggccataggacagtccttttaataaaagcttccatgtaaaaccaaaataaaggtcagtatagaaagta

SEQ ID NO: 180927 - DNA, 14131 bp, Homo sapiens
  Payload ID: 15628
  Gene Symbol: SUGT1
  Gene Name: SGT1 homolog, MIS12 kinetochore complex assembly cochaperone
  Uniprot ID: Q9Y2Z0
  ENST ID: ENST00000310528
  CDS Start-End: 56-1057
gaggtggtaaccgtgatagtagcagctccggcggcagcaacagcgactacgagggatggcggcggctgcagcaggaactgcaacatcccagaggtttttccagagcttctcggatgccctaatcgacgaggacccccaggcggcgttagaggagctgactaaggctttggaacagaaaccagatgatgcacagtattattgtcaaagagcttattgtcacattcttcttgggaattactgtgttgctgttgctgatgcaaagaagtctctagaactcaatccaaataattccactgctatgctgagaaaaggaatatgtgaataccatgaaaaaaactatgctgctgccctagaaacttttacagaaggacaaaaattagatagtgcagatgctaatttcagtgtctggattaaaaggtgtcaagaagctcagaatggctcagaatctgaggtgtggactcatcagtcaaaaatcaagtatgactggtatcaaacagaatctcaagtagtcattacacttatgatcaagaatgttcagaagaatgatgtaaatgtggaattttcagaaaaagagttgtctgctttggttaaacttccttctggagaggattacaatttgaaactggaacttcttcatcctataataccagaacagagcacgtttaaagtactttcaacaaagattgaaattaaactgaaaaagccagaggctgtgagatgggaaaagctagaggggcaaggagatgtgcctacgccaaaacaattcgtagcagatgtaaagaacctatatccatcatcatctccttatacaagaaattgggataaattggttggtgagatcaaagaagaagaaaagaatgaaaagttggagggagatgcagctttaaacagattatttcagcagatctattcagatggttctgatgaagtgaaacgtgccatgaacaaatcctttatggagtcgggtggtacagttttgagtaccaactggtctgatgtaggtaaaaggaaagttgaaatcaatcctcctgatgatatggaatggaaaaagtactaaataaattaatttgctctcatcgtattgtgtatattcacctaatgcccattgtgtattgatattgcattcttgaattttgaacactgaatatctttttgaaagattatacttctttacctctttgtgctttagaaattattttccttcaagtgttcaagtctaatgaagaatgaagataacattttatcacttctgtccttaaaggtttcagacatggtgaaactgaataaagcatgtcatttgctcctagatagattcattctatctagttgtggggatggagaaatctttaatggtatattttcggttattgccttatttttgatacagtattctgtcagtaatttattagacctggcagctttgggtgagcttagatttttcaccttcagtgttacattgtgtttgcttttaaaaactgcttttgaatggagttgtaaatacaatttttctatgaagatgtttggtttatttacctttttcttaagtttttaatgagaactttgagaaattatcacagggaattcccatgtagttcttttaatgggaagaatttgtaaatttaattgcactgagatattttggtcgttaccttgcaagtttctgtataaaacatagatacctgagttttaacacactgcaagtttatactaaggataatctgtgaaggtagggcaaagaaggttctaggaaagcccaactccacttgcttcttttatcacgacaggattcttgaaattacagcattggtgggttttttggtattttttttctttattagaaaatctctgttgtcacgtccccatgattactttggtttcattggtttatggtaactgctgtgagagtaaattaatgtgtatatgtttagtatttactctgtgcctagaatatatagatatcatgagaatacaaaaaattaaagacatgattattaacttcaaagagcttataaatgtagcagggaaaaaaaataacattcatgaaggaactgtggaaagattgaatgctgaactcggtataaatacactttagagacaggaaaatgttctgtgattaaaattgtttacagtctaggctgttataaagtatagactatggatgacctgtagatctgactttgttttctcaccatgattttctcaactgtaataccccagatgttggtctcagctctgttaggtgtcactaacatttttatggcaaagcactactctataccctcagagcagggggagtgggaggcaaacgggtcatcatttcagcctccaaaacagtaggaattcagctccttccttctcgtcctttgttgtggggtgtaggggagttactaaggaaagtttcagtaaggtgataccagatggtgcccaaacctgttgttatagcttgtttaagcattctagagttttcacttgtccttctgtccacttagagctactagatacatttttttcttcttgaacactgaaggaaaaggcaaaattaagttttggttggatggatttctaaagttttcttcttaggaaaataggatagtgacttttgtattctgtatgttaaattttctcagtaccattaatcctaagatgaagaggaaggctattgctgcagaggcatagttgaggacgtatagcactataccagagacaagaatgcttagctctagcaagtcttctgtcattgactaccttcataatcttcagcaggtttaggcctttcttagttcctttgtaaataatccatagagtcttagagttataattaaaggtccatggttctaaatacagaagcatatttttgccgcttaactttttctttcttaaagatgacactattaaaatagctgtttctgaccaggtgcagtagctcatgcttgtaatcccagcattttgggaggcggaggtgggcagatcacctgaggtcaggagttcaagaccagcctggccaacatggtgaaaccctgtgtctactaaaaatgcaaaaattagctgggtgtagtggcatgcacctgtagtcccagctacttgggaggctcaggcagggagaattgcttgaaccgggaggcagggggtgcagtgagccaagatcatgccactgcactccagcctgggcgactccatctcaaaaaaaataaatagctgtttaaaaaaaaaaaatctggtactatctttagttggttttaaaggatatattatctagaatatgcttacccattggctagatttgctaagtgttgtgggatttgggattttgctggtctgaagggagtttgtaaaacacatgactgaaagcattataaaacataccttgtcaaatacattagattcattataggtcaagggaattttgaaaagtaggctagattgctgcctaagaatcccactctaaagtactgctttgtttaatcattctagataatggaagcttgtaagcctccagaaagttaaaacaaaaaacttctttctgattaagagcctcttaactctatccttatcctctgctatctcaatgtagctattaattgttccctctttgtttctagactccaattttcatttctcaaattttggttctcagtgctgttagtattagtagccttttgtttcttcagaatgtatgtatttttcctcttaaatgtttcctttcccttttaaggttagtcctggaatacatgtttttcttggtcttgtagacttcatctcttctgatttccataataatttgcaccttgatgaatccagaattctcccactgtcttcaaagaatcttgaatagaataatctgctttttgaactctgctatctagtaatctctttagatatctataccacaagtttgaaacatcaaggtcaattttgataatttcctgtcttatgtcttaatacccattcagagttgactgccaactaacaagctcagcctttagcactggcacttactggccaatctgttttctgtctatagggagtgaaatggaatggagaaagaggatggcttgcattaataactctagtttttaaaaacatttttattccttttttaaaaatttgtttagagacacggtcttcttctatcacctaggctggagtgcagtggtgcgatcatggctcactgtagcctccaactcctaggctcaagtaatcctctttcctcggcttcccaaagtgctgggattacaggtgtgagtcactgtgcctggcccacattttcattcttggctcactgtagccttaatctttcaggctcaaatgattctcccatctcagcctcccaagtagctgggaccacaggcatgcatcaccacgactggctaatttttgtattttttttgtagaaccgggtttcaccatgtgcccaggctggtcttgaacttctgggctcaagttatctacctgcctcagcctacccaaagtgctgggattacaggagtgagccaccatgcccagttatgaacttcaagtaaatatttaaaatggagatacatcacaatgctattatgaataatttagatagaaattttaatttagttcagtacttaaatattttttggctcttctttcccactttacctttctctattccttcctcagttatctacatatcagattagattattgatatctgagatatatcactgacccagagcaaaattgcatattagtttaccatctaatcagcctaatgcacttaaattcccttggaatctttcctgttcagattggtgtgcatctctctgaacttgtagctttactgacatttccaaaaaaaggtagacggtttctaggtggtgtgtgtttttgttagttactagagccacttaccctttgtaactagctctaaagaagtacatcttttgctcatacctgctactgtaaccatatgacagtatggatttaagttatttctgcctagaggaattagatgataaaagctaaaaggacaaaatactggtttctgtgcagggaagggtcatatgtagttttaaataaaagggttcatctcttttgatgtggtttccctttctccatctgtgcattttttaaatcgtaagatcattttacacacaccaagagattttattttgggaacttgtggggaaaatattgatttacctacaaatgttactatttggagccatccttgtgattggtttctgagattaatttaactcttagcctcacttcctaccttagtaaagttgctcctccaaatcagctaaaatcatatacaatgaatgctgactcattactgcaaatagtggtagttactgtgtactagcatttcttatggattgggtggcattatctcatttttaatcgcccttcaatagcatcccattattgcaaatcagaaagatgatggggccaaagtaaagttctttgcccaggtcactctactagtaagtaattgcaatagctgggatttgaacccaggcctatcagactccattacccatacttctgacaactgcaatcctctcatcaggttaataagctagatgtggaatgaatgatttttattaccaaatcagctgactggaaatgaagcagagaatattcaagttaaagaactaattctttttttttttttttttgagacagtctcactctgtcgttcagggaaggaatgcagtggtgcaatcttggctcactgcaacctccacctcccaggttcaagtaattcttctgcctcagcctcctgagtagctgggattacaggcatgggccgccatgcccagctaatttttgtatttttagtagagacgaggtttcaccatgttggtcaggctggtcttgaactcctgacctcatgatccgcccaccttggcctcccaaaatgctgggattataggcgtgagccactgtgcccagccaagaactaattcttatataggagctgggaagataaattcctagagatcctcactttcttaagtaggaaagcttattaggaatccaaatcttttgcctcatactggaagtaatgcaaagaagtagtctgatttttgagagggtgctgtttttctcaaatctagatcattacagagaaacagtgtacttttaacaactgttgcatgtgtaagaagactggtacatgatgccaatgaaattctttttttcctttaacttgggagctctcataccagttccgttgtacaaatgctgagattgtttcaaggttttattcctacagacatgttaggatttgtgtatcactgatttctccaataaaatttgaatatttcaggttatttcctttttcctaacttatgttagcattttgtatatatatatatatttgaattttggcttgtctggagtcttaaatatttggtatgccttcacatttggatttttagttttatttttacattgagacttctacctatatcattgactttattttttcctatgattaaaggattcagttatacaaaaagatgtttcagaaacactgctatttacctaaaggtaattttcagtttctttagaaggagttaggaaaatggtccttaatacctatatagggttttttaaaaaactgtaccctataatgcagccacagaagatctaaataataaacaattgcgcatactattaatatatatttagagcttttgttaagtacatgaaaagacagtattgcatagtggttaaatgcatggactctgaagccatcctgtttgggatcatcctggctacattgcttactagctgtgtgacaatggatataggtgcttaatgtctctgtgcctcagtttttgtgtctatgtaaaggagataataggatccccctcatgcctcatggtcttagttgaatgaattcatgtaactccacaggtatcttaatccagaaggctcaaaatactaatgttttgtgtgtgtgtgtgtgtgtgcatgtgcatctgtatgacaagtgatataaaacgtgacctgaatttataatatgaatagtcacattttgcagcagaaatattaaatgtttaattatagaatgctagcactgatcctgctgaaattgttacaaaatacagcagttgccccttaactgtggcagatacattccaagacccccagtactgaatgctgtatgtacattttttatacatgtatacttatgataaagtttataaattaggcacagtaagatattaataatagaatatacaatataccgcaataaaacttatgtgaacagttatttttggacagcagttgactgtgggtcactgaaattgtggaaagcaaaaccatggataaaggggaactattaatagtctatctgtattgcattatcttctaaaatccaaaattctgacttcaaaaactcatctgagggttttggaattgtgtatctatgtgtgtgaagtgcaaagagcagtgcttcatgtgacagataacatcagatgatcctaggctggaaggtggaaatcctagagaagatttttttgtgttgtaagttcagtctttcaagatgtggaattctgtctgaggaaagtatatcacctagttaacaattgttactgtaatttataaaatttgtactttggagagcataagaattcatgaaaagtttttaataattttacttaaacagagcttaattatgtaagtattgtcagcactttataaagaatcgtaaaataaaatagtggcagaaaatataaactagatgtagaatgttaaggaactttcggaagttctctggttttcatttcaatttcaaagctcaaaacagaaggtaaaactattaggatttgtgaaaaatacaaggtacaaaatcacgcagtttataaaccacagattgtcttgttattcccatcagtgaaaagaagctgatatttgtttgtgtttgtttttgtttttgtttttgagacggagtcttgctctgtcgcccaggctggagtgcagtggcgccattttggctcactgcaagctccgcctcccggttcacgccattctcatgcctcagcctcccaagtagctgggactacaggcgtccgccaccatgcccggctaattttttgtatttttagtagagacaagagtttcaccgtgttagccaggatggtctcatctcctgatcttgtgacccgcccgcctcggcctcccaaagtgctgggattacaggcgtgagccaccatgcccagcctgctggtagatgtttttatgagttaattcatcaatcttattattcttgccccaaatgaatcagtgtggagcatatacaagtgtgtagacattaatatgggctcactgtcagctgggagttctcacaactaccactttttactgattatctgttttctaaactttttctgtggcttgaagtgactgaaagtgaacacattcataagtaatgagcttaggctgaggatatatatccagtgggggatgaaacatgcttaagaaattgagtgcatttcctttattattgttattattttgctatttcaaaacaattgactttaaaaaattatacttcaccacagagacaggtgttgttttgtaatggaaggagtagtaacttatgaatctagactcttaaaatcccagttctgatactttcataattgtgtgttttgagggcaagtgacttatctgaacttttttcttttttataacactggatgataattaaccctcaggattgtgaggatttaataactaagtcctgactcaaattatgttaccaataaatgctacttaaatgtaaagtccttgatttattttttcccctcagtcctgtttagtgttgaaattcttcaaaggagggtgagtctggcatttacctgctattcaagagttttcagaattcaaccccagccaaaatttttggccacatctcttgtcactgctttgctgtgtactaaagctcccagacacacaagaatcttctagtcatggtcaaactttttctgcaaagggcacttacagtctattgcatattctttgtttttagtgttcagacatctgctgtttctgaatatgtcgtgtattttcattcctttttctgcccctcctgggcatctccagtttcctactgatgtgtcaaaactgagtttgtatgctacctccaggaaagcagtctaatcttttgcaactctgttactgacttttgtggcattggattgggttatttgcttatggttgagacatcactggatcctttgatggagtcataccaaaaccacaacatgtcatgagcatgcttgagagtgctaatctattccttgtttgtcagaccagtacattacagttggttcatttcttcccccgtgtgactgagtttcttgagggcgcggtctagcttccatctttgtatgtgtagcacctggtacatagagaacaggctcccagaattggatggatttgctcatggtcttatcactgcacagaatgcccttattttcttccattcattctatgagatctcaattaaaatgtcagtactcttgtggaactcccctctccatgccctctactgaaatgcattgccactctagttgtgatgtgggagtgccttgtttatgcctctatttatgacaccttcatggtgtcacatgttatagggttagttgcggctgtgtctgttttaccttgtgtgtcttggtcagttagtgttatttacttaagctttggatctttgatacatagcgtagtgcctttcacatagtatgtactcaaatattggaagttactcatcccaaaccatagtgtttaaaattggggttttttaaaaatgtcaagcccttaaagttgatcatttatttgtcaatgtaaatagaatagtaatttgttttcaaaaagatgaggtcttgctgtggtgctcaggctggagtgcagtggctgttcacaggcgtgataattgtgtgttacagcctcaaagtccagggctcgagtgatcttctcacttcagcctcctgagtagctgagactaggcgtgcaccaccgtttctgacaggattttaatttttaagtaggtttttaacccacagccacgagagctaattttaactacattgttagaggtagtaacagttatataactaatcaaaaccagtgtgatatccaagtacttttttttttttttttttttgctatttaattttgagataccattttttggaggggtgtcctgatttattttatttattttatttatttatttttattttttatttttttagataaggtcttgctcttgcccaggctggaatgtaatggcatggtcgcagctcactgcagcctccgtcttctgggctcaagcaatcctccttcctcagcctcctgagtagctgggactacaggtgtgtgccaccactcccagctaatttttaaattttgtgtagagatggggtctccctgcattgcccaggttggtctctcaaactcctgggttcaagcagtcctcccaccttggcctcccaaagtgttgggattataggcgtaagccactgtgcccggctgttttttgttttgttttgttttgtgttttaattgaacggactgaagtttactttctaactaggttagccctccattcatacaaaattatgagcccaaatgtcttggggagagtacaggagaggccagatcttaaaagccaggagtggaattaggtttgagcatatgtagcaatatggaaacaaagagtgagtcaatttataagcataccaatcttcttggagacaaaagtttgaattgctcacgtgtccattttttttctggaatccctgaagaaattttgagatactgagtactagaaaaccctctttgatgagggttgtatactttatttttaaacagtatcaacaccgttgaggcccttcaagtctttgcagtcaaaagccatacactttttctttgagtgagcctttactttaaggtatgtagtagaataatataggtatctgaaaaagaacttggttcatgacatccactcattcatttatgcacttagcaaatattcattgattgccaaatacgcatcagacactgagctaggtgctaggtactaggtaaacaaaattccctgccttcatggagcttagcttgtggtggtggaaagaagccctcagcctgaatactcaacttatgtctgccgtttattccttaacacattaaactataggtaatagcatatgttagtctaatctttgtttagcaaagctatttcttgttctggaatataagtacagttacagcagaataagtaccaaggcaagattggagaatgaccggttgtgaacagggacttaggaatatgtgtagcataggattttattttagagttgttaaaatcagatcaacagagcatgtttttatgggccatctgacaagactagaggtagctttggaacctcttattccctggaatgcaaacatgtatttgcatttcatccactgtcagtatgaggagacaaaaacgaagtcaggattttggagctggaatggatcttaaatactatgtagtccaaacgtttggttttacagatgcactttttccagagtgctgtcatctcatatacttttttcttcatacaggtttttaatgtaactcactcagatcgttggtgatagactctctcttaaaacttatttatcctaatcttttttttttttttttttttaagagacagggttttgctctgctgtccaggcacacaatagctcactgtaacctccaactcctggagtcaagtgatcctcctgcctcagcctctcaggtagctgggactgcactactagtgcactaagctaatttttaaattttttttgtagagacagggtcttgctgtgttgcccgggctgctctcttaactcctggcctcaagtaatcctcttgccttggcttcccaaagtgctgggattacaggcgtgagccaccatgcttagctgatttgccctaatcctctgctgacattctgatatcggacaactaaaattataacattgggcagctattttgtatgatatatagggtagtggttcttaagcttattggtgagtaaccttcacttgggaagcttatttttaaaaatgtagaccttcattactttcctcctgagattttgaatcagtacctttgagagagggtccagtaaatctttgttttgaatgaactgatggttttgaagcaggtgacctggaggactgcatgtagaacacagtgatgtcaaggagtaaaggagagaacagaagtgagattagcactaatcacctctaatgccttatttccagtaaagtttagagaagaggaaaagctacttggcttgctcctttgaaggttttgtttccctcttaacacagaaattaaaaggtagaggagagatgctgaatgatgctttttttcttcttaatcttggggggtcattatgattaagttattgaatccatatcaccgtatgacagcacatgatgaaagaaaatcaaatgtttgtttcaatcaaagtgaaacaaaatgagaataactatttgggcaaaacacttttatcactgctaagatattactagaactgagcagagaaatactcagagagagccatggcatagtactaattaataatggggtaccatttagcaactggaatattctccgatgatgcctgtttaattacccataggtgctaagtgaatgttaaaaattacggtgctggttgagtaggccgagtagaatttgtgttagggcacatcccatggagatcttttttactgcttaattttttggagttacctcagtaacttaacaggcaggaatatggttttaatggaaaggaaaccatttgcctttaacagcattagtcccgctaagagaaagtttttgcttgtctagtttattacaggtctttgactttgtcagtatatggcaaatttagtataaaagatgattaattatcaaggctgatgaaatataggcagctgaaaagaaaattcttagcaattcataccttagaaggaaccctgaaggacaggacgccatagaaatcctgtttttttaaaaaagtaatttcaagtaagtttgcaaatgcaatgctagtaaaaagtatatagaggtatgtctttcacactatcttgttactattagaatttttgtagccatgtgcagaggagagaaaaggtgttggattttctgcagttctgattcagttctaagaatttggtgtgaaaagaatgtttgcaaaggagcaggcacaaaggtgagaacaggaatacgaaacacaacatctgtaaatgactaaattcagagggaatttagtggggcatatctcttaaatggttttgaataatttggtgttttaaccaatgacttaatttaacttagtgggtatactgttcccagtcccattactgatttttattcctctgtgataacatacacccaaataaagactgctatgtatttgactttaaaactataaagatgtaaaaaaggttcactaagccaaacaccttagaaaatagcctcagctatttgctatgtttatattatacctgcataaaagtatttatgtatagatgtacttaccttacacagtaagtacctaaaatttgtaaattgaatacttttgaatgtaagcagttgaagtaaaacctgtagtgagttcttcagtcagtcaacactaaacctgttttgtaaatttgatgctagtattatactggactttctcaaaatgaagtacacctatatatgcatatagtatatgagcatgtgtatttgtacaaaagcccttcaaaaggagttcagcttttataaacaccaaaacactctctgcctgtaaaatgtttttgctgaaatttgtatcattaactctcaaatttacatcttcatgtttgagatacgcttttaggactgtctatgcatgtagactttggtcaactctctcctcctccctcaataaatcagttaacttaaaaaatatattgtgaccatttttataaaatacatgttcataaaacagatcaacatatttagcttatacagaaataaaattaagtcaatccactcacaaagaatttctattttgtaaaaatgtagcttgtatttcagtataataaaatctgatgtaagaaa

SEQ ID NO: 180928 - DNA, 1217 bp, Homo sapiens
  Payload ID: 15628
  Gene Symbol: SUGT1
  Gene Name: SGT1 homolog, MIS12 kinetochore complex assembly cochaperone
  Uniprot ID: Q9Y2Z0
  ENST ID: ENST00000343788
  CDS Start-End: 83-1180
cagaagtttcccccttgggcggtggtggaggtggtaaccgtgatagtagcagctccggcggcagcaacagcgactacgagggatggcggcggctgcagcaggaactgcaacatcccagaggtttttccagagcttctcggatgccctaatcgacgaggacccccaggcggcgttagaggagctgactaaggctttggaacagaaaccagatgatgcacagtattattgtcaaagagcttattgtcacattcttcttgggaattactgtgttgctgttgctgatgcaaagaagtctctagaactcaatccaaataattccactgctatgctgagaaaaggaatatgtgaataccatgaaaaaaactatgctgctgccctagaaacttttacagaaggacaaaaattagatatagagacggggtttcatcgtgttggccaggctggtctccaactcttgacctcaagtgatccacctgccttggactcccaaagtgctgggattacaggtgcagatgctaatttcagtgtctggattaaaaggtgtcaagaagctcagaatggctcagaatctgaggtgtggactcatcagtcaaaaatcaagtatgactggtatcaaacagaatctcaagtagtcattacacttatgatcaagaatgttcagaagaatgatgtaaatgtggaattttcagaaaaagagttgtctgctttggttaaacttccttctggagaggattacaatttgaaactggaacttcttcatcctataataccagaacagagcacgtttaaagtactttcaacaaagattgaaattaaactgaaaaagccagaggctgtgagatgggaaaagctagaggggcaaggagatgtgcctacgccaaaacaattcgtagcagatgtaaagaacctatatccatcatcatctccttatacaagaaattgggataaattggttggtgagatcaaagaagaagaaaagaatgaaaagttggagggagatgcagctttaaacagattatttcagcagatctattcagatggttctgatgaagtgaaacgtgccatgaacaaatcctttatggagtcgggtggtacagttttgagtaccaactggtctgatgtaggtaaaaggaaagttgaaatcaatcctcctgatgatatggaatggaaaaagtactaaataaattaatttgctctcatcgtattgtgtatattca

SEQ ID NO: 180929 - DNA, 593 bp, Homo sapiens
  Payload ID: 15629
  Gene Symbol: SH2D1A
  Gene Name: SH2 domain containing 1A
  Uniprot ID: O60880
  ENST ID: ENST00000360027
  CDS Start-End: 119-496
ttttttgcacatctggctgaactgggagtcaggtggttgacttgtgcctggctgcagtagcagcggcatctcccttgcacagttctcctcctcggcctgcccaagagtccaccaggccatggacgcagtggctgtgtatcatggcaaaatcagcagggaaaccggcgagaagctcctgcttgccactgggctggatggcagctatttgctgagggacagcgagagcgtgccaggcgtgtactgcctatgtgtgctgtatcacggttacatttatacataccgagtgtcccagacagaaacaggttcttggagtgctgagacagcacctggggtacataaaagatatttccggaaaataaaaaatctcatttcagcatttcagaagccagatcaaggcattgtaatacctctgcagtatccagttgagaagaagtcctcagctagaagtacacaagggataagagaagatcctgatgtctgcctgaaagccccatgaagaaaaataaaacaccttgtactttattttctataatttaaatatatgctaagtcttatatattgtagataatacagttcggtgagctacaaatgca

SEQ ID NO: 180930 - DNA, 2450 bp, Homo sapiens
  Payload ID: 15629
  Gene Symbol: SH2D1A
  Gene Name: SH2 domain containing 1A
  Uniprot ID: O60880
  ENST ID: ENST00000371139
  CDS Start-End: 300-686
aaatccttcttccaatgttcctcccctctctgtatgaaccctgtgttggggggcagaagatggaagcccttggcaagctcgatcgaaccaagctactaaattgctgagctcgttttaactgaagtgtgagaaggaggtttaaggcaagtagacaacatcctgttgttggggtgcttctctcttttttgcacatctggctgaactgggagtcaggtggttgacttgtgcctggctgcagtagcagcggcatctcccttgcacagttctcctcctcggcctgcccaagagtccaccaggccatggacgcagtggctgtgtatcatggcaaaatcagcagggaaaccggcgagaagctcctgcttgccactgggctggatggcagctatttgctgagggacagcgagagcgtgccaggcgtgtactgcctatgtgtgctgtatcacggttacatttatacataccgagtgtcccagacagaaacaggttcttggagtgctgagacagcacctggggtacataaaagatatttccggaaaataaaaaatctcatttcagcatttcagaagccagatcaaggcattgtaatacctctgcagtatccagttgagaagaagtcctcagctagaagtacacaaggtactacagggataagagaagatcctgatgtctgcctgaaagccccatgaagaaaaataaaacaccttgtactttattttctataatttaaatatatgctaagtcttatatattgtagataatacagttcggtgagctacaaatgcatttctaaagccattgtagtcctgtaatggaagcatctagcatgtcgtcaaagctgaaatggacttttgtacatagtgaggagctttgaaacgaggattgggaaaaagtaattccgtaggttattttcagttattatatttacaaatgggaaacaaaaggataatgaatactttataaaggattaatgtcaattcttgccaaatataaataaaaataatcctcagtttttgtgaaaagctccatttttagtgaaatattattttatagctactaattttaaaatgtcttgcttgattgtatggtgggaagttggctggtgtcccttgtctttgccaagttctccactagctatggtgtcataggctcttttgggatttttgaagctgtatactgtgtgctaaaacaagcactaaacaaagagtgaaggatttatgtttaattctgaaagcaaccttcttgcctagtgttctgatattggacagtaaaatccacagaccaacctggagttgaaaatcttataatttaaaatatgctctaaacatgtttatcgtatttgatgctacaggatttgaaattgtattacaaatccaatgaaatgagtttttcttttcatttacctctgccccagttgtttctactacatggaagacctcattttgaagggaaatttcagcagctgcagctcatgagtaactgatttgtaacaagcctccttttaaagtaaccctacaaaaccactggaaagtttatggttgtattattttttaaaaaaattccaagtgattgaaacctacacgagatacagaattttatgcggcattttcttctcacatttatatttttgtgattttgtgattgattatatgtcactttgctacagggctcacagaattcattcactcaacaaacataatagggcgctgagggcatagaagtaaaaacacctggtccctgctctcagttcactgtcttgttggacgagaaaacaataacgataaaagacagtgaaagaaaataacgataaaagacagtgaaagaaaataacaataaaagacaaggaaaaaataacaatgaaagttgataagtacatgataagcgaggttccccgtgtgtaggtagatctggtctttagaggcagatagataggtcagtgcaaatactctggtccatgggccatatgaaaaggctaagcttcactgtaaaataataactgggaattctggattgtgtatgggtgttggtgaacttggttttaattagtgaactgctgagagacagagctattctccatgtactggcaagacctgatttctgagcatttaatatggatgccgtgggagtacaaaagtggagtgtggcctgagtaatgcattatgggtggtttaccatttcttgaggtaaaagcatcacatgaacttgtaaaggaatttaaaaatcctactttcataataagttgcataggtttaataatttttaattatatggcttgagtttaaattgtaataggcgtaactaattttaactctataatgtgttcattctggaataatcctaaacatatgaattatgtttgcatgttcacttccaagagcctttttttgaaaaaaagctttttttgaatcatcaagtctttcacatttaaataaagtgtttgaaagctttattta

SEQ ID NO: 180931 - DNA, 461 bp, Homo sapiens
  Payload ID: 15629
  Gene Symbol: SH2D1A
  Gene Name: SH2 domain containing 1A
  Uniprot ID: O60880
  ENST ID: ENST00000477673
  CDS Start-End: 55-285
ggcatctcccttgcacagttctcctcctcggcctgcccaagagtccaccaggccatggacgcagtggctgtgtatcatggcaaaatcagcagggaaaccggcgagaagctcctgcttgccactgggctggatggcagctatttgctgagggacagcgagagcgtgccaggtatcacggttacatttatacataccgagtgtcccagacagaaacaggttcttggagtgctgagcatttcagaagccagatcaaggcattgtaatacctctgcagtatccagttgagaagaagtcctcagctagaagtacacaaggtactacagggataagagaagatcctgatgtctgcctgaaagccccatgaagaaaaataaaacaccttgtactttattttctataatttaaatatatgctaagtcttatatattgtagataatacagttcggtgagctacaaatgca

SEQ ID NO: 180932 - DNA, 2523 bp, Homo sapiens
  Payload ID: 15630
  Gene Symbol: SH2D1B
  Gene Name: SH2 domain containing 1B
  Uniprot ID: O14796
  ENST ID: ENST00000367929
  CDS Start-End: 111-509
gtagctccacaggaggtacagctgcttacacatctctcctcagagctgtcccttgacttgggggtgaatttcaggccaacagggcttcctgggatacaagagcgttctccatggatctgccttactaccatggacgtctgaccaagcaagactgtgagaccttgctgctcaaggaaggggtggatggcaactttcttttaagagacagcgagtcgataccaggagtcctgtgcctctgtgtctcgtttaaaaatattgtctacacataccgaatcttcagagagaaacacgggtattacaggatacagactgcagaaggttctccaaaacaggtctttccaagcctaaaggaactgatctccaaatttgaaaaaccaaatcaggggatggtggttcaccttttaaagccaataaagagaaccagccccagcttgagatggagaggattgaaattagagttggaaacatttgtgaacagtaacagcgattatgtggatgtcttgccttgaagataaggctgccggacaaagcaagttgaagagatgagtaacagttctcactgatgacccacttctgcaggcataggtccagagcaccaaactctagtggacaattcagactctcctggttgtgtaactgaagatgttctgcccaccagcaccagaggtcactctccacatccccgcctcccagacatataccaggagcaatttcaaaaccctctccagtttcactcttctttcttggaatgggacagcctgaacattttccctttgacttgttaaaggtaccaccctacatcatggttgacaccctcctttggaccatgcagtcagaggggcagctttatacagaggaggggcacacttgtctgtgagtttgaagccctgagttccagtcctgtggctgtgtgactttgaacacgtttctgcccatctccaggtcttagtttctttgtctctgtggttgggtgggatgataaacattgccccagtctctctgttgagcctgcttgtgtcaggtgaaggtgagggatcgggagtgatggagatgcatacagatcagcaccttctctgtacctgctggacccccatgtgcacccttctccctccagcctgggctactctcctcctggttctttctaatcttaaacttcctggtgagcattgccccagccacactttctccctggttttgcttaattccacttatgcatcagtcatttcaacagcatgaatgtggttctgtacagtgatgtatgtggagatttctaaaatattctatgtgtgatttctgttcccaactaggttctaagtgccatcaaagcacggttgggtctcccttgtatcttccacagtgtgtagaaatttgtgctgcccagagctgtgcctagttcatagaaactgactggaagcacattgctgagggaggtttgttgaattggtttttaaggtttactgaaattgatttgctgaatttttctgctagttcaaaatgtgaattaggacctggtcagtttgaaatataccaaattctatgccctttctcttacctatcatcaaattgtagtaatgtatttcaccccactggacttatcttcagagttttaaaagagaggagctctcgacttagaggtaatatgaacagatgaacagacactgtggctggagccccaaagtgtggagcattgtgagatttggggtcacagcaatttatggctactattccctgggtctggtaggtaggacaaatgtcctcttttacttttcaaaactggcttaggtattcatggaccttgattcttctatatacattttataataaatacgtgaaattgcttaaaacctctttttggaatttttaatgaacttgcaacaaatttgtaaataggagagaactgacgttcttgtgatgttttcccatgcataaacatgccacatccatgttcttgggtcatcttttttgccctttcatggagtcataaattttcccaactgaagtcttgtatattctgttagattaattcctatttctagttgctgtaaatgatatcttatgttttattacatttctaataggatatggtgttggtgaaatgttaaccctctcattagatctactagtttacctgttgattctattgtgttttctatgtaaatgattttgtcagctataaataataacattttattttctctttccttgcaatacctatgctcatttattttttatgtttacccattggttagggcctcctgtatacattaaacagttcatagtcatgatagtgagtattcttacactgttcccagtattacagggaatgcttagaaattttctttatttaaacattatgtttgttgtagccttgttaaaggctattttataatttttactagaaatattttgacatttattgtgatttttttctatctctaatctattgagatagtcacattccttttgtcttcactccattataaaggtaagttaccttaataaaattgttgatatcatttcatc

SEQ ID NO: 180933 - DNA, 1599 bp, Homo sapiens
  Payload ID: 15631
  Gene Symbol: SH2D2A
  Gene Name: SH2 domain containing 2A
  Uniprot ID: Q9NP31
  ENST ID: ENST00000368198
  CDS Start-End: 150-1265
gggtaaggcgacatttcctgcccccggggccagggtgagaggagagatgatgagttgctgagtgtgcacacctttccggaacacatacacacaccctgctctgggatcccttgtgaggctgccctcatggagttccccctggcccagatatgtccccaagcaccttccagatcacagacatgacccgcaggagctgccagaacctgggctacactgcggcatctccccaggccccggaggctgcctccaacacagggaatgctgagagggcagaggaggtgcctggagaaggaagcctgttcctgcaggccgagacccgggcttggttccagaagacccaggcccactggctcctgcagcacggggcagcccctgcctggttccatggcttcatcacccggagggaggcagagaggctgctggagcccaagcctcaggggtgctacttggtgcggttcagcgagagcgcggtgaccttcgtgctgacttacaggagccggacttgctgccgccacttcctgctggcccagctcagggacgggcgccacgtggtgctgggcgaggacagcgcccacgcgcggctgcaggacctgctgctgcactacaccgcgcacccgctcagcccctacggggagacgctcaccgagcccctcgcccgacagactcctgagcctgcaggactttccctgaggaccgaagaatcaaactttggaagcaaaagccaggacccaaacccccagtacagcccaatcatcaaacaggggcaagccccagtcccgatgcagaaagagggggccggggagaaggagccctcccagctgctcaggcccaagcctcccatccccgccaaacctcagctgcccccagaagtctacacaatccctgttccacgacaccgcccggccccacgccccaagccctccaatcctatctacaatgagcctgatgaacccatagctttctatgccatgggccggggcagccctggggaagcccccagcaacatctatgtggaagtggaagatgagggcctacccgccacccttgggcaccctgtcctacggaagagctggtccaggcctgtcccaggaggccagaatacaggtggctcccagctgcattctgagaactctgtgattgggcaaggccctcccctgccccaccagcccccacccgcctggagacacaccctcccccacaatctttctagacaggtgcttcaggacagaggacaggcatggcttccccttgggcctcctcagtaggcggtctggcctgacccccaacaaagaagcctggaggtcagagaagcaaatgcggagcctgctccctcctaagaagatcccaagaatccaatggctcagtccttggtgatctaagacagcaaagaagtgtgcaaggagggccctgttagctcccactgtcctggtttctcctcctggagtctaatttccttggccctctgagccttttgagtctgggccctggtccaatgctgctgttgtctgaggaatggtttggtgagaacagatgttagaacttgtttgttgattcttgtctggctaataaatcatcaccaactgccttctcctacaggga

SEQ ID NO: 180934 - DNA, 1658 bp, Homo sapiens
  Payload ID: 15631
  Gene Symbol: SH2D2A
  Gene Name: SH2 domain containing 2A
  Uniprot ID: Q9NP31
  ENST ID: ENST00000368199
  CDS Start-End: 155-1324
cgtgagtcctcgccagaactaaggctgtgggtaaggcgacatttcctgcccccggggccagggtgagaggagagatgatgagttgctgagtgtgcacacctttccggaacacatacacacaccctgctctgggatcccttgtgaggctgccctcatggagttccccctggcccagatatgtccccaagggagtcacgaagcccccatcccaaccttcagcaccttccagatcacagacatgacccgcaggagctgccagaacctgggctacactgcggcatctccccaggccccggaggctgcctccaacacagggaatgctgagagggcagaggaggtgcctggagaaggaagcctgttcctgcaggccgagacccgggcttggttccagaagacccaggcccactggctcctgcagcacggggcagcccctgcctggttccatggcttcatcacccggagggaggcagagaggctgctggagcccaagcctcaggggtgctacttggtgcggttcagcgagagcgcggtgaccttcgtgctgacttacaggagccggacttgctgccgccacttcctgctggcccagctcagggacgggcgccacgtggtgctgggcgaggacagcgcccacgcgcggctgcaggacctgctgctgcactacaccgcgcacccgctcagcccctacggggagacgctcaccgagcccctcgcccgacagactcctgagcctgcaggactttccctgaggaccgaagaatcaaactttggaagcaaaagccaggacccaaacccccagtacagcccaatcatcaaacaggggcaagccccagtcccgatgcagaaagagggggccggggagaaggagccctcccagctgctcaggcccaagcctcccatccccgccaaacctcagctgcccccagaagtctacacaatccctgttccacgacaccgcccggccccacgccccaagccctccaatcctatctacaatgagcctgatgaacccatagctttctatgccatgggccggggcagccctggggaagcccccagcaacatctatgtggaagtggaagatgagggcctacccgccacccttgggcaccctgtcctacggaagagctggtccaggcctgtcccaggaggccagaatacaggtggctcccagctgcattctgagaactctgtgattgggcaaggccctcccctgccccaccagcccccacccgcctggagacacaccctcccccacaatctttctagacaggtgcttcaggacagaggacaggcatggcttccccttgggcctcctcagtaggcggtctggcctgacccccaacaaagaagcctggaggtcagagaagcaaatgcggagcctgctccctcctaagaagatcccaagaatccaatggctcagtccttggtgatctaagacagcaaagaagtgtgcaaggagggccctgttagctcccactgtcctggtttctcctcctggagtctaatttccttggccctctgagccttttgagtctgggccctggtccaatgctgctgttgtctgaggaatggtttggtgagaacagatgttagaacttgtttgttgattcttgtctggctaataaatcatcaccaactgccttctcctacaggga

SEQ ID NO: 180935 - DNA, 1673 bp, Homo sapiens
  Payload ID: 15631
  Gene Symbol: SH2D2A
  Gene Name: SH2 domain containing 2A
  Uniprot ID: Q9NP31
  ENST ID: ENST00000392306
  CDS Start-End: 141-1340
agaactaaggctgtgggtaaggcgacatttcctgcccccggggccagggtgagaggagagatgatgagttgctgagtgtgcacacctttccggaacacatacacacaccctgctctgggatcccttgtgaggctgccctcatggagttccccctggcccagatatgtccccaagggagtcacgaagcccccatcccaaccttcagcaccttccagatcacagacatgacccgcaggagctgccagaacctgggctacactgcggcatctccccaggccccggaggctgcctccaacacagggaatgctgagagggcagaggaggtgcctggagaaggaagcctgttcctgcaggccgagacccgggcttggttccagaagacccaggcccactggctcctgcagcacggggcagcccctgcctggttccatggcttcatcacccggagggttcggccccctctctccgtcacccacagggaggcagagaggctgctggagcccaagcctcaggggtgctacttggtgcggttcagcgagagcgcggtgaccttcgtgctgacttacaggagccggacttgctgccgccacttcctgctggcccagctcagggacgggcgccacgtggtgctgggcgaggacagcgcccacgcgcggctgcaggacctgctgctgcactacaccgcgcacccgctcagcccctacggggagacgctcaccgagcccctcgcccgacagactcctgagcctgcaggactttccctgaggaccgaagaatcaaactttggaagcaaaagccaggacccaaacccccagtacagcccaatcatcaaacaggggcaagccccagtcccgatgcagaaagagggggccggggagaaggagccctcccagctgctcaggcccaagcctcccatccccgccaaacctcagctgcccccagaagtctacacaatccctgttccacgacaccgcccggccccacgccccaagccctccaatcctatctacaatgagcctgatgaacccatagctttctatgccatgggccggggcagccctggggaagcccccagcaacatctatgtggaagtggaagatgagggcctacccgccacccttgggcaccctgtcctacggaagagctggtccaggcctgtcccaggaggccagaatacaggtggctcccagctgcattctgagaactctgtgattgggcaaggccctcccctgccccaccagcccccacccgcctggagacacaccctcccccacaatctttctagacaggtgcttcaggacagaggacaggcatggcttccccttgggcctcctcagtaggcggtctggcctgacccccaacaaagaagcctggaggtcagagaagcaaatgcggagcctgctccctcctaagaagatcccaagaatccaatggctcagtccttggtgatctaagacagcaaagaagtgtgcaaggagggccctgttagctcccactgtcctggtttctcctcctggagtctaatttccttggccctctgagccttttgagtctgggccctggtccaatgctgctgttgtctgaggaatggtttggtgagaacagatgttagaacttgtttgttgattcttgtctggctaataaatcatcaccaactgccttctcctacaggg

SEQ ID NO: 180936 - DNA, 2296 bp, Homo sapiens
  Payload ID: 15632
  Gene Symbol: SH2D3A
  Gene Name: SH2 domain containing 3A
  Uniprot ID: Q9BRG2
  ENST ID: ENST00000245908
  CDS Start-End: 271-2001
aagttagtttgaggcggggcccgcagggggcggggtctgcaggaggtgtggtcaggtaactgggctgagttcccactaggtgtggtctgggaaggctggggcggtggcaaggtggagggcgggggtgacagcagcccggagccgcggagcctcagcttccgcctggacccagcctcgtgggagccccgcgggtcctgcccagatgtggaagactgaggcctgttgaaagtgcagagctcagccctggcaccctctgttcccaagagctccatgcaggtgccacaggatggagaagaccttgctggccaaccttggtaccacggcctcctgtcccgccagaaggctgaagctcttcttcagcaaaatggcgacttcctggttcgcgcctctgggtcccgtgggggcaaccccgtgatctcctgccgctggcggggctcagccctccattttgaggtgttccgtgtggccctgcgtccccggccaggccgacccacagccctctttcaactggaggatgagcaattccccagcataccggctctggttcacagttatatgacaggcaggcgcccactgtcccaggccacaggggctgtggtctccaggcctgtgacttggcaggggcctctgcgacgcagctttagcgaggacaccctgatggatggcccagctcggatagagcctctcagggcaaggaagtggagcaacagtcagcctgcagatttggcacatatggggcggtcaagagaagaccccgctgggatggaagcctccaccatgcccatatctgccttgccccgaacgagcagtgacccggtgttgctgaaggcccctgctcccctgggaactgttgccgacagtctcagggcctccgatgggcagcttcaagccaaggcaccaacgaagcccccccggacaccctccttcgaactgcctgatgcctctgaacgtcccccgacgtactgcgagctggtgccccgagtgcccagtgtccagggaacatccccgagccaaagctgcccagagccagaggccccatggtgggaggccgaggaggatgaggaggaagagaatagatgttttacaagaccacaggctgagatctctttctgcccccatgatgccccctcctgcctgctgggcccccagaatcggcccctggaaccccaagtcctgcataccctccgtggcctgttcctggagcaccatcctgggagcaccgcccttcacctgctattggtagactgccaggccacaggcctcctgggagtgaccagagatcagcggggcaacatgggagtctcatctggcctggagctgctcactcttccccatggacaccacttgaggttggaactgctggagaggcatcagacactggcgctggccggggcgctggcggtgctgggctgctcggggccgctggaggagcgcgcagccgcactgaggggactggtagagctggcgctggcgctgcggccaggggcggcgggggacctgcccgggctggctgcagtcatgggcgccctgctcatgccccaggtgtcccggttggagcacacgtggcgccagctccgaaggagccacacggaggctgcgctggcctttgagcaggagctgaagccgctgatgcgggctctggatgagggcgctggaccctgcgaccccggcgaggtggcgctgccgcacgtggcacccatggttcgcctactggagggcgaggaagtcgcggggccgctggacgagagctgtgagcggctgttgcgcaccctgcacggggcgcgtcacatggtccgggacgcacccaaattccgcaaggtggcagcccagcgcctgcgaggattccggcctaacccggagctgagggaggccctgaccaccggcttcgtgcggaggctgctctggggtagccggggcgcgggagctccgcgcgctgaacgctttgagaagttccagcgcgtcctcggcgtcctgtcgcagcgcctggagcctgaccgctgagagcgcagacacccttcttcacacccgggacccccaggtttttgcgaaccccagaagagaccaaaggagtcgtcccaggctcctcgcgcctcaggtggaatcctgccctgtgcctcacagaagaggtggggaccgcagtcagggtcacctggaccatggtgaacatgtgacctgcagatctggcatcagaggccagagttcaaatgtgactccacctcttaaaagccgtgatttctagcagttgacttcacctctgtgtcggcctttaacaaaatcatagccatacagcagctca

SEQ ID NO: 180937 - DNA, 2013 bp, Homo sapiens
  Payload ID: 15632
  Gene Symbol: SH2D3A
  Gene Name: SH2 domain containing 3A
  Uniprot ID: Q9BRG2
  ENST ID: ENST00000437152
  CDS Start-End: 134-1585
agcttccgcctggacccagcctcgtgggagccccgcgggtcctgcccagatgtggaagactgaggcctgttgaaagtgcagagctcagccctggcaccctctgttcccaagagctccatgcaggtgccacaggatggagaagaccttgctggccaaccttggtaccacggcctcctgtcccgccagggcaaggaagtggagcaacagtcagcctgcagatttggcacatatggggcggtcaagagaagaccccgctgggatggaagcctccaccatgcccatatctgccttgccccgaacgagcagtgacccggtgttgctgaaggcccctgctcccctgggaactgttgccgacagtctcagggcctccgatgggcagcttcaagccaaggcaccaacgaagcccccccggacaccctccttcgaactgcctgatgcctctgaacgtcccccgacgtactgcgagctggtgccccgagtgcccagtgtccagggaacatccccgagccaaagctgcccagagccagaggccccatggtgggaggccgaggaggatgaggaggaagagaatagatgttttacaagaccacaggctgagatctctttctgcccccatgatgccccctcctgcctgctgggcccccagaatcggcccctggaaccccaagtcctgcataccctccgtggcctgttcctggagcaccatcctgggagcaccgcccttcacctgctattggtagactgccaggccacaggcctcctgggagtgaccagagatcagcggggcaacatgggagtctcatctggcctggagctgctcactcttccccatggacaccacttgaggttggaactgctggagaggcatcagacactggcgctggccggggcgctggcggtgctgggctgctcggggccgctggaggagcgcgcagccgcactgaggggactggtagagctggcgctggcgctgcggccaggggcggcgggggacctgcccgggctggctgcagtcatgggcgccctgctcatgccccaggttcgtggggagcagggactggaggaagctggagtgcgggtgactgggaagactggagaggaggcgtgctcagatctcttctcccaggtgtcccggttggagcacacgtggcgccagctccgaaggagccacacggaggctgcgctggcctttgagcaggagctgaagccgctgatgcgggctctggatgagggcgctggaccctgcgaccccggcgaggtggcgctgccgcacgtggcacccatggttcgcctactggagggcgaggaagtcgcggggccgctggacgagagctgtgagcggctgttgcgcaccctgcacggggcgcgtcacatggtccgggacgcacccaaattccgcaaggtggcagcccagcgcctgcgaggattccggcctaacccggagctgagggaggccctgaccaccggcttcgtgcggaggctgctctggggtagccggggcgcgggagctccgcgcgctgaacgctttgagaagttccagcgcgtcctcggcgtcctgtcgcagcgcctggagcctgaccgctgagagcgcagacacccttcttcacacccgggacccccaggtttttgcgaaccccagaagagaccaaaggagtcgtcccaggctcctcgcgcctcaggtggaatcctgccctgtgcctcacagaagaggtggggaccgcagtcagggtcacctggaccatggtgaacatgtgacctgcagatctggcatcagaggccagagttcaaatgtgactccacctcttaaaagccgtgatttctagcagttgacttcacctctgtgtcggcctttaacaaaatcatagccatacagcagctcaggcctgtaatctcagcactttgggaggccgaggcggaaggaaggcttgaggccaggagttcaagaccagccagggcaacatggtgagacctcatctctacaaaaactgaaaaataaaaaacttttaaaaaatg

SEQ ID NO: 180938 - DNA, 859 bp, Homo sapiens
  Payload ID: 15632
  Gene Symbol: SH2D3A
  Gene Name: SH2 domain containing 3A
  ENST ID: ENST00000597687
  CDS Start-End: 146-859
tgacagcagcccggagccgcggagcctcagcttccgcctggacccagcctcgtgggagccccgcgggtcctgcccagatgtggaagactgaggcctgttgaaagtgcagagctcagccctggcaccctctgttcccaagagctccatgcaggtgccacaggatggagaagaccttgctggccaaccttggtaccacggcctcctgtcccgccagaaggctgaagctcttcttcagcaaaatggcgacttcctggttcgcgcctctgggtcccgtgggggcaaccccgtgatctcctgccgctggcggggctcagccctccattttgaggtgttccgtgtggccctgcgtccccggccaggccgacccacagccctctttcaactggaggatgagcaattccccagcataccggctctggttcacagttatatgacaggcaggcgcccactgtcccaggccacaggggctgtggtctccaggcctgtgacttggcaggggcctctgcgacgcagctttagcgaggacaccctgatggatggcccagctcggatagagcctctcagggcaaggaagtggagcaacagtcagcctgcagatttggcacatatggggcggtcaagagaagaccccgctgggatggaatcggcccctggaaccccaagtcctgcataccctccgtggcctgttcctggagcaccatcctgggagcaccgcccttcacctgctattggtagactgccaggccacaggcctcctgggagtgaccagagatcagcggggcaacatgggagtctcatctggcctggagctgctcactcttccccatggacaccacttgaggttggaactgctggagag

SEQ ID NO: 180939 - DNA, 3124 bp, Homo sapiens
  Payload ID: 15633
  Gene Symbol: SH2D3C
  Gene Name: SH2 domain containing 3C
  Uniprot ID: Q8N5H7
  ENST ID: ENST00000314830
  CDS Start-End: 115-2697
ggaagcgagtaagagaaaggggaaggggaggtgggagaggcacctcaactttgatgtcccgagccttgagtggccactcgcaagctggccaagggcttcacacaatttgccaagatgacagaggggaccaagaagaccagcaaaaagttcaagttcttcaagttcaagggctttgggagtctctccaacctccctcggtccttcactctgagacgatcctcagcttccatcagtaggcagtcccatttggagcctgacacctttgaagccacgcaggatgacatggtgacggtgcccaagagtcccccagcctatgcccgctccagtgacatgtacagccacatgggcaccatgcctcgccccagcatcaagaaagcacagaactcacaggctgcccggcaggcccaggaggcgggtcccaagcccaacttggtacccggaggtgtacccgaccccccaggcttggaggcagccaaagaggtgatggtgaaggccactggccctctagaggacaccccagcaatggaacccaacccttcagcagtggaggtagaccccatcagaaagcctgaggtccccacaggagacgtagaagaggagagacctcccagggacgtgcactcagaaagggctgctggagagccagaggctggcagcgactatgtgaagttctccaaggagaagtacatcctggactcatcgccagagaaactccacaaggaattggaggaggagctcaaactcagcagcacggatctccgcagccatgcctggtaccatggccgcatcccccgagaggtctcggagaccttggtacaacgcaacggcgacttcctcatccgggactcactcaccagcctgggcgactatgtgctcacgtgccgctggcgcaaccaggccttgcacttcaagatcaacaaggtggtggtgaaggcaggcgagagctacacacacatccagtacctgtttgagcaggagagctttgaccacgtgcccgccctcgtgcgctatcatgtgggcagccgcaaggctgtgtcagagcagagtggtgccatcatctactgcccggtgaaccgcaccttcccactgcgctacctcgaggccagctatggcctgggacaggggagtagcaagcctgctagccccgtcagcccctcaggccccaagggcagccacatgaagcggcgcagcgtcaccatgaccgatgggctcactgctgacaaggtcacccgcagcgatggctgccccaccagtacgtcgctgccccgccctcgggactccatccgcagctgtgccctcagcatggaccagatcccagacctgcactcacccatgtcgcccatctccgagagccctagctcccctgcctacagcactgtaacccgtgtccatgccgcccctgcagccccttctgccacagcattgcctgcctcccctgtcgcccgccgttccagtgagccccagctgtgtcccggaagtgccccaaagacccatggggagtcagacaagggcccccacaccagcccctcccacacccttggcaaggcctccccgtcaccatcactcagcagctacagtgacccggactctggccactactgccagctccagcctcccgtgcgtggcagccgagagtgggcagcgactgagacctccagccagcaggccaggagctatggggagaggctaaaggaactgtcagaaaatggggcccctgaaggggactggggcaagaccttcacagtccccatcgtggaagtcacttcttccttcaacccggccaccttccagtcactactgatccccagggataaccggccactggaggtgggccttctgcgcaaggtcaaggagctgctggcagaagtggatgcccggacgctggcccggcatgtcaccaaggtggactgcctggttgctaggatactgggcgttaccaaggagatgcagaccctaatgggagtccgctggggcatggaactgctcaccctcccccatggccggcagctacgcctagacctgctggaaaggttccacaccatgtccatcatgctggccgtggacatcctgggctgcaccggctctgcggaggagcgggcagcgctgctgcacaagaccattcagctggcggccgagctgcgggggactatgggcaacatgttcagcttcgcggcggtcatgggtgccctggacatggcccagatttctcggctggagcagacatgggtgaccctgcggcagcgacacacagagggtgccatcctgtacgagaagaagctcaagccttttctcaagagcctcaacgagggcaaagaaggcccgccgctgagcaacaccacgtttcctcatgtgctgcccctcatcaccctgctggagtgtgactcggccccaccagagggccctgagccctggggcagcacggagcacggcgtggaggtggtgctggctcacctggaggccgcccgcacagtggcacaccacggaggcctgtaccacaccaatgctgaagtcaagctgcaggggttccaggcccggccggagctcctggaggtgttcagcacggagttccagatgcgccttctctggggcagtcagggtgccagcagcagccaggcccggcgctatgagaagttcgacaaggtcctcactgccctgtcccacaagctggaacctgctgtccgctccagcgagctgtgaccccagggacatttcccctctgcagctgcggacagcgtcaggggcagaggggcacacaactttccccagagcaccccaaggacactgtgatcaacccgagaatgttctgggttcaactcaagcatctcccttgcacctccagggtcctgcgtggactctgggttccatcccacctgctacatgctcaccaggtctccattgaggaagaacaggaacgccggttcccccaccagcttttgctgctccccttcctgctggggttccctgttttcgagccatgggaggcaggctgctcacgcctcctcactctctgtctgtccctcaccaacaccaaggcctccatctcactgtaaataagtctctgttctgtaaatagatgtacagaagccatgttatttctttcatataataaacttttatgactctt

SEQ ID NO: 180940 - DNA, 3051 bp, Homo sapiens
  Payload ID: 15633
  Gene Symbol: SH2D3C
  Gene Name: SH2 domain containing 3C
  Uniprot ID: Q8N5H7
  ENST ID: ENST00000373276
  CDS Start-End: 245-2623
cgtgtctgggggcgtggtctacaggtcagtctccgcccccggagtccggcactgagctctgcagctcagtggcccgagaaaggcaggagccgctgggtttaggaggtccccgggttgccggcggcgacagcgggggaagcatgactgctgtgggccgaaggtgccccgcgctggggtcccgagggttttgagacttgggtggcagctgtcagggcccagcatcctcagctccgctctgggaagaatggcccctgctctgccttctcctcacaaggctgtcgcccgtcctgagctcctgctggacactgcagcccactcaggaaaactgagggctccagacggtggagagggagcagaatgtgctgggcacaatggtggcccatcttggggagtggggcagggccaaagccaagagccttcccggcagggaatcccacaggccccatggctggtgtcctggcagagacggggctttccacccagctctttttgcccagggcctttaaggactgagaagctcagagcaggcaggtgcccgttgcttctctgcggtggggctgctggagagccagaggctggcagcgactatgtgaagttctccaaggagaagtacatcctggactcatcgccagagaaactccacaaggaattggaggaggagctcaaactcagcagcacggatctccgcagccatgcctggtaccatggccgcatcccccgagaggtctcggagaccttggtacaacgcaacggcgacttcctcatccgggactcactcaccagcctgggcgactatgtgctcacgtgccgctggcgcaaccaggccttgcacttcaagatcaacaaggtggtggtgaaggcaggcgagagctacacacacatccagtacctgtttgagcaggagagctttgaccacgtgcccgccctcgtgcgctatcatgtgggcagccgcaaggctgtgtcagagcagagtggtgccatcatctactgcccggtgaaccgcaccttcccactgcgctacctcgaggccagctatggcctgggacaggggagtagcaagcctgctagccccgtcagcccctcaggccccaagggcagccacatgaagcggcgcagcgtcaccatgaccgatgggctcactgctgacaaggtcacccgcagcgatggctgccccaccagtacgtcgctgccccgccctcgggactccatccgcagctgtgccctcagcatggaccagatcccagacctgcactcacccatgtcgcccatctccgagagccctagctcccctgcctacagcactgtaacccgtgtccatgccgcccctgcagccccttctgccacagcattgcctgcctcccctgtcgcccgccgttccagtgagccccagctgtgtcccggaagtgccccaaagacccatggggagtcagacaagggcccccacaccagcccctcccacacccttggcaaggcctccccgtcaccatcactcagcagctacagtgacccggactctggccactactgccagctccagcctcccgtgcgtggcagccgagagtgggcagcgactgagacctccagccagcaggccaggagctatggggagaggctaaaggaactgtcagaaaatggggcccctgaaggggactggggcaagaccttcacagtccccatcgtggaagtcacttcttccttcaacccggccaccttccagtcactactgatccccagggataaccggccactggaggtgggccttctgcgcaaggtcaaggagctgctggcagaagtggatgcccggacgctggcccggcatgtcaccaaggtggactgcctggttgctaggatactgggcgttaccaaggagatgcagaccctaatgggagtccgctggggcatggaactgctcaccctcccccatggccggcagctacgcctagacctgctggaaaggttccacaccatgtccatcatgctggccgtggacatcctgggctgcaccggctctgcggaggagcgggcagcgctgctgcacaagaccattcagctggcggccgagctgcgggggactatgggcaacatgttcagcttcgcggcggtcatgggtgccctggacatggcccagatttctcggctggagcagacatgggtgaccctgcggcagcgacacacagagggtgccatcctgtacgagaagaagctcaagccttttctcaagagcctcaacgagggcaaagaaggcccgccgctgagcaacaccacgtttcctcatgtgctgcccctcatcaccctgctggagtgtgactcggccccaccagagggccctgagccctggggcagcacggagcacggcgtggaggtggtgctggctcacctggaggccgcccgcacagtggcacaccacggaggcctgtaccacaccaatgctgaagtcaagctgcaggggttccaggcccggccggagctcctggaggtgttcagcacggagttccagatgcgccttctctggggcagtcagggtgccagcagcagccaggcccggcgctatgagaagttcgacaaggtcctcactgccctgtcccacaagctggaacctgctgtccgctccagcgagctgtgaccccagggacatttcccctctgcagctgcggacagcgtcaggggcagaggggcacacaactttccccagagcaccccaaggacactgtgatcaacccgagaatgttctgggttcaactcaagcatctcccttgcacctccagggtcctgcgtggactctgggttccatcccacctgctacatgctcaccaggtctccattgaggaagaacaggaacgccggttcccccaccagcttttgctgctccccttcctgctggggttccctgttttcgagccatgggaggcaggctgctcacgcctcctcactctctgtctgtccctcaccaacaccaaggcctccatctcactgtaaataagtctctgttctgtaaatagatgtacagaagccatgttatttctttcatataataaacttttatgactcttt

SEQ ID NO: 180941 - DNA, 2750 bp, Homo sapiens
  Payload ID: 15633
  Gene Symbol: SH2D3C
  Gene Name: SH2 domain containing 3C
  Uniprot ID: Q8N5H7
  ENST ID: ENST00000373277
  CDS Start-End: 210-2321
gaggcggagagcgtccttccctgccggtggagtaggcggtggagtggggccgggcaaggagcgcaggggcgtgtctgggggcgtggtctacaggtcagtctccgcccccggagtccggcactgagctctgcagctcagtggcccgagaaaggcaggagccgctgggtttaggaggtccccgggttgccggcggcgacagcgggggaagcatgactgctgtgggccgaaggtgccccgcgctggggtcccgaggggctgctggagagccagaggctggcagcgactatgtgaagttctccaaggagaagtacatcctggactcatcgccagagaaactccacaaggaattggaggaggagctcaaactcagcagcacggatctccgcagccatgcctggtaccatggccgcatcccccgagaggtctcggagaccttggtacaacgcaacggcgacttcctcatccgggactcactcaccagcctgggcgactatgtgctcacgtgccgctggcgcaaccaggccttgcacttcaagatcaacaaggtggtggtgaaggcaggcgagagctacacacacatccagtacctgtttgagcaggagagctttgaccacgtgcccgccctcgtgcgctatcatgtgggcagccgcaaggctgtgtcagagcagagtggtgccatcatctactgcccggtgaaccgcaccttcccactgcgctacctcgaggccagctatggcctgggacaggggagtagcaagcctgctagccccgtcagcccctcaggccccaagggcagccacatgaagcggcgcagcgtcaccatgaccgatgggctcactgctgacaaggtcacccgcagcgatggctgccccaccagtacgtcgctgccccgccctcgggactccatccgcagctgtgccctcagcatggaccagatcccagacctgcactcacccatgtcgcccatctccgagagccctagctcccctgcctacagcactgtaacccgtgtccatgccgcccctgcagccccttctgccacagcattgcctgcctcccctgtcgcccgccgttccagtgagccccagctgtgtcccggaagtgccccaaagacccatggggagtcagacaagggcccccacaccagcccctcccacacccttggcaaggcctccccgtcaccatcactcagcagctacagtgacccggactctggccactactgccagctccagcctcccgtgcgtggcagccgagagtgggcagcgactgagacctccagccagcaggccaggagctatggggagaggctaaaggaactgtcagaaaatggggcccctgaaggggactggggcaagaccttcacagtccccatcgtggaagtcacttcttccttcaacccggccaccttccagtcactactgatccccagggataaccggccactggaggtgggccttctgcgcaaggtcaaggagctgctggcagaagtggatgcccggacgctggcccggcatgtcaccaaggtggactgcctggttgctaggatactgggcgttaccaaggagatgcagaccctaatgggagtccgctggggcatggaactgctcaccctcccccatggccggcagctacgcctagacctgctggaaaggttccacaccatgtccatcatgctggccgtggacatcctgggctgcaccggctctgcggaggagcgggcagcgctgctgcacaagaccattcagctggcggccgagctgcgggggactatgggcaacatgttcagcttcgcggcggtcatgggtgccctggacatggcccagatttctcggctggagcagacatgggtgaccctgcggcagcgacacacagagggtgccatcctgtacgagaagaagctcaagccttttctcaagagcctcaacgagggcaaagaaggcccgccgctgagcaacaccacgtttcctcatgtgctgcccctcatcaccctgctggagtgtgactcggccccaccagagggccctgagccctggggcagcacggagcacggcgtggaggtggtgctggctcacctggaggccgcccgcacagtggcacaccacggaggcctgtaccacaccaatgctgaagtcaagctgcaggggttccaggcccggccggagctcctggaggtgttcagcacggagttccagatgcgccttctctggggcagtcagggtgccagcagcagccaggcccggcgctatgagaagttcgacaaggtcctcactgccctgtcccacaagctggaacctgctgtccgctccagcgagctgtgaccccagggacatttcccctctgcagctgcggacagcgtcaggggcagaggggcacacaactttccccagagcaccccaaggacactgtgatcaacccgagaatgttctgggttcaactcaagcatctcccttgcacctccagggtcctgcgtggactctgggttccatcccacctgctacatgctcaccaggtctccattgaggaagaacaggaacgccggttcccccaccagcttttgctgctccccttcctgctggggttccctgttttcgagccatgggaggcaggctgctcacgcctcctcactctctgtctgtccctcaccaacaccaaggcctccatctcactgtaaataagtctctgttctgtaaatagatgtacagaagccatgttatttctttcatataataaacttttatgactcttta

SEQ ID NO: 180942 - DNA, 2682 bp, Homo sapiens
  Payload ID: 15633
  Gene Symbol: SH2D3C
  Gene Name: SH2 domain containing 3C
  Uniprot ID: Q8N5H7
  ENST ID: ENST00000420366
  CDS Start-End: 146-2254
cccgctcctcccccgacaaggcgatgaggtaatcgcgccgctgagaggcacgcgcagccggtgcctagccggttggtccctgcgcccctgccccgccggccaccgcccccccacaccgtcccggccccggcagcctggccccaccatgaccgagcggtgcagcctgtggagtgccctgtcggccgccgcctgctgcttctaccgcggctccttcgtgcaggtgcagttctccaaggagaagtacatcctggactcatcgccagagaaactccacaaggaattggaggaggagctcaaactcagcagcacggatctccgcagccatgcctggtaccatggccgcatcccccgagaggtctcggagaccttggtacaacgcaacggcgacttcctcatccgggactcactcaccagcctgggcgactatgtgctcacgtgccgctggcgcaaccaggccttgcacttcaagatcaacaaggtggtggtgaaggcaggcgagagctacacacacatccagtacctgtttgagcaggagagctttgaccacgtgcccgccctcgtgcgctatcatgtgggcagccgcaaggctgtgtcagagcagagtggtgccatcatctactgcccggtgaaccgcaccttcccactgcgctacctcgaggccagctatggcctgggacaggggagtagcaagcctgctagccccgtcagcccctcaggccccaagggcagccacatgaagcggcgcagcgtcaccatgaccgatgggctcactgctgacaaggtcacccgcagcgatggctgccccaccagtacgtcgctgccccgccctcgggactccatccgcagctgtgccctcagcatggaccagatcccagacctgcactcacccatgtcgcccatctccgagagccctagctcccctgcctacagcactgtaacccgtgtccatgccgcccctgcagccccttctgccacagcattgcctgcctcccctgtcgcccgccgttccagtgagccccagctgtgtcccggaagtgccccaaagacccatggggagtcagacaagggcccccacaccagcccctcccacacccttggcaaggcctccccgtcaccatcactcagcagctacagtgacccggactctggccactactgccagctccagcctcccgtgcgtggcagccgagagtgggcagcgactgagacctccagccagcaggccaggagctatggggagaggctaaaggaactgtcagaaaatggggcccctgaaggggactggggcaagaccttcacagtccccatcgtggaagtcacttcttccttcaacccggccaccttccagtcactactgatccccagggataaccggccactggaggtgggccttctgcgcaaggtcaaggagctgctggcagaagtggatgcccggacgctggcccggcatgtcaccaaggtggactgcctggttgctaggatactgggcgttaccaaggagatgcagaccctaatgggagtccgctggggcatggaactgctcaccctcccccatggccggcagctacgcctagacctgctggaaaggttccacaccatgtccatcatgctggccgtggacatcctgggctgcaccggctctgcggaggagcgggcagcgctgctgcacaagaccattcagctggcggccgagctgcgggggactatgggcaacatgttcagcttcgcggcggtcatgggtgccctggacatggcccagatttctcggctggagcagacatgggtgaccctgcggcagcgacacacagagggtgccatcctgtacgagaagaagctcaagccttttctcaagagcctcaacgagggcaaagaaggcccgccgctgagcaacaccacgtttcctcatgtgctgcccctcatcaccctgctggagtgtgactcggccccaccagagggccctgagccctggggcagcacggagcacggcgtggaggtggtgctggctcacctggaggccgcccgcacagtggcacaccacggaggcctgtaccacaccaatgctgaagtcaagctgcaggggttccaggcccggccggagctcctggaggtgttcagcacggagttccagatgcgccttctctggggcagtcagggtgccagcagcagccaggcccggcgctatgagaagttcgacaaggtcctcactgccctgtcccacaagctggaacctgctgtccgctccagcgagctgtgaccccagggacatttcccctctgcagctgcggacagcgtcaggggcagaggggcacacaactttccccagagcaccccaaggacactgtgatcaacccgagaatgttctgggttcaactcaagcatctcccttgcacctccagggtcctgcgtggactctgggttccatcccacctgctacatgctcaccaggtctccattgaggaagaacaggaacgccggttcccccaccagcttttgctgctccccttcctgctggggttccctgttttcgagccatgggaggcaggctgctcacgcctcctcactctctgtctgtccctcaccaacaccaaggcctccatctcactgtaaataagtctctgttctgtaaatagatgtacagaagccatgttatttctttcatataataaacttttatgactcttt

SEQ ID NO: 180943 - DNA, 2794 bp, Homo sapiens
  Payload ID: 15633
  Gene Symbol: SH2D3C
  Gene Name: SH2 domain containing 3C
  Uniprot ID: Q8N5H7
  ENST ID: ENST00000429553
  CDS Start-End: 846-2366
agatatccaaggggaggcgtccaggaggtagttgggtttccaagtctggggttggaggggcaggtccaggctgcctgagggtaggggtagcatttaaggccatgcggtggggggagtggttcacggtggccctcaggaggaaggaaggaaaaacagccgtctctggcctctggcctctccaggctctccaccctgggggcagaatcaattctgtagccctctagcaccggcagtggctccgcagtcagctgggcagtggccgtgactgggtcactctaccctaggaagtgagtgcaggggctgctggagagccagaggctggcagcgactatgtgaagttctccaaggagaagtacatcctggactcatcgccagagaaactccacaaggaattggaggaggagctcaaactcagcagcacggatctccgcagccatgcctggtaccatggccgcatcccccgagaggtctcggagaccttggtacaacgcaacggcgacttcctcatccgggactcactcaccagcctgggcgactatgtgctcacgtgccgctggcgcaaccaggccttgcacttcaagatcaacaaggtggtggtgaaggcaggcgagagctacacacacatccagtacctgtttgagcaggagagctttgaccacgtgcccgccctcgtgcgctatcatgtgggcagccgcaaggctgtgtcagagcagagtggtgccatcatctactgcccggtgaaccgcaccttcccactgcgctacctcgaggccagctatggcctgggacaggggagtagcaagcctgctagccccgtcagcccctcaggccccaagggcagccacatgaagcggcgcagcgtcaccatgaccgatgggctcactgctgacaaggtcacccgcagcgatggctgccccaccagtacgtcgctgccccgccctcgggactccatccgcagctgtgccctcagcatggaccagatcccagacctgcactcacccatgtcgcccatctccgagagccctagctcccctgcctacagcactgtaacccgtgtccatgccgcccctgcagccccttctgccacagcattgcctgcctcccctgtcgcccgccgttccagtgagccccagctgtgtcccggaagtgccccaaagacccatggggagtcagacaagggcccccacaccagcccctcccacacccttggcaaggcctccccgtcaccatcactcagcagctacagtgacccggactctggccactactgccagctccagcctcccgtgcgtggcagccgagagtgggcagcgactgagacctccagccagcaggccaggagctatggggagaggctaaaggaactgtcagaaaatggggcccctgaaggggactggggcaagaccttcacagtccccatcgtggaagtcacttcttccttcaacccggccaccttccagtcactactgatccccagggataaccggccactggaggtgggccttctgcgcaaggtcaaggagctgctggcagaagtggatgcccggacgctggcccggcatgtcaccaaggtggactgcctggttgctaggatactgggcgttaccaaggagatgcagaccctaatgggagtccgctggggcatggaactgctcaccctcccccatggccggcagctacgcctagacctgctggaaaggttccacaccatgtccatcatgctggccgtggacatcctgggctgcaccggctctgcggaggagcgggcagcgctgctgcacaagaccattcagctggcggccgagctgcgggggactatgggcaacatgttcagcttcgcggcggtcatgggtgccctggacatggcccagatttctcggctggagcagacatgggtgaccctgcggcagcgacacacagagggtgccatcctgtacgagaagaagctcaagccttttctcaagagcctcaacgagggcaaagaaggcccgccgctgagcaacaccacgtttcctcatgtgctgcccctcatcaccctgctggagtgtgactcggccccaccagagggccctgagccctggggcagcacggagcacggcgtggaggtggtgctggctcacctggaggccgcccgcacagtggcacaccacggaggcctgtaccacaccaatgctgaagtcaagctgcaggggttccaggcccggccggagctcctggaggtgttcagcacggagttccagatgcgccttctctggggcagtcagggtgccagcagcagccaggcccggcgctatgagaagttcgacaaggtcctcactgccctgtcccacaagctggaacctgctgtccgctccagcgagctgtgaccccagggacatttcccctctgcagctgcggacagcgtcaggggcagaggggcacacaactttccccagagcaccccaaggacactgtgatcaacccgagaatgttctgggttcaactcaagcatctcccttgcacctccagggtcctgcgtggactctgggttccatcccacctgctacatgctcaccaggtctccattgaggaagaacaggaacgccggttcccccaccagcttttgctgctccccttcctgctggggttccctgttttcgagccatgggaggcaggctgctcacgcctcctcactctctgtctgtccctcaccaacaccaaggcctccatctcactgtaaataagtctctgttctgtaaatagatgtacagaagccatgttatttctttcatataataaacttttatgactcttt

SEQ ID NO: 180944 - DNA, 976 bp, Homo sapiens
  Payload ID: 15633
  Gene Symbol: SH2D3C
  Gene Name: SH2 domain containing 3C
  ENST ID: ENST00000440630
  CDS Start-End: 573-976
atatccaaggggaggcgtccaggagggctgctggagagccagaggctggcagcgactatgtgaagttctccaaggagaagtacatcctggactcatcgccagagaaactccacaaggaattggaggaggagctcaaactcagcagcacggatctccgcagccatgcctggtaccatggccgcatcccccgagaggtctcggagaccttggtacaacgcaacggcgacttcctcatccgggactcactcaccagcctgggcgactatgtgctcacgtgccgctggcgcaaccaggccttgcacttcaagatcaacaaggtggtggtgaaggcaggcgagagctacacacacatccagtacctgtttgagcaggagagctttgaccacgtgcccgccctcgtgcgctatcatgtgggcagccgcaaggctgtgtcagagcagagtggtgccatcatctactgcccggtgaaccgcaccttcccactgcgctacctcgaggccagctatggcctgggacaggggagtagcaagcctgctagccccgtcagcccctcaggccccaagggcagccacatgaagcggcgcagcgtcaccatgaccgatgggctcactgctgacaaggtcacccgcagcgatggctgccccaccagtacgtcgctgccccgccctcgggactccatccgcagctgtgccctcagcatggaccagatcccagacctgcactcacccatgtcgcccatctccgagagccctagctcccctgcctacagcactgtaacccgtgtccatgccgcccctgcagccccttctgccacagcattgcctgcctcccctgtcgcccgccgttccagtgagccccagctgtgtcccggaagtgccccaaagacccatggggagtcagacaagggcccccacaccagcccctcccacacccttggcaaggcctccccgtcaccatcactcagcagctacagtga

SEQ ID NO: 180945 - DNA, 778 bp, Homo sapiens
  Payload ID: 15633
  Gene Symbol: SH2D3C
  Gene Name: SH2 domain containing 3C
  ENST ID: ENST00000414380
  CDS Start-End: 190-778
ggccgctccgcccggggccctagagccagccggggagctgcagctcagcggcgcccggcagggtcgggctgggctgggcccggccgacccggggagggggcggggtcaccccagcctcacctctgggcgcccaggcgctccgcggggtgagggttcggcggccactcctgggactctgggctgcggtagatgccgttctccaaggagaagtacatcctggactcatcgccagagaaactccacaaggaattggaggaggagctcaaactcagcagcacggatctccgcagccatgcctggtaccatggccgcatcccccgagaggtctcggagaccttggtacaacgcaacggcgacttcctcatccgggactcactcaccagcctgggcgactatgtgctcacgtgccgctggcgcaaccaggccttgcacttcaagatcaacaaggtggtggtgaaggcaggcgagagctacacacacatccagtacctgtttgagcaggagagctttgaccacgtgcccgccctcgtgcgctatcatgtgggcagccgcaaggctgtgtcagagcagagtggtgccatcatctactgcccggtgaaccgcaccttcccactgcgctacctcgaggccagctatggcctgggacaggggagtagcaagcctgctagccccgtcagcccctcaggccccaagggcagccacatgaagcggcgcagcgtcaccatgaccgatgggctcactgctgacaaggtcacccgcagcgatggctgccccacca

SEQ ID NO: 180946 - DNA, 2478 bp, Homo sapiens
  Payload ID: 15633
  Gene Symbol: SH2D3C
  Gene Name: SH2 domain containing 3C
  Uniprot ID: Q8N5H7
  ENST ID: ENST00000629203
  CDS Start-End: 116-2218
aatcgcgccgctgagaggcacgcgcagccggtgcctagccggttggtccctgcgcccctgccccgccggccaccgcccccccacaccgtcccggccccggcagcctggccccaccatgaccgagcggtgcagcctgtggagtgccctgtcggccgccgcctgctgcttctaccgcggctccttcgtgcagttctccaaggagaagtacatcctggactcatcgccagagaaactccacaaggaattggaggaggagctcaaactcagcagcacggatctccgcagccatgcctggtaccatggccgcatcccccgagaggtctcggagaccttggtacaacgcaacggcgacttcctcatccgggactcactcaccagcctgggcgactatgtgctcacgtgccgctggcgcaaccaggccttgcacttcaagatcaacaaggtggtggtgaaggcaggcgagagctacacacacatccagtacctgtttgagcaggagagctttgaccacgtgcccgccctcgtgcgctatcatgtgggcagccgcaaggctgtgtcagagcagagtggtgccatcatctactgcccggtgaaccgcaccttcccactgcgctacctcgaggccagctatggcctgggacaggggagtagcaagcctgctagccccgtcagcccctcaggccccaagggcagccacatgaagcggcgcagcgtcaccatgaccgatgggctcactgctgacaaggtcacccgcagcgatggctgccccaccagtacgtcgctgccccgccctcgggactccatccgcagctgtgccctcagcatggaccagatcccagacctgcactcacccatgtcgcccatctccgagagccctagctcccctgcctacagcactgtaacccgtgtccatgccgcccctgcagccccttctgccacagcattgcctgcctcccctgtcgcccgccgttccagtgagccccagctgtgtcccggaagtgccccaaagacccatggggagtcagacaagggcccccacaccagcccctcccacacccttggcaaggcctccccgtcaccatcactcagcagctacagtgacccggactctggccactactgccagctccagcctcccgtgcgtggcagccgagagtgggcagcgactgagacctccagccagcaggccaggagctatggggagaggctaaaggaactgtcagaaaatggggcccctgaaggggactggggcaagaccttcacagtccccatcgtggaagtcacttcttccttcaacccggccaccttccagtcactactgatccccagggataaccggccactggaggtgggccttctgcgcaaggtcaaggagctgctggcagaagtggatgcccggacgctggcccggcatgtcaccaaggtggactgcctggttgctaggatactgggcgttaccaaggagatgcagaccctaatgggagtccgctggggcatggaactgctcaccctcccccatggccggcagctacgcctagacctgctggaaaggttccacaccatgtccatcatgctggccgtggacatcctgggctgcaccggctctgcggaggagcgggcagcgctgctgcacaagaccattcagctggcggccgagctgcgggggactatgggcaacatgttcagcttcgcggcggtcatgggtgccctggacatggcccagatttctcggctggagcagacatgggtgaccctgcggcagcgacacacagagggtgccatcctgtacgagaagaagctcaagccttttctcaagagcctcaacgagggcaaagaaggcccgccgctgagcaacaccacgtttcctcatgtgctgcccctcatcaccctgctggagtgtgactcggccccaccagagggccctgagccctggggcagcacggagcacggcgtggaggtggtgctggctcacctggaggccgcccgcacagtggcacaccacggaggcctgtaccacaccaatgctgaagtcaagctgcaggggttccaggcccggccggagctcctggaggtgttcagcacggagttccagatgcgccttctctggggcagtcagggtgccagcagcagccaggcccggcgctatgagaagttcgacaaggtcctcactgccctgtcccacaagctggaacctgctgtccgctccagcgagctgtgaccccagggacatttcccctctgcagctgcggacagcgtcaggggcagaggggcacacaactttccccagagcaccccaaggacactgtgatcaacccgagaatgttctgggttcaactcaagcatctcccttgcacctccagggtcctgcgtggactctgggttccatcccacctgctacatgctcaccaggtctccattgaggaagaacaggaacgccggttcccccaccagcttttgctgctccccttcctgctgggg

SEQ ID NO: 180947 - DNA, 3352 bp, Homo sapiens
  Payload ID: 15634
  Gene Symbol: SH2D4A
  Gene Name: SH2 domain containing 4A
  Uniprot ID: Q9H788
  ENST ID: ENST00000265807
  CDS Start-End: 412-1776
agtcaccccggcatgtgggcgcggcggggcggcgcgggcgggacggctacaagagctgttttgcgtccgggccggagtatttgctcagcccgcctgcgccgcttgggacgcctctgcctttccctccctcccttccccgacggcttctggcggccaagtggatgtggcgggtgatcgagccaccctgcccaggggcgcccagcactggttcagtgaacagcattttggacaggacatttggtgccaggtctgagtagccagtttgctgaattattgtcccagtcagccaggattgtgagctgtttgggaagtttcgtggaaacgcccaagtgccagcacaggtggagggacacctggaggccagtttcaggaacttttgccacaagtataaaagacttcagaagtgcaaagatgctgaaacagatactgtcggagatgtacatagatcctgatctactggcagagctcagcgaagaacagaaacagatcctgttcttcaagatgagagaggaacagatccgacgatggaaagaaagagaagcagctatggaaagaaaggagtccctgccagtgaaacccagaccaaagaaagagaatggcaaatcggttcattggaaacttggagctgataaggaagtctgggtatgggtgatgggcgaacaccatctagataaaccctatgatgtgctctgtaatgaaattattgctgagagggcccggctgaaagcagaacaggaggcagaagagcccagaaaaactcactctgaagaattcaccaatagcttgaaaacaaaatcacagtaccatgatctgcaggctccggataaccagcagactaaagacatctggaagaaagtggcagaaaaggaggaactggagcaaggatcgaggccagcaccaaccctggaagaagagaaaatccgatcactctccagttcttcaagaaatattcaacaaatgttggcagattcaatcaatcgtatgaaggcatatgcatttcaccagaagaaagaatctatgaagaaaaaacaagatgaagaaataaatcaaatagaagaagagagaacgaagcagatttgtaagagctggaaagaagactcggaatggcaggcatctctgcgaaaatccaaagcagctgatgagaagagacgctccttggctaaacaagcacgagaagactacaagaggttatccctcggggcccagaaaggaagaggcggtgagaggctgcaaagccccttgcgtgttccgcagaaaccagaaagacctccccttccacccaagcctcagttcctaaactcaggggcatatcctcaaaaacctcttagaaatcagggagtggtgaggacactgtccagctctgcccaagaggacatcatccggtggtttaaagaggagcagctaccacttcgagcgggctaccagaaaacctcagacaccatagccccctggttccatggaattctcacactcaagaaagcaaatgaacttcttctgagcacaggcatgcccggcagttttctcatccgagtcagtgaaaggatcaaaggctatgccctgtcctatctgtcggaggacggctgtaaacatttcctcatcgatgcctctgcagacgcctacagcttcctgggcgtggaccagctacagcatgccaccttggcggatttggtggaatatcacaaggaggaacccatcacttccctggggaaggagctccttctctatccctgtggtcagcaggaccagctgcctgactacctggagctgtttgagtgacagcctccatcagggtcatcctacagcctccaagcgggctttcccctggacaaatgccactgcaacatttatgtgtgaagccaaaatcaccctgcagcagagccaatactgatcaactgaaagtaaagtatccatggagtcctcattgacacctcttttctgcacaaatactggaattcaatgtcaagagaaaatgacctctgctcaaaagggagaagagtctcaatttcagcaagtacctgtcatgaagggtatgaccttaatgatgtacataaaataaaacaaatgaagaaatggaaaacttttagaaattaaggtgtacttgaaaacgaatatctatcatatgacccctgcactccctctgtatcatctcaggaggtttcaggggcctgttgacatgaagtttcgaagtttcatgttggctttggaatggtagcaaaagcctttcctggctgagatgatgcttaaaacacacctcacttattgtacatgttggaaccaggacatgagagacatagaaaaacagaagtcatgaatgtaaattgaatgagaggcttaacatgcatgaaaatacagatggacctgcaggaaagtgagcaaacatcgctgagtttgttttcttgttcgggagaatggggccggggctggcctggcctcccctggatatactctatagtgcaccaaaaggataaagcatctgtacatgtatttttttattttttatcagaagtgcttagacaagaacagaataagcaggctgtttggatgctacttgtggttgaattgtgttcccccaaaatatatggtgaagtcttaacccccatccccgtgaatgggaccttgtttggaaatagggtctttgcagatatagtcaagatgaggtcacattggattagggtgggccccaaatccaatgactggcatccttaggagaagagagagttttggtaatagacacaaatgcagtgggaagaagaccaggggacaagaggcaagttggagtgatgcagccggaagggaagggacaccaaggatctccggccaccagcagaagccagcagagaggcatgggacaggttccccacaagccttagaaggaagcatggccctgacttcagaattccagactccagaactggaagaataaatgtctgttgttttaagctgcttagttcatgctgagttcatgctgacttgttactatagccccagaaagctaatacagtcgtttatgtaattacataacctgacacacaagatcgacccattcactgctgcccagtccaccattttcataatgaagtagaaatgggaggtaagaaaaacattccagccagttctgtttagccctggcacacatatttgtcccgtcaggaatcttatgccctcctggaacccccgcccacctcagtccagtcccagtcaggcgaacggcctctggacagggactgaggtggctctgagccactggagatcatttttcttggaggatggagattggctagtacctctggcctaactgtgtaggtcaatactcttttacattgccttctaataaaagcagaatgatacagca

SEQ ID NO: 180948 - DNA, 567 bp, Homo sapiens
  Payload ID: 15634
  Gene Symbol: SH2D4A
  Gene Name: SH2 domain containing 4A
  ENST ID: ENST00000523736
  CDS Start-End: 1-567
ctactggcagagctcagcgaagaacagaaacagatcctgttcttcaagatgagagaggaacagatccgacgatggaaagaaagagaagcagctatggaaagaaaggagtccctgccagtgaaacccagaccaaagaaagagaatggcaaatcggttcattggaaacttggagctgataaggaagtctgggtatgggtgatgggcgaacaccatctagataaaccctatgatgtgctctgtaatgaaattattgctgagagggcccggctgaaagcagaacaggaggcagaagagcccagaaaaactcactctgaagaattcaccaatagcttgaaaacaaaatcacagtaccatgatctgcaggctccggataaccagcagactaaagacatctggaagaaagtggcagaaaaggaggaactggagcaaggatcgaggccagcaccaaccctggaagaagagaaaatccgaaagaaagaatctatgaagaaaaaacaagatgaagaaataaatcaaatagaagaagagagaacgaagcagatttgtaagagctggaaagaagactcg

SEQ ID NO: 180949 - DNA, 1984 bp, Homo sapiens
  Payload ID: 15634
  Gene Symbol: SH2D4A
  Gene Name: SH2 domain containing 4A
  Uniprot ID: Q9H788
  ENST ID: ENST00000519207
  CDS Start-End: 309-1673
cggcgcccggggcgggctcaggtgcggggttgggcggcgagagcggccgcggcgggtgtccggtgtccggtgtccggtgtccggtgtctggagccgctggctaggttcagtgaacagcattttggacaggacatttggtgccaggtctgagtagccagtttgctgaattattgtcccagtcagccaggattgtgagctgtttgggaagtttcgtggaaacgcccaagtgccagcacaggtggagggacacctggaggccagtttcaggaacttttgccacaagtataaaagacttcagaagtgcaaagatgctgaaacagatactgtcggagatgtacatagatcctgatctactggcagagctcagcgaagaacagaaacagatcctgttcttcaagatgagagaggaacagatccgacgatggaaagaaagagaagcagctatggaaagaaaggagtccctgccagtgaaacccagaccaaagaaagagaatggcaaatcggttcattggaaacttggagctgataaggaagtctgggtatgggtgatgggcgaacaccatctagataaaccctatgatgtgctctgtaatgaaattattgctgagagggcccggctgaaagcagaacaggaggcagaagagcccagaaaaactcactctgaagaattcaccaatagcttgaaaacaaaatcacagtaccatgatctgcaggctccggataaccagcagactaaagacatctggaagaaagtggcagaaaaggaggaactggagcaaggatcgaggccagcaccaaccctggaagaagagaaaatccgatcactctccagttcttcaagaaatattcaacaaatgttggcagattcaatcaatcgtatgaaggcatatgcatttcaccagaagaaagaatctatgaagaaaaaacaagatgaagaaataaatcaaatagaagaagagagaacgaagcagatttgtaagagctggaaagaagactcggaatggcaggcatctctgcgaaaatccaaagcagctgatgagaagagacgctccttggctaaacaagcacgagaagactacaagaggttatccctcggggcccagaaaggaagaggcggtgagaggctgcaaagccccttgcgtgttccgcagaaaccagaaagacctccccttccacccaagcctcagttcctaaactcaggggcatatcctcaaaaacctcttagaaatcagggagtggtgaggacactgtccagctctgcccaagaggacatcatccggtggtttaaagaggagcagctaccacttcgagcgggctaccagaaaacctcagacaccatagccccctggttccatggaattctcacactcaagaaagcaaatgaacttcttctgagcacaggcatgcccggcagttttctcatccgagtcagtgaaaggatcaaaggctatgccctgtcctatctgtcggaggacggctgtaaacatttcctcatcgatgcctctgcagacgcctacagcttcctgggcgtggaccagctacagcatgccaccttggcggatttggtggaatatcacaaggaggaacccatcacttccctggggaaggagctccttctctatccctgtggtcagcaggaccagctgcctgactacctggagctgtttgagtgacagcctccatcagggtcatcctacagcctccaagcgggctttcccctggacaaatgccactgcaacatttatgtgtgaagccaaaatcaccctgcagcagagccaatactgatcaactgaaagtaaagtatccatggagtcctcattgacacctcttttctgcacaaatactggaattcaatgtcaagagaaaatgacctctgctcaaaagggagaagagtctcaatttcagcaagtacctgtcatgaagggtatgaccttaatgatgtacataaaataaaacaaatgaagaaatggaaaacttttagaaa

SEQ ID NO: 180950 - DNA, 1697 bp, Homo sapiens
  Payload ID: 15634
  Gene Symbol: SH2D4A
  Gene Name: SH2 domain containing 4A
  Uniprot ID: Q9H788
  ENST ID: ENST00000518040
  CDS Start-End: 83-1312
tttgctcagcccgcctgcgccgcttgggacgcctctgcctttccctccctcccttccccgacggcttctggcggccaagtggatgtggcgggtgatcgagccaccctgcccaggggcgcccagcactgagaatggcaaatcggttcattggaaacttggagctgataaggaagtctgggtatgggtgatgggcgaacaccatctagataaaccctatgatgtgctctgtaatgaaattattgctgagagggcccggctgaaagcagaacaggaggcagaagagcccagaaaaactcactctgaagaattcaccaatagcttgaaaacaaaatcacagtaccatgatctgcaggctccggataaccagcagactaaagacatctggaagaaagtggcagaaaaggaggaactggagcaaggatcgaggccagcaccaaccctggaagaagagaaaatccgatcactctccagttcttcaagaaatattcaacaaatgttggcagattcaatcaatcgtatgaaggcatatgcatttcaccagaagaaagaatctatgaagaaaaaacaagatgaagaaataaatcaaatagaagaagagagaacgaagcagatttgtaagagctggaaagaagactcggaatggcaggcatctctgcgaaaatccaaagcagctgatgagaagagacgctccttggctaaacaagcacgagaagactacaagaggttatccctcggggcccagaaaggaagaggcggtgagaggctgcaaagccccttgcgtgttccgcagaaaccagaaagacctccccttccacccaagcctcagttcctaaactcaggggcatatcctcaaaaacctcttagaaatcagggagtggtgaggacactgtccagctctgcccaagaggacatcatccggtggtttaaagaggagcagctaccacttcgagcgggctaccagaaaacctcagacaccatagccccctggttccatggaattctcacactcaagaaagcaaatgaacttcttctgagcacaggcatgcccggcagttttctcatccgagtcagtgaaaggatcaaaggctatgccctgtcctatctgtcggaggacggctgtaaacatttcctcatcgatgcctctgcagacgcctacagcttcctgggcgtggaccagctacagcatgccaccttggcggatttggtggaatatcacaaggaggaacccatcacttccctggggaaggagctccttctctatccctgtggtcagcaggaccagctgcctgactacctggagctgtttgagtgacagcctccatcagggtcatcctacagcctccaagcgggctttcccctggacaaatgccactgcaacatttatgtgtgaagccaaaatcaccctgcagcagagccaatactgatcaactgaaagtaaagtatccatggagtcctcattgacacctcttttctgcacaaatactggaattcaatgtcaagagaaaatgacctctgctcaaaagggagaagagtctcaatttcagcaagtacctgtcatgaagggtatgaccttaatgatgtacataaaataaaacaaatgaagaaatggaaaacttttagaaattaaggtgtacttgaaaacgaatatctatcatatgacccctgcactccctctgtatcatctcaggaggtttcag

SEQ ID NO: 180951 - DNA, 2889 bp, Homo sapiens
  Payload ID: 15635
  Gene Symbol: SH2D4B
  Gene Name: SH2 domain containing 4B
  Uniprot ID: Q5SQS7
  ENST ID: ENST00000313455
  CDS Start-End: 79-1008
aaagcagccgtgccgtgtcccagggcgggaattgtgcggggacgggctccacggaggaatcttctcttccttcccttgatgttgccagaggactcaggaggctctccagatgctgcagcgagtgacaagcacatccaatggctcctaggggcagatggcgaggtctgggtctggatcatgggagaaggccctggtgacaagccctacgaagagatctctgaggagctgattgcagagagggcgcggctgcaggcacagagggaagctgaggagctctggagacagaaggaggcagagatcaccaagaagttccgggatgctctggccaatgagaaagcccggatcttggcggagaagtggaaagtggagatggaagaccgcaaggctgccaaagtcctggaggaacgcatccacgaggaattcaagaggaaagaggaagaggagaggaagcgaggagaagagcagattcgcctccaggaagagcagagggcgaaggagctctactggaccctgaagcaggctcagctgcattgccaagccagtgagaaagaggagcgagagtgggaagaacagttgcgccggtccaaggcggctgatgaggagaggagccgccgagcccagcgcgcccgggacgagtaccgacaccactcgctccgtgctatccagaagggcacggtcgctggcctcagctccatgttccgggagcttggccagagccatgagcaggaggcaagactctaccaccacctccccgacccgggtctgccgcagccccttgccctgccggtcagcaggacctgggagcgcccgctgcgcccagtctccagagatgtcatcgtccgctggtttaaggaggagcagctgcctcgccgagctggcttcgagaggaacaccaagttcatcgccccctggttccatggaggaaattatcactgtttcaggaggagagttacttcaggaaccctgcggacagagggacagcccaccagactaccatctgttgtttgaataatttttttccttatcaattggattcattttggtatcctgtttttgaactcagcttaagaacttctcatctcaaatcctatggccttctggaagatccaccactatccaaaggaaaaagtagattaatatgcctcaagggatatgacatctatggcatagggctactggtctcatcccagcgatcgggacagaaattgctaatagctcatgcaactctttcatgaagagcttagctatgaccttagaagacaaagcctgtttgtcatggctgccgtaaaccgagctcttacagtgcgtggaccatgttttaataatccaaaataattccagtgccgaaccctgaatttaacatatggtagacattcagtaaatgtttgttgaatgaatgcatgtcttctaaaagttttccaacacaaattagcagtggtttcttgtaaattatttcctactcgccactctataaaatcatggcaataatagaagattatgaaggatttctatggaggacataaatgctgcatctttcataatctccattatcaccctcattgatattatcattggaattatctaaggtgagccccagtttccagggcagctgattgacaccgtcctgccttccttatttaacctcttcttttgccactcgcctctatctttgaatcatattttggccttggttttgcaatggttttatgtcatcctacagatgtcttcaagacctggggtgagttatcaatgcaagaatggttcttagaaatctgatgaggcctctgctctctgggatgtggccctctctatgcaggttactccaatgattagctctgtcctcattgtccttttaattcccttgtcaacttaatctcagtatgttgcttatattaacaagaagactcacgcaataactcctcgataactctcagtgatggtatctgttggtgcatacttgtgttccacagttatggccatatacacagaggtagtatatgatgaagagaagattacagtctttacagtcaagaagacttgggttcatatcctaaccctggaacttactagcattataatgcttgcagcattgtgtttggtgagaggaaaagaatgaatggattctaggaatgttagggaacgatttactttacccgatggctgtatcaaacatctatgccccacttcttctcttgcctcacctattccttagattcttggtcacttctctaccacaagccaccagcactataaccagttttgcgtgggttctgctcttcctccctatgttgatcagtgtcatgtgagcataagccaatggtagcttgccacatgccccatctcccattgctgcagaggcataagacagaagagatgggaagtgaatgcccgatgtggtgaatctgggatgaatgggagtcataggctggtagatcgctttttcctccttcttcctcctggaggaactattctgagagtcatctgtttgtatggtcttgtagaagacagtcctgtaagatcgagcaaccagtcatgatgaaaccaagtggtggccggatcagtatgacaccctgctgcccccgtttttaattcttctctgccttgccctgctctctcctgttgctctgggattgcacttctgaatgaagtagcagctcataagcttttgccacaggctctgtcttttggggaatccaggataagaacccattatacagaagtgttcaataatatcaattttgcaactcactcagctccatggcttcccccggtctacctgtctcactacatgcataaagtgaaatgatggaaggaatctgctttctgaactctaatgtgccttcattgattatcattaaaattatcattaaaattgccttatttctatgg

SEQ ID NO: 180952 - DNA, 3983 bp, Homo sapiens
  Payload ID: 15635
  Gene Symbol: SH2D4B
  Gene Name: SH2 domain containing 4B
  Uniprot ID: Q5SQS7
  ENST ID: ENST00000339284
  CDS Start-End: 431-1504
actaacagatcactcgacacctaccagcccaggcagggctgggactgggcatttcctggctgagctggaggcttgggcccttcccattgtctcagaaccccaggtgatgccaagacatgggctctcctgggatgccgtgcttggtgacccaggagaaggactagattgctcctggtggttgctcccccttgcagagtcccacctgcccctttgggtcctgttgcctggcctcttttgctgtcctgggtagaggagatgagttcgtcgctggctgcaagctgaggccaactgacaatgctgcacagagaaggggcaccgagagtggccccggattgagcagtccgtagtgcagagcagcccctcgggcgttctgcctggccctgcttcccctgctggctgcccttctggtgcgtgcatcccaggtggcatcatgctgcagcagatcctgcacgacatgtacatcgaccccgagctccttgccgagctcagcgatgtgcagaagcacatcctcttctacaaaatgcgggaggagcagctgaggcgctggaaggagcgggagacttgggaggccctggcccaggacgagggtctcaggcctccaaagaccaagcgagcagcgagtgacaagcacatccaatggctcctaggggcagatggcgaggtctgggtctggatcatgggagaaggccctggtgacaagccctacgaagagatctctgaggagctgattgcagagagggcgcggctgcaggcacagagggaagctgaggagctctggagacagaaggaggcagagatcaccaagaagttccgggatgctctggccaatgagaaagcccggatcttggcggagaagtggaaagtggagatggaagaccgcaaggctgccaaagtcctggaggaacgcatccacgaggaattcaagaggaaagaggaagaggagaggaagcgaggagaagagcagattcgcctccaggaagagcagagggcgaaggagctctactggaccctgaagcaggctcagctgcattgccaagccagtgagaaagaggagcgagagtgggaagaacagttgcgccggtccaaggcggctgatgaggagaggagccgccgagcccagcgcgcccgggacgagtaccgacaccactcgctccgtgctatccagaagggcacggtcgctggcctcagctccatgttccgggagcttggccagagccatgagcaggaggcaagactctaccaccacctccccgacccgggtctgccgcagccccttgccctgccggtcaggacctgggagcgcccgctgcgcccagtctccagagatgtcatcgtccgctggtttaaggaggagcagctgcctcgccgagctggcttcgagaggaacaccaagttcatcgccccctggttccatggaggaaattatcactgtttcaggaggagagttacttcaggaaccctgcggacagagggacagcccaccagactaccatctgttgtttgaataatttttttccttatcaattggattcattttggtatcctgtttttgaactcagcttaagaacttctcatctcaaatcctatggccttctggaagatccaccactatccaaaggaaaaagtagattaatatgcctcaagggatatgacatctatggcatagggctactggtctcatcccagcgatcgggacagaaattgctaatagctcatgcaactctttcatgaagagcttagctatgaccttagaagacaaagcctgtttgtcatggctgccgtaaaccgagctcttacagtgcgtggaccatgttttaataatccaaaataattccagtgccgaaccctgaatttaacatatggtagacattcagtaaatgtttgttgaatgaatgcatgtcttctaaaagttttccaacacaaattagcagtggtttcttgtaaattatttcctactcgccactctataaaatcatggcaataatagaagattatgaaggatttctatggaggacataaatgctgcatctttcataatctccattatcaccctcattgatattatcattggaattatctaaggtgagccccagtttccagggcagctgattgacaccgtcctgccttccttatttaacctcttcttttgccactcgcctctatctttgaatcatattttggccttggttttgcaatggttttatgtcatcctacagatgtcttcaagacctggggtgagttatcaatgcaagaatggttcttagaaatctgatgaggcctctgctctctgggatgtggccctctctatgcaggttactccaatgattagctctgtcctcattgtccttttaattcccttgtcaacttaatctcagtatgttgcttatattaacaagaagactcacgcaataactcctcgataactctcagtgatggtatctgttggtgcatacttgtgttccacagttatggccatatacacagaggtagtatatgatgaagagaagattacagtctttacagtcaagaagacttgggttcatatcctaaccctggaacttactagcattataatgcttgcagcattgtgtttggtgagaggaaaagaatgaatggattctaggaatgttagggaacgatttactttacccgatggctgtatcaaacatctatgccccacttcttctcttgcctcacctattccttagattcttggtcacttctctaccacaagccaccagcactataaccagttttgcgtgggttctgctcttcctccctatgttgatcagtgtcatgtgagcataagccaatggtagcttgccacatgccccatctcccattgctgcagaggcataagacagaagagatgggaagtgaatgcccgatgtggtgaatctgggatgaatgggagtcataggctggtagatcgctttttcctccttcttcctcctggaggaactattctgagagtcatctgtttgtatggtcttgtagaagacagtcctgtaagatcgagcaaccagtcatgatgaaaccaagtggtggccggatcagtatgacaccctgctgcccccgtttttaattcttctctgccttgccctgctctctcctgttgctctgggattgcacttctgaatgaagtagcagctcataagcttttgccacaggctctgtcttttggggaatccaggataagaacccattatacagaagtgttcaataatatcaattttgcaactcactcagctccatggcttcccccggtctacctgtctcactacatgcataaagtgaaatgatggaaggaatctgctttctgaactctaatgtgccttcattgattatcattaaaattatcattaaaattgccttatttctatggactcagaggaatgatgttttagttttggctctctgatttaccaactatgtgactttgtccaagtcatttaacttcagtaaacctcggtatgactgaaaagggagttttctgtatggccgtcactaggtttttttgtgggttagttaaatgataaacatgaaagctctgtccaaatgaaaaaggtatttctaacaacaaccacaataacaataacaacttagtgcttagcccatgatgtatcaggggatatgatgtgatgattttcaaggtgttggaggcaacttctgttccaagaactcccagcagctttgaaagcagactgagatgagttgagaccctgaatccctgggctgttgttcctgtcacccctaattaatatgtgagagacaacagctgggttttccatccctaacacatttatttcattttatttggggcctgcaatttctgcatgtctcatatattttaggttttacctttttacctggctttaaaataaatcccttgtaagttgtcctgcaaatgaaattactgtctggaaaactgcaatttcatcttgagagttttattatgctaataaatgtcaggattctcatat

SEQ ID NO: 180953 - DNA, 3705 bp, Homo sapiens
  Payload ID: 15636
  Gene Symbol: SH2D5
  Gene Name: SH2 domain containing 5
  Uniprot ID: Q6ZV89
  ENST ID: ENST00000375031
  CDS Start-End: 626-1645
actcacaagggccgggcccgaaccaccctgagcgcctcctccgagccaggctcgatccttcacactgggaacggagacactccggtccagtgtcacttgtcctcgagtaagaggagagggatgacaggcgagcaacggagtcacaagggctctgcagagaatgaagcgtgagtggtggtcgtggaaggcttcccggaggaggcggtgcggtagccgcggctcggatgacgcggaggagccagccagagaggggaggggcagaggccctccaggaggagggacccgtgagtgaggcgcgggggattcagcgcccccagcccgggaggaggtgccttctgagctccgggcgagcccctcccgcccttccaggcggagcgccgggcgtgggcagtgccagggcccctcgcggccgctgattgggtggtgcggccgagcggagcggctccgcgggcgccgattgtacgtgggctccttccctgtggatgacctggacacccaggagagcgtgtggctggtgcagcagcagctgtgggcgctgaaggactgtccccgacgccgggccgtcatcctgaaattcagccttcagggtctcaagatctacagcggggagggtgaggtgctgctgatggctcatgccctgaggcgcatactctactccacctggtgccctgccgactgccagtttgccttcatggctcgaaacccacggagcccagccagcaagctcttctgccacctctttgtgggcagccagccaggagaggtccagatcctgcacctgctgctgtgccgctctttccagctggcttacctcttgcagcaccctgaggagcgggcacagccagagccctgcccagggcccacaggggaggtgcccctgaagccactgtccagctctgggggcctggtgcgggagcccttcggccgtgatcagctctctcagaacgtccatgccctggtctcctttcggcggctgccagcagaggggctggtgggcagtgggaaggagctgccagagtcggaaggccgtgcccgccatgcccgcctggggaatccctactgctcgcccacgctggtgcgcaagaaggccattcgcagcaaggtgatccgctcgggggcctaccgcggctgcacctatgagacccagctgcagctgtcggctcgggaggcctttcctgccgcatgggaggcatggccccggggtcctggtggccactcgtgcctggtggagagcgagggcagcctgacggagaacatctgggccttcgctggcatctccaggccctgtgccctggccctgttgcggagagacgtgctgggggccttcctgctgtggcctgagctgggtgctagcggccagtggtgtctgtccgtgcgcacgcagtgcggcgtggtgccccaccaggtcttccggaaccacctgggccgctactgcttggagcacctgccggcagagttccccagcctggaggctctggtggagaaccacgcggttactgaacgtagcctcttctgtcccctcgacatgggccgcctgaaccccacctacgaggagcaggactgtgggcccccaggcaggccgccccggactctccggcccctcagccatgccaagtccgaggcagagctgcagggcctgggctaagaggtagggccccggtcccacaggccccgcctcaccccggctcctgggccccagcagcatctctgcccgtcctgcacccctctggttgccagttccatccagtcaccctgcccttggagcagtcttccatcgcgtcactgtccgtgggaggggagccctgagggtgggtatcgccaatggcttcttggagaacatgtggcctgctgagattccaggagggcaggtggagttgcaggcttcggataaccctttgggtggcttcggatgacctgctgtgtggcttcggatgctttgggacttctgggcttctgctttactcctggggcaggagcttgttcacggcaaagctgcagccctctcctaaggaggctaggccttggggcgctgactgggagtctccagaaagagggttttggggaggcaggagtgagcttttactctgggcaaagacctggagtgagccaccctgtctatgagagcagagatgactccatggagcttgtgggcaggaggctggggatgagccccatctaggctgacagagcagggctgtttctcatatgtatctgagagtgaaggaggggtgggaaggtgcagagagggcaggagggacagagggctgtacctaacgctcacgcacggtggactcctgtgtgcagaaagggatgcgcaccagcagacagggccaagaatctccatgctgtctccactcaaaacctcagggctgtgactcccgctttctcagaagggatgcgcaggctcaccccttccccctaggaatcaccagggcacccccacccccagctcatctcctttagccatttgacagggaggggccagcagtgagctgcaggcttagaggggtgaccagggcccttcctaactcgaccgcatgtggtttggtggctgccttgggagggaggctgtccgatgctgacattccccttagcatggccctgaccgtggctgtcaggggccaccttgcctcaccaggccagccccactgggaatggggtcagtcacagcagaaccgtcgaaaggtggacctgatgtgggccctgccgggggcgcttggcctcagcgggccatgggagacccagggaaacgactctagtgtgaggcagtggtcctgccagtgactgacaaaccctctttgtaagcaaacttgacaaataatgaatctactgaactctgttatagaacaagttcattttgcatgaacttctcttattgaagcagaagccacgtcatgagcctgggggctgccctctccccgtctgggagtgggacagaactgttcagtgccttgaaagtcacagatttctgactcctggaaggaactgggcagtcccaccagagcagaaagaaaggaggcaaacttggggagtgagaagccagcctcccagaggcccaggcctcgtgttccccacctccaaccctcccgtgaggagaggggcttggcctgggaccttgtaacttccttgcaagttaagtgagctatcctgtcacaaaagatagaaggaactgccctttgggacttcttttcactggaaacccagcactggttttatgttgagtgagtgggaagctgggactctgttttacagccatctgtactggagcctggacaaaccactggtctctatgggaggccccagcctcacatttccctggcaaggagagagaggtttagccatgtcctgggtctaggattacagcccagagatgggcacttaagaagacctggtcattggtccagacttgggccaaggctctcctctgtgagggatgggttttactggtgaattacctgtgtggagaagctatcagggccatgtttagcacactgaagggaccagtctccaccaagcactttaacatccctccagccagcatagattgatctcgtgttacagagagggcaaggtttttggcccctgtttgcagactccatgtcttaatcagagaccacagttttctctttgttccaatctgcgccacctcggtagccccactttccttgctgtgtggacttgaaacaaaataaaatgtgttgcttc

SEQ ID NO: 180954 - DNA, 1934 bp, Homo sapiens
  Payload ID: 15636
  Gene Symbol: SH2D5
  Gene Name: SH2 domain containing 5
  Uniprot ID: Q6ZV89
  ENST ID: ENST00000444387
  CDS Start-End: 399-1670
gagtaagaggagagggatgacaggcgagcaacggagtcacaagggctctgcagagaatgaagcgtgagtggtggtcgtggaaggcttcccggaggaggcggtgcggtagccgcggctcggatgacgcggaggagccagccagagaggggaggggcagaggccctccaggaggagggacccgtgagtgaggcgcgggggattcagcgcccccagcccgggaggaggtgccttctgagctccgggcgagcccctcccgcccttccaggcggagcgccgggcgtgggcagtgccagggcccctcgcggccgctgattgggtggtgcggccgagcggagcggctccgcgggcgccgattgcctcccctcccgtggagctggaagccaggcaccctgggggccatgcagaaggcgggggctgggggccgcagggcctctgactgcgggctggcccctcaccggcccaggtgcatcaccaagtttgcccagtacgtgggctccttccctgtggatgacctggacacccaggagagcgtgtggctggtgcagcagcagctgtgggcgctgaaggactgtccccgacgccgggccgtcatcctgaaattcagccttcagggtctcaagatctacagcggggagggtgaggtgctgctgatggctcatgccctgaggcgcatactctactccacctggtgccctgccgactgccagtttgccttcatggctcgaaacccacggagcccagccagcaagctcttctgccacctctttgtgggcagccagccaggagaggtccagatcctgcacctgctgctgtgccgctctttccagctggcttacctcttgcagcaccctgaggagcgggcacagccagagccctgcccagggcccacaggggaggtgcccctgaagccactgtccagctctgggggcctggtgcgggagcccttcggccgtgatcagctctctcagaacgtccatgccctggtctcctttcggcggctgccagcagaggggctggtgggcagtgggaaggagctgccagagtcggaaggccgtgcccgccatgcccgcctggggaatccctactgctcgcccacgctggtgcgcaagaaggccattcgcagcaaggtgatccgctcgggggcctaccgcggctgcacctatgagacccagctgcagctgtcggctcgggaggcctttcctgccgcatgggaggcatggccccggggtcctggtggccactcgtgcctggtggagagcgagggcagcctgacggagaacatctgggccttcgctggcatctccaggccctgtgccctggccctgttgcggagagacgtgctgggggccttcctgctgtggcctgagctgggtgctagcggccagtggtgtctgtccgtgcgcacgcagtgcggcgtggtgccccaccaggtcttccggaaccacctgggccgctactgcttggagcacctgccggcagagttccccagcctggaggctctggtggagaaccacgcggttactgaacgtagcctcttctgtcccctcgacatgggccgcctgaaccccacctacgaggagcaggactgtgggcccccaggcaggccgccccggactctccggcccctcagccatgccaagtccgaggcagagctgcagggcctgggctaagaggtagggccccggtcccacaggccccgcctcaccccggctcctgggccccagcagcatctctgcccgtcctgcacccctctggttgccagttccatccagtcaccctgcccttggagcagtcttccatcgcgtcactgtccgtgggaggggagccctgagggtgggtatcgccaatggcttcttggagaacatgtggcctgctgagattccaggagggcaggtggagttgcaggcttcggataaccctttgggtggcttcgg

SEQ ID NO: 180955 - DNA, 544 bp, Homo sapiens
  Payload ID: 15636
  Gene Symbol: SH2D5
  Gene Name: SH2 domain containing 5
  ENST ID: ENST00000447746
  CDS Start-End: 141-544
cttccaggcggagcgccgggcgtgggcagtgccagggcccctcgcggccgctgattgggtggtgcggccgagcggagcggctccgcgggcgccgattgcctcccctcccgtggagctggaagccaggcaccctgggggccatgcagaaggcgggggctgggggccgcagggcctctgactgcgggctggcccctcaccggcccaggtgcatcaccaagtttgcccagtacgtgggctccttccctgtggatgacctggacacccaggagagcgtgtggctggtgcagcagcagctgtgggcgctgaaggtgggtggcctgggagggcacttccctagtggaagtcacagccttgaagaccaggtgctgctgatggctcatgccctgaggcgcatactctactccacctggtgccctgccgactgccagtttgccttcatggctcgaaacccacggagcccagccagcaagctcttctgccacctctttgtgggcagccagccaggagaggtccagatcctgcacctgctgctgtgccgctcttt

SEQ ID NO: 180956 - DNA, 511 bp, Homo sapiens
  Payload ID: 15636
  Gene Symbol: SH2D5
  Gene Name: SH2 domain containing 5
  ENST ID: ENST00000518294
  CDS Start-End: 117-511
agtgccgtggctggagctgctagcccgattccccacctaaagggcccgaaggatggggccacggcccatgtgcgcctcccctcccgtggagctggaagccaggcaccctgggggccatgcagaaggcgggggctgggggccgcagggcctctgactgcgggctggcccctcaccggcccaggtgcatcaccaagtttgcccagtacgtgggctccttccctgtggatgacctggacacccaggagagcgtgtggctggtgcagcagcagctgtgggcgctgaaggactgtccccgacgccgggccgtcatcctgaaattcagccttcagggtctcaagatctacagcggggagggtgaggtgctgctgatggctcatgccctgaggcgcatactctactccacctggtgccctgccgactgccagtttgccttcatggctcgaaacccacggagcccagccagcaagctcttctgccacctctttgtgggcagccagccaggagaggtcca

SEQ ID NO: 180957 - DNA, 564 bp, Homo sapiens
  Payload ID: 15636
  Gene Symbol: SH2D5
  Gene Name: SH2 domain containing 5
  ENST ID: ENST00000517430
  CDS Start-End: 187-564
tcactttaccccccatgccgcctccaccaccccagctgggtgcccccagagggcgggcaccttcgtccaccggcggcggggcctgacacacagtcagcctcggaaacattccaagaaggaccagagctacgagcaccccaggagcctcccctcccgtggagctggaagccaggcaccctgggggccatgcagaaggcgggggctgggggccgcagggcctctgactgcgggctggcccctcaccggcccaggtgcatcaccaagtttgcccagtacgtgggctccttccctgtggatgacctggacacccaggagagcgtgtggctggtgcagcagcagctgtgggcgctgaaggactgtccccgacgccgggccgtcatcctgaaattcagccttcagggtctcaagatctacagcggggagggtgaggtgctgctgatggctcatgccctgaggcgcatactctactccacctggtgccctgccgactgccagtttgccttcatggctcgaaacccacggagcccagccagcaagctcttctgccacctctttgtgggcagc

SEQ ID NO: 180958 - DNA, 524 bp, Homo sapiens
  Payload ID: 15636
  Gene Symbol: SH2D5
  Gene Name: SH2 domain containing 5
  ENST ID: ENST00000519434
  CDS Start-End: 313-524
ctcctcgtggactggcagggacccccaccaaactccaagagtggacaccctacttatctgtgggaggggagtccgagcagaaaggcaccgccatggcctgaggaaacagctccagagacatggatttgcttccctgctctcccactgaagctgtgtgactatggggccacctggaaaacctcagaggacagctccagcctcattccaagtgtgtccccttcggaaggtgctggcccagccagactccagtgtaaagcctcagaaaagcagcctcccctcccgtggagctggaagccaggcaccctgggggccatgcagaaggcgggggctgggggccgcagggcctctgactgcgggctggcccctcaccggcccaggtgcatcaccaagtttgcccagtacgtgggctccttccctgtggatgacctggacacccaggagagcgtgtggctggtgcagcagcagctgtgggcgctgaaggactgtccccgacgccgggccgtcatcctgaaattcagccttca

SEQ ID NO: 180959 - DNA, 894 bp, Homo sapiens
  Payload ID: 15637
  Gene Symbol: SH2D6
  Gene Name: SH2 domain containing 6
  Uniprot ID: Q7Z4S9
  ENST ID: ENST00000340326
  CDS Start-End: 162-689
ggcattttccggtgcctgcaccaaatcaggaagctcctagtctgtgccccaagatcacgcctcatttggaggtcacacgaggcctggctggtgggtcctgccagggcactggatctggagagtggaggaagcactgggtgccggggtttgggctcggggccatgtacgcctcctcctaccccccacccccgcagctgtcccctagaagccacctttgcccacccccaccccaccccaccccaccccagctcaataatctgcttcttctagaaggaaggaaatcgtctcttccctctgtagcccccactgggagtgcctcagctgctgaggacagtgatctgctgactcagccttggtactcggggaactgtgaccgctatgctgttgagagtgccctgctccacttacaaaaggatggggcctataccgtgcgccccagctcagggcctcatggctcccagcccttcaccctggcagtgcttctccgaggccgggtcttcaacattcccatccggcggctggatggcggacgccactatgccctgggccgggagggcaggaaccgtgaggagctcttctcctccgtggcggccatggtccagcacttcatgtggcaccctctgccccttgtggacagacacagcggcagccgggaactcacctgcctgctcttccccaccaagccttgaggccacagcgaagaatgcaggtgtctgcccagttcactaggtcctggatgaaggaaccgtggtggcctagaccagtcaggggacagcacaggcactgctggaacagcaaaggatcctctcacatctacttgtgggcctagggcaccctgagagggactggcctaccttgcacaagttcacattcaataaacatttgttgaatgaa

SEQ ID NO: 180960 - DNA, 1975 bp, Homo sapiens
  Payload ID: 15637
  Gene Symbol: SH2D6
  Gene Name: SH2 domain containing 6
  Uniprot ID: Q7Z4S9
  ENST ID: ENST00000389938
  CDS Start-End: 1315-1746
gttggggccgtgggagatgaagatggtgggtggggggttgggcccacagcctgctaagcaggcagagtggcctcctgaacccttcctccatcgcctagagcaaactcccattcctggaaggaggagcagcccagaccctgagactggactaggtctgttagggtccctgtgtggccggcaggactcgtggtgaagcccggggaaggcctgggtcctccaggtcagggatgtaggtcccagggtgtgcaggccgcggtatctgaccatcgtcggcgccctgcgcccaggcatcaattttacatggcagagtcaagaatgccctcttggtcgagtgcagtggctcacacctgtgatcccaacactttgggaggctgaggcaggaggattgcttgagcccagaagttcaagaccagcctggacaacatagacacagaatggtctgcctgggcctcagtcacattggaggagcagagagagaaggagccatgaggagtcactcaagggttttaggcagagccgtgacacaaccagagatactacgagcaaaggttccggaacagggcagggcaggacaggtttgagagcaatggcgcgatttcggctcacagcaacctccgcctcctgggttcaagctattctcctgcctcaacaacctcctgagggctgggattacagacaagaggccatgtgaggacacagagaaagcagccgtttacaagccaagaagagaggccgcatcacaaaccaacctttatggcaccttgatcttagacttctagctccagaacagagatgcaaatgatgggaacaatggagcccttgtccccaggccatttgtggcagatcctgggctccagggaggcaaagctcctctgcctctgccatggacaagctcagtgggagcaggccccggctggggccaccgctcccaccccccagatgtgtggactccccaggttggagagaagatgctcccagcccttccttcctgcctgccccagggacttggagacacaaggcccaggaggaggacgaggaggaaaataagtatgagctgcccccctgtgaggctctgcccctcagtctagcccctgcccaccttcctggcactgaggaggactccttgtacctggatcactctggccccctgggtccatcaaagccatcgccacccctgcctcagcccaccatgagcagggtgcatcgtccagagtggtgccaggccctccaaagaaacctgatgaggacctctacttggaatgtgagccggatccagtcctggctttgactcagactctcagcttccaagtcctgatgccctcaggccctctgcccaggacatcagtggtgcccaggcctaccacagccccccaggaaactcggaatggaacagcagatgctgcctctaaagaaggaaggaaatcgtctcttccctctgtagcccccactgggagtgcctcagctgctgaggatggggcctataccgtgcgccccagctcagggcctcatggctcccagcccttcaccctggcagtgcttctccgaggccgggtcttcaacattcccatccggcggctggatggcggacgccactatgccctgggccgggagggcaggaaccgtgaggagctcttctcctccgtggcggccatggtccagcacttcatgtggcaccctctgccccttgtggacagacacagcggcagccgggaactcacctgcctgctcttccccaccaagccttgaggccacagcgaagctgacaccctcttcctggcctccaggaatgcaggtgtctgcccagttcactaggtcctggatgaaggaaccgtggtggcctagaccagtcaggggacagcacaggcactgctggaacagcaaaggatcctctcacatctacttgtgggcctagggcaccctgagagggactggcctaccttgcacaagttcacattcaataaacatttgttgaatg

SEQ ID NO: 180961 - DNA, 2750 bp, Homo sapiens
  Payload ID: 15638
  Gene Symbol: SH2D7
  Gene Name: SH2 domain containing 7
  Uniprot ID: A6NKC9
  ENST ID: ENST00000328828
  CDS Start-End: 1-1356
atggaggacagcctaaagcagctcagcctggggagagatcctgagggggcaggggacagccaggccctggctgagctccaggagcttgccctgaagtggttcatggagacacaggcccccttcattctgcagaacggtgccctgcctccctggtttcatggattcatcacccgcaagcagacggagcagctactcagggacaaagctcttggttccttccttatccgcctcagtgaccgagccactggctacatcttgtcctacaggggcagtgatcgctgccgacattttgtcatcaaccagcttcgaaaccggcgttacatcatctcaggagacacccagagccacagcaccctggctgagcttgtgcaccattaccaggaggcacagctcgagcccttcaaagagatgctgactgctgcctgcccccggccagaggacaatgatctgtatgatgccatcacccggggcctccaccagaccatcgtggacccagaaaacccacctgccacggcattcctcacagtggtccccgacaaggccgccagcccccgctcttctccaaagccccaggtctccttcctccatgcacagaaaagcctggatgtgagtccccggaacctctcccaggaggaaagcatggaggctcccatcagagtgtctccactccctgagaagagttcctccctcctggaagagtcttttggaggccccagtgacatcatctatgcagacctgaggaggatgaaccaggcacggctaggcttgggcacagaggggtccggcaggcatgggccagttccagctggcagccaggcctactccccaggcagggaggcccaaaggagactctcagatggagaacagaacaggcctgatggcctggggcctgtcctttctggggtgagcccagaccagggtcccacagagtctcccacttcctggggatgttctgatgccatgggatccctgggggctacctggaggcaggagtttccaaagctgagccaagaggctcagccctgctcccagggcagctctgcagatatctatgagttcatcgggacagaaggcctcctgcaagaggccagggacacaccagaccaagaaggcagcacctatgagcagatcccagcttgctggggtggcccagccagggccccacatcctggggccagtcccacatatagcccatgggtccatggctacaagaggatctcagggaccccagagctctcagagcctgggaacacctatgaacagatcccagcaaccaagagcaaggagactggacggacacacaagcctgacaagcttcggaggctcttcttcacgtacaggaagcacaaattctgagggcctggcatccggcagcccaccagtgggtttcctggtacccaggccatgccaggggttatcgcaaaggcctcagctcacttgaaggcaccctttggatcttgagactcatccagcctgctacagaactaggctccgagacagccgaggtgcctgcctgagagcaggtggaagaggaccttgcaggtgcctgcagctcctggctatgtcctgctttccttgtgcctcccatccatgcacaggagggactggagaggaatgagattggccaaaggcaggggtcaccacccccatttcccagataagcatgctgaggcccaggcagactgactgaacctgcctcccactactgagcacttaccgaatgtgtggcaggctgtgtgctagcacagacacctttctaactggccaagtgacatcatgcaattgctaccgagaacaaaaccagttcccctccttgcggccccatcagcgaaaaggaggggagggccagaagccacatcctctgcttcaggcctcttcgctccagctgtaccctcaggtcaggctggctcttcctggaactctgtccctcaggaaacttcctgttttgtgtgtcacttcccttcctatccacatgtccccttctctataagggtggacagctggcttgctaccccactcccaacaacccccaggcctgggatgcagaaaacaggactgatcatctccagagagaacaccatacgtgcccctcctccctgccctgaccctgggcagagcgggctcaggttgcatttgtgggaaatctactcttagtgaccacttggctatgcagcttttcctgaaatataggcctgtaagagtccctccctccttgggggtttaaggattgagactgaagcaactgtccctgtgcctgagtggttagcactcccaaatgttaaccagagatactgtcagggaattcacggaaggttcggggcatgaatgtgttttcctcccgatggcacacgcactgaaatcaaagttagtgcctaaagcaggaggcactgcctaatgccgagaggtgagacaccaatggtgggatttcaaggatcagaagcaaaggtaccctcaaacatttcctaacattagcatacatggagagcaaagggatgcaaaagtgttttactaccaggagttcacaaatctgtggacagcacaccagtgaggattccacggtgttggggaggcaggcagggtggtactcatgacccagaggcagagacaggagcaagagcccttgggcccactgcacccacagcttcacattgtgaaggaggccgggagaaggggaacaggcaggggtgggaagcagcccaaccttgggttttggaaaaagattgcatagctcgttaaaaccctgacctctt

SEQ ID NO: 180962 - DNA, 2162 bp, Homo sapiens
  Payload ID: 15638
  Gene Symbol: SH2D7
  Gene Name: SH2 domain containing 7
  ENST ID: ENST00000409568
  CDS Start-End: 360-1307
gccgttgccccctcagcccccggaggcagggtcctgcgaccagcaccccgcgggtcagttgccttcgtgccacctgggctccaagtcctcgccctgccggatgaagcaatggtctatttctttatggcagtacggagcagctactcagggacaaagctcttggttccttccttatccgcctcagtgaccgagccactggctacatcttgtcctacaggggcagtgatcgctgccgacattttgtcatcaaccagcttcgaaaccggcgttacatcatctcaggagacacccagagccacagcaccctggctgagcttgtgcaccattaccaggaggcacagctcgagcccttcaaagagatgctgactgctgcctgcccccggccagaggacaatgatctgtatgatgccatcacccggggcctccaccagaccatcgtggacccagaaaacccacctgccacggcattcctcacagtggtccccgacaaggccgccagcccccgctcttctccaaagccccaggtctccttcctccatgcacagaaaagcctggatgtgagtccccggaacctctcccaggaggaaagcatggaggctcccatcagagtgtctccactccctgagaagagttcctccctcctggaagagtcttttggaggccccagtgacatcatctatgcagacctgaggaggatgaaccaggcacggctaggcttgggcacagaggggtccggcaggcatgggccagttccagctggcagccaggcctactccccaggcagggaggcccaaaggagactctcagatggagaacagaacaggcctgatggcctggggcctgtcctttctggggtgagcccagaccagggtcccacagagtctcccacttcctggggatgttctgatgccatgggatccctgggggctacctggaggcaggagtttccaaagctgagccaagaggctcagccctgctcccagggcagctctgcagatatctatgagttcatcgggacagaaggcctcctgcaagaggccagggacacaccagaccaagaaggcagcacctatgagcagatcccagcttgctggggtggcccagccagggccccacatcctggggccagtcccacatatagcccatgggtccatggctacaagaggatctcagggaccccagagctctcagagcctgggaacacctatgaacagatcccagcaaccaagagcaaggagactggacggacacacaagcctgacaagcttcggaggctcttcttcacgtacaggaagcacaaattctgagggcctggcatccggcagcccaccagtgggtttcctggtacccaggccatgccaggggttatcgcaaaggcctcagctcacttgaaggcaccctttggatcttgagactcatccagcctgctacagaactaggctccgagacagccgaggtgcctgcctgagagcaggtggaagaggaccttgcaggtgcctgcagctcctggctatgtcctgctttccttgtgcctcccatccatgcacaggagggactggagaggaatgagattggccaaaggcaggggtcaccacccccatttcccagataagcatgctgaggcccaggcagactgactgaacctgcctcccactactgagcacttaccgaatgtgtggcaggctgtgtgctagcacagacacctttctaactggccaagtgacatcatgcaattgctaccgagaacaaaaccagttcccctccttgcggccccatcagcgaaaaggaggggagggccagaagccacatcctctgcttcaggcctcttcgctccagctgtaccctcaggtcaggctggctcttcctggaactctgtccctcaggaaacttcctgttttgtgtgtcacttcccttcctatccacatgtccccttctctataagggtggacagctggcttgctaccccactcccaacaacccccaggcctgggatgcagaaaacaggactgatcatctccagagagaacaccatacgtgcccctcctccctgccctgaccctgggcagagcgggctcaggttgcatttgtgggaaatctactcttagtgaccacttggctatgcagcttttcctgaaatataggcctgtaagagtccctccctc

SEQ ID NO: 180963 - DNA, 3095 bp, Homo sapiens
  Payload ID: 15639
  Gene Symbol: SH2B1
  Gene Name: SH2B adaptor protein 1
  Uniprot ID: Q9NRF2
  ENST ID: ENST00000322610
  CDS Start-End: 440-2710
gggctccgggaggcagctgcggctccgactgctcaggaacctcctcctgggcccggcagagagagaccccgagtcccccggagtccgactcgctacgcgggtcttgcgagatatctggccgcctctgccgcagctggagcagagatggggtttcaccgtgttagccaggatggtcttgatctcctgacctcatgatccgcctgtctcggcctcccaaagtgctgggattacaggcgtgagccactgtgcccggccttgaacattcttaggtgcaactggagaaggcactgaagccctacgagattcacaccgtcttcggtctcctggggtcggcgccgagtgggaggatggcggaactgctgccgcccacccctcgtcttctggctgcctccctctttgtgccccacaggctccccctctccacctcctggggcccatcatgaatggtgccccttccccagaggacggggcctccccctcgtctcccccgctgcccccacccccgccccctagttggcgggagttctgtgagtcccacgcccgggctgcggctctggactttgcccgccgttttcgcctctacctggcctcccacccccaatatgcggggcccggggccgaggctgccttctcccgccgttttgctgagctcttcctgcagcactttgaagccgaggtggcccgggcctctggctccctgtcgccacccatcctggctcccctgagccctggtgcggagatttcgccacatgacctgtcccttgagagctgcagggtgggtgggcccctggctgtgctgggcccttctcgatcatctgaggacctggccggccccctcccttcctcagtctcttcctcctctacaacctcctccaagccgaagctcaagaagcgcttttccctgcgttcagtgggtcgctctgtccgaggctcagtccgtggcatcctgcagtggcgggggaccgttgaccctccctcctccgctgggcccctggagacctcgtcaggccccccagtcttaggtggaaacagcaactccaactcctctggcggggctgggaccgttggtaggggactggtcagtgatggaacgtcccctggggaaagatggactcaccgttttgagaggctgagactcagtcggggagggggcgccttgaaggatggagcagggatggtgcagagggaagagctgctgagtttcatgggggctgaggaggcagcccctgacccagccggagtgggccggggaggaggggtggctgggcctccttcagggggaggagggcagcctcagtggcagaagtgtcgcctgctgcttcgaagtgaaggagaaggaggaggaggaagtcgcctggagttctttgtaccacccaaggcctctcggccccgactcagcatcccctgctcttctatcacagacgtccggacaaccacagccctggagatgcctgaccgggagaacacgtttgtggttaaggtggaaggtccatccgagtatatcatggagacagtggatgcccagcatgtgaaggcctgggtgtctgacatccaagaatgcctgagcccaggaccctgccctgctaccagtccccgccccatgaccctccctctggcccctgggacctcattccttacaagggagaacacagacagcctggagctgtcctgcctgaatcactcggagagtctacccagccaggacctgctgcttggacccagcgagagcaatgaccgcctgtcgcagggggcatatgggggcctctcagaccgcccctcggcatccatctcccccagctctgcctccattgccgcctcccattttgactcgatggaactgcttcccccagagttgcccccccgcatccccattgaagagggacccccaacagggacagttcatcccctctcagccccctaccctcccttggacactccggaaacagccacagggtccttcctgttccagggggagccagagggcggtgagggggaccagcccctctcagggtatccttggttccacgggatgctctctcggctcaaggctgcacagttggtgctgactggcggcactggctcccacggtgtcttcctggtgcgccagagtgagacaaggcggggtgaatacgtcctcaccttcaacttccagggcaaggccaagcacctgcgtttgtcgctgaacgaggagggtcagtgccgggtccagcacctgtggttccagtccattttcgatatgctcgagcacttccgggtgcaccccatccctttggagtcgggaggctccagtgatgttgtccttgtcagctatgtcccatcctcccagcgacagcaggaaccgaccacctcccatgacccaccccagccccctgaacccccttcatggacagatcccccacagcctggggcagaagaggcgtcgagggcgccagaagtggcggcagcagcagccgcagcagccaaagagaggcaagagaaagagaaagcgggcggtggaggggtcccggaagagctggtccccgtggttgagctggtccccgtggttgaattggaagaggccatagccccaggctcagaggcccagggcgctgggtctggtggggacgcgggggtgcccccaatggtgcagctgcagcagtcaccactagggggtgatggagaggaagggggccaccccagggccattaacaaccagtactccttcgtgtgagccaaccccacccgctccaccctttttaaaccccccagccctgctcgtgagattgggctgggtagggacagaggaggccgaaatccctcccccatgcttcctgacccttgttggccaagggcatctttgatggtacaagcagaggctcgggagaggctcccgtcacacactacaggtcccctccccagggcaggggatttgggctccatgagctccttgaggggctcttctggtcagccccaccctgggggccatttccccattaactacccccagcccgaggcagggtgagggggaagggctgtcagttacattaaggtggttgttgttgttgttttaaacaaaatggagaagcataaataaataaaaaggtttatctcggttc

SEQ ID NO: 180964 - DNA, 6043 bp, Homo sapiens
  Payload ID: 15639
  Gene Symbol: SH2B1
  Gene Name: SH2B adaptor protein 1
  Uniprot ID: Q9NRF2
  ENST ID: ENST00000337120
  CDS Start-End: 3292-5307
gacggggtttcaccatgttggtcaggctggtctcaaactcctgacctcaagccatccgcccgcctcggcctcccaaagggctgggattacaggcgtgagccagcgctcccggccctgacctcattttttttttttctatttttaaaatagggattctagttctgttgcctgggctggagtgccgtggcgccatctcggctcaccgcaatctctgccttccggattcaagctattctcttgcctctgcctccggagggactgggactacaggcgcgcgccaccatgcccggctaatttttgtatttttagtagagacggggtttcaccatgttggccaggctggtctcgaactcctgacctcaggtgatccacctgcctcggccttccgaagtgctgggattacaggcatgagccactgcgcccggccctgacctcattatttctacccaccccctcccccaccactaccaccatcttcatctccagcctcagagatgcaaactcctggaccgcctgcccctttcctcagataaaccaaggtcgtaagttcaggctccgcctccccgcagggcctccccaaggtcacccgcttctttcctcgctcagctccttggtggcgttgtccgcgtgcccctccacagcggggccggcgctctaggctgcagcgggccgttcacacagcctcatcatctcgctggtttccggtgctcggcggctactctagccctcagccgggccctgggactctatcccctaaggccggttctctatggtcgacatcgcccctttgtcccgaatttcctccgggaggacgctctggtgggatccaagcacttcccccgctgcgtctgtggtcgcttttaggtgcaactggagaaggcactgaagccctacgagattcacaccgtcttcggtctcctggggtcggcgccgagtgggaggatggcggaagtaagtatgaaggtgcccttccctcccgccgctgttctctatggtctcttccttcagcgacgggaaagggggtcctgacgcctgcgcggaaccgggctgggcgctcgtcgcgtagtgggtgggggcgcagggagcgggagccgccgccgccgccgccgccgccggagctaacctcggggaccgagatgcaggtgggaccggaaccggaacccccctcttcaagtaccttttccctctccgcgacccggccctggcgcccgagaggattcctgggtgggggtgggcgtggagggccgggggctggagaggcactcggccccggagagtgcagcagacagggctggtcccgaggtggatgcggccccggaaaatgggcggctggggggtgtccagggagtagggtcggatcggagtatatggaccaccgggcccggagggtccgagccgagagcggagcctgcaccctccacctcccgcccttcgggaaatatcagaactgagccaggaggcaggtgcaccgggaaaatgtgtctgagtcctgcttggcagaagagaaactgagtcaccagcttaggagtcgcagggtcagcgggcctgaagggggctgggtctgtctgcggtgcggaggattgggtgggcctgtgtgagccgaggtggccgctggctggagattggtttgcacttcttggctgggttcccccgtgctccatgactcctgcatctcctgattgtttctcgttggtttggagttgtccctgcggttggagccatctgagcttgtagggtcgaggcccaggaggaaggggagggttcaccgacttacagcctggctgtaggtttgaacaggagtctgaggtcgctgagggtttggggaggctttcctgagctgctctggccccagtcctggggctgtcaccttccagtattgcgtggcgggaggagcgctaacaagagccaagggttgtaaattccacacccagctctgccactttctagttgtaagaccttgagagggctcctcctttctctaatttctattttagaaaattggaacaataatattcttctcccacatgaagatagtaacaatggcagtcgttcagcggatgcttactttgcgttcagcgctgacataccccattccatgtaattctctcaacatttcgaggggagggatcattagctttgtttaacagatagaaaaacggaggctcagagaggacgtggaatttgttcaagataacatcgctcataaggtggctggactgggtgctcataaggtggtttgagccctggtctgactcaagtccatggccttaaccagaaggctaacctgcctttagggcatactccccagtgggagaagaggaaggtgaaaaatcctagggccccagctctccctgtgatgttttgtttacgtgaggccagcaaagacttgacctgagccaacccagtttctcctctggggcccctgcggcctctggccccagactgaagggataccaaagaagtgggctgtagctatttcacatctccttcacgcagtgcgtgggtgctggactctggggtcagctttcaagacaattactgttttggtccatcatgcatccatcctcattaatgaatcggccccctccaaagagttggaccctaagatgcgtgaggcaggctctctaaggtctagaatcccagctcctctctagccccctgcgagctggggcggtgaggtgctatggctgaggctggcccagccgggccctggggacagggactatgaagtggggaaaacagtagacttggagttctgaaacttttctgagcttcggtttcctcatctgttcgagaggtctttgaaacctctcagggaaaggtaagataaccaagtgggagcctctagaatggctcatgggaagtgtgacatgaatattggaggatccgatgtagagggggggtgatctggaaaagttcccttttttagggggaaggtgctccaaagccctctactgctggatccaaagctaaggaaagtgggggcaaatgtggcaggctcggggcaggttagacgctggggagccagttggctggggcctgcagggtgccaggatctgggagagggaagggaggtgttgggctcccttccccattgctctctgcggagtctgaagtagggtcggacgtctctggctgggggtgggatgcagcctccggtgcgccctcagcagtgaccctcgtgtgtgcctctctcttcctttcgcagctgctgccgcccacccctcgtcttctggctgcctccctctttgtgccccacaggctccccctctccacctcctggggcccatcatgaatggtgccccttccccagaggacggggcctccccctcgtctcccccgctgcccccacccccgccccctagttggcgggagttctgtgagtcccacgcccgggctgcggctctggactttgcccgccgttttcgcctctacctggcctcccacccccaatatgcggggcccggggccgaggctgccttctcccgccgttttgctgagctcttcctgcagcactttgaagccgaggtggcccgggcctctggctccctgtcgccacccatcctggctcccctgagccctggtgcggagatttcgccacatgacctgtcccttgagagctgcagggtgggtgggcccctggctgtgctgggcccttctcgatcatctgaggacctggccggccccctcccttcctcagtctcttcctcctctacaacctcctccaagccgaagctcaagaagcgcttttccctgcgttcagtgggtcgctctgtccgaggctcagtccgtggcatcctgcagtggcgggggaccgttgaccctccctcctccgctgggcccctggagacctcgtcaggccccccagtcttaggtggaaacagcaactccaactcctctggcggggctgggaccgttggtaggggactggtcagtgatggaacgtcccctggggaaagatggactcaccgttttgagaggctgagactcagtcggggagggggcgccttgaaggatggagcagggatggtgcagagggaagagctgctgagtttcatgggggctgaggaggcagcccctgacccagccggagtgggccggggaggaggggtggctgggcctccttcagggggaggagggcagcctcagtggcagaagtgtcgcctgctgcttcgaagtgaaggagaaggaggaggaggaagtcgcctggagttctttgtaccacccaaggcctctcggccccgactcagcatcccctgctcttctatcacagacgtccggacaaccacagccctggagatgcctgaccgggagaacacgtttgtggttaaggtggaaggtccatccgagtatatcatggagacagtggatgcccagcatgtgaaggcctgggtgtctgacatccaagaatgcctgagcccaggaccctgccctgctaccagtccccgccccatgaccctccctctggcccctgggacctcattccttacaagggagaacacagacagcctggagctgtcctgcctgaatcactcggagagtctacccagccaggacctgctgcttggacccagcgagagcaatgaccgcctgtcgcagggggcatatgggggcctctcagaccgcccctcggcatccatctcccccagctctgcctccattgccgcctcccattttgactcgatggaactgcttcccccagagttgcccccccgcatccccattgaagagggacccccaacagggacagttcatcccctctcagccccctaccctcccttggacactccggaaacagccacagggtccttcctgttccagggggagccagagggcggtgagggggaccagcccctctcagggtatccttggttccacgggatgctctctcggctcaaggctgcacagttggtgctgactggcggcactggctcccacggtgtcttcctggtgcgccagagtgagacaaggcggggtgaatacgtcctcaccttcaacttccagggcaaggccaagcacctgcgtttgtcgctgaacgaggagggtcagtgccgggtccagcacctgtggttccagtccattttcgatatgctcgagcacttccgggtgcaccccatccctttggagtcgggaggctccagtgatgttgtccttgtcagctatgtcccatcctcccagcgacagcagggccgggagcaggctgggagccatgcgggggtgtgcgagggagatggatgccaccccgatgcctcctgcaccctcatgcccttcggagcgagtgactgtgtaaccgaccacctcccatgacccaccccagccccctgaacccccttcatggacagatcccccacagcctggggcagaagaggcgtcgagggcgccagaagtggcggcagcagcagccgcagcagccaaagagaggcaagagaaagagaaagcgggcggtggaggggtcccggaagagctggtccccgtggttgagctggtccccgtggttgaattggaagaggccatagccccaggctcagaggcccagggcgctgggtctggtggggacgcgggggtgcccccaatggtgcagctgcagcagtcaccactagggggtgatggagaggaagggggccaccccagggccattaacaaccagtactccttcgtgtgagccaaccccacccgctccaccctttttaaaccccccagccctgctcgtgagattgggctgggtagggacagaggaggccgaaatccctcccccatgcttcctgacccttgttggccaagggcatctttgatggtacaagcagaggctcgggagaggctcccgtcacacactacaggtcccctccccagggcaggggatttgggctccatgagctccttgaggggctcttctggtcagccccaccctgggggccatttccccattaactacccccagcccgaggcagggtgagggggaagggctgtcagttacattaaggtggttgttgttgttgttttaaacaaaatggagaagcataaataaataaaaaggtttatctcg

SEQ ID NO: 180965 - DNA, 3033 bp, Homo sapiens
  Payload ID: 15639
  Gene Symbol: SH2B1
  Gene Name: SH2B adaptor protein 1
  Uniprot ID: Q9NRF2
  ENST ID: ENST00000359285
  CDS Start-End: 225-2276
ccttcagcgacgggaaagggggtcctgacgcctgcgcggaaccgggctgggcgctcgtcgcgtagtgggtgggggcgcagggagcgggagccgccgccgccgccgccgccgccggagctaacctcggggaccgagatgcagctgctgccgcccacccctcgtcttctggctgcctccctctttgtgccccacaggctccccctctccacctcctggggcccatcatgaatggtgccccttccccagaggacggggcctccccctcgtctcccccgctgcccccacccccgccccctagttggcgggagttctgtgagtcccacgcccgggctgcggctctggactttgcccgccgttttcgcctctacctggcctcccacccccaatatgcggggcccggggccgaggctgccttctcccgccgttttgctgagctcttcctgcagcactttgaagccgaggtggcccgggcctctggctccctgtcgccacccatcctggctcccctgagccctggtgcggagatttcgccacatgacctgtcccttgagagctgcagggtgggtgggcccctggctgtgctgggcccttctcgatcatctgaggacctggccggccccctcccttcctcagtctcttcctcctctacaacctcctccaagccgaagctcaagaagcgcttttccctgcgttcagtgggtcgctctgtccgaggctcagtccgtggcatcctgcagtggcgggggaccgttgaccctccctcctccgctgggcccctggagacctcgtcaggccccccagtcttaggtggaaacagcaactccaactcctctggcggggctgggaccgttggtaggggactggtcagtgatggaacgtcccctggggaaagatggactcaccgttttgagaggctgagactcagtcggggagggggcgccttgaaggatggagcagggatggtgcagagggaagagctgctgagtttcatgggggctgaggaggcagcccctgacccagccggagtgggccggggaggaggggtggctgggcctccttcagggggaggagggcagcctcagtggcagaagtgtcgcctgctgcttcgaagtgaaggagaaggaggaggaggaagtcgcctggagttctttgtaccacccaaggcctctcggccccgactcagcatcccctgctcttctatcacagacgtccggacaaccacagccctggagatgcctgaccgggagaacacgtttgtggttaaggtggaaggtccatccgagtatatcatggagacagtggatgcccagcatgtgaaggcctgggtgtctgacatccaagaatgcctgagcccaggaccctgccctgctaccagtccccgccccatgaccctccctctggcccctgggacctcattccttacaagggagaacacagacagcctggagctgtcctgcctgaatcactcggagagtctacccagccaggacctgctgcttggacccagcgagagcaatgaccgcctgtcgcagggggcatatgggggcctctcagaccgcccctcggcatccatctcccccagctctgcctccattgccgcctcccattttgactcgatggaactgcttcccccagagttgcccccccgcatccccattgaagagggacccccaacagggacagttcatcccctctcagccccctaccctcccttggacactccggaaacagccacagggtccttcctgttccagggggagccagagggcggtgagggggaccagcccctctcagggtatccttggttccacgggatgctctctcggctcaaggctgcacagttggtgctgactggcggcactggctcccacggtgtcttcctggtgcgccagagtgagacaaggcggggtgaatacgtcctcaccttcaacttccagggcaaggccaagcacctgcgtttgtcgctgaacgaggagggtcagtgccgggtccagcacctgtggttccagtccattttcgatatgctcgagcacttccgggtgcaccccatccctttggagtcgggaggctccagtgatgttgtccttgtcagctatgtcccatcctcccagcgacagcagggtgagcagagcaggtctgcaggggaggaggtgcccgtgcacccaagaagtgaggccgggagcaggctgggagccatgcgggggtgtgcgagggagatggatgccaccccgatgcctcctgcaccctcatgcccttcggagcgagtgactgtgtaaccgaccacctcccatgacccaccccagccccctgaacccccttcatggacagatcccccacagcctggggcagaagaggcgtcgagggcgccagaagtggcggcagcagcagccgcagcagccaaagagaggcaagagaaagagaaagcgggcggtggaggggtcccggaagagctggtccccgtggttgagctggtccccgtggttgaattggaagaggccatagccccaggctcagaggcccagggcgctgggtctggtggggacgcgggggtgcccccaatggtgcagctgcagcagtcaccactagggggtgatggagaggaagggggccaccccagggccattaacaaccagtactccttcgtgtgagccaaccccacccgctccaccctttttaaaccccccagccctgctcgtgagattgggctgggtagggacagaggaggccgaaatccctcccccatgcttcctgacccttgttggccaagggcatctttgatggtacaagcagaggctcgggagaggctcccgtcacacactacaggtcccctccccagggcaggggatttgggctccatgagctccttgaggggctcttctggtcagccccaccctgggggccatttccccattaactacccccagcccgaggcagggtgagggggaagggctgtcagttacattaaggtggttgttgttgttgttttaaacaaaatggagaagcataaataaataaaaaggtttatctcggttc

SEQ ID NO: 180966 - DNA, 2529 bp, Homo sapiens
  Payload ID: 15639
  Gene Symbol: SH2B1
  Gene Name: SH2B adaptor protein 1
  Uniprot ID: Q9NRF2
  ENST ID: ENST00000395532
  CDS Start-End: 372-2387
aagtaccttttccctctccgcgacccggccctggcgcccgagaggattcctgggtgggggtgggcgtggagggccgggggctggagaggcactcggccccggagagtgcagcagacagggctggtcccgaggtggatgcggccccggaaaatgggcggctggggggtgtccagggagtagggtcggatcggagtatatggaccaccgggcccggagggtccgagccgagagcggagcctgcaccctccacctcccgcccttcgggaaatatcagaactgagccaggagctgctgccgcccacccctcgtcttctggctgcctccctctttgtgccccacaggctccccctctccacctcctggggcccatcatgaatggtgccccttccccagaggacggggcctccccctcgtctcccccgctgcccccacccccgccccctagttggcgggagttctgtgagtcccacgcccgggctgcggctctggactttgcccgccgttttcgcctctacctggcctcccacccccaatatgcggggcccggggccgaggctgccttctcccgccgttttgctgagctcttcctgcagcactttgaagccgaggtggcccgggcctctggctccctgtcgccacccatcctggctcccctgagccctggtgcggagatttcgccacatgacctgtcccttgagagctgcagggtgggtgggcccctggctgtgctgggcccttctcgatcatctgaggacctggccggccccctcccttcctcagtctcttcctcctctacaacctcctccaagccgaagctcaagaagcgcttttccctgcgttcagtgggtcgctctgtccgaggctcagtccgtggcatcctgcagtggcgggggaccgttgaccctccctcctccgctgggcccctggagacctcgtcaggccccccagtcttaggtggaaacagcaactccaactcctctggcggggctgggaccgttggtaggggactggtcagtgatggaacgtcccctggggaaagatggactcaccgttttgagaggctgagactcagtcggggagggggcgccttgaaggatggagcagggatggtgcagagggaagagctgctgagtttcatgggggctgaggaggcagcccctgacccagccggagtgggccggggaggaggggtggctgggcctccttcagggggaggagggcagcctcagtggcagaagtgtcgcctgctgcttcgaagtgaaggagaaggaggaggaggaagtcgcctggagttctttgtaccacccaaggcctctcggccccgactcagcatcccctgctcttctatcacagacgtccggacaaccacagccctggagatgcctgaccgggagaacacgtttgtggttaaggtggaaggtccatccgagtatatcatggagacagtggatgcccagcatgtgaaggcctgggtgtctgacatccaagaatgcctgagcccaggaccctgccctgctaccagtccccgccccatgaccctccctctggcccctgggacctcattccttacaagggagaacacagacagcctggagctgtcctgcctgaatcactcggagagtctacccagccaggacctgctgcttggacccagcgagagcaatgaccgcctgtcgcagggggcatatgggggcctctcagaccgcccctcggcatccatctcccccagctctgcctccattgccgcctcccattttgactcgatggaactgcttcccccagagttgcccccccgcatccccattgaagagggacccccaacagggacagttcatcccctctcagccccctaccctcccttggacactccggaaacagccacagggtccttcctgttccagggggagccagagggcggtgagggggaccagcccctctcagggtatccttggttccacgggatgctctctcggctcaaggctgcacagttggtgctgactggcggcactggctcccacggtgtcttcctggtgcgccagagtgagacaaggcggggtgaatacgtcctcaccttcaacttccagggcaaggccaagcacctgcgtttgtcgctgaacgaggagggtcagtgccgggtccagcacctgtggttccagtccattttcgatatgctcgagcacttccgggtgcaccccatccctttggagtcgggaggctccagtgatgttgtccttgtcagctatgtcccatcctcccagcgacagcagggccgggagcaggctgggagccatgcgggggtgtgcgagggagatggatgccaccccgatgcctcctgcaccctcatgcccttcggagcgagtgactgtgtaaccgaccacctcccatgacccaccccagccccctgaacccccttcatggacagatcccccacagcctggggcagaagaggcgtcgagggcgccagaagtggcggcagcagcagccgcagcagccaaagagaggcaagagaaagagaaagcgggcggtgga

SEQ ID NO: 180967 - DNA, 1532 bp, Homo sapiens
  Payload ID: 15639
  Gene Symbol: SH2B1
  Gene Name: SH2B adaptor protein 1
  ENST ID: ENST00000538342
  CDS Start-End: 167-1174
cttcagcgacgggaaagggggtcctgacgcctgcgcggaaccgggctgggcgctcgtcgcgtagtgggtgggggcgcagggagcgggagccgccgccgccgccgccgccgccggagctaacctcggggaccgagatgcagacgtccggacaaccacagccctggagatgcctgaccgggagaacacgtttgtggttaaggtggaaggtccatccgagtatatcatggagacagtggatgcccagcatgtgaaggcctgggtgtctgacatccaagaatgcctgagcccaggaccctgccctgctaccagtccccgccccatgaccctccctctggcccctgggacctcattccttacaagggagaacacagacagcctggagctgtcctgcctgaatcactcggagagtctacccagccaggacctgctgcttggacccagcgagagcaatgaccgcctgtcgcagggggcatatgggggcctctcagaccgcccctcggcatccatctcccccagctctgcctccattgccgcctcccattttgactcgatggaactgcttcccccagagttgcccccccgcatccccattgaagagggacccccaacagggacagttcatcccctctcagccccctaccctcccttggacactccggaaacagccacagggtccttcctgttccagggggagccagagggcggtgagggggaccagcccctctcagggtatccttggttccacgggatgctctctcggctcaaggctgcacagttggtgctgactggcggcactggctcccacggtgtcttcctggtgcgccagagtgagacaaggcggggtgaatacgtcctcaccttcaacttccagggcaaggccaagcacctgcgtttgtcgctgaacgaggagggtcagtgccgggtccagcacctgtggttccagtccattttcgatatgctcgagcacttccgggtgcaccccatccctttggagtcgggaggctccagtgatgttgtccttgtcagctatgtcccatcctcccagcgacagcagggccgggagcaggctgggagccatgcgggggtgtgcgagggagatggatgccaccccgatgcctcctgcaccctcatgcccttcggagcgagtgactgtgtaaccgaccacctcccatgacccaccccagccccctgaacccccttcatggacagatcccccacagcctggggcagaagaggcgtcgagggcgccagaagtggcggcagcagcagccgcagcagccaaagagaggcaagagaaagagaaagcgggcggtggaggggtcccggaagagctggtccccgtggttgagctggtccccgtggttgaattggaagaggccatagccccaggctcagaggcccagggcgctgggtctggtggggacgcgggggtgcccccaatggtgcagctgcagcagtcaccactagggggtgatggagaggaagggggccaccccagggccattaacaaccagtactccttcgtgtgagcc

SEQ ID NO: 180968 - DNA, 1488 bp, Homo sapiens
  Payload ID: 15639
  Gene Symbol: SH2B1
  Gene Name: SH2B adaptor protein 1
  ENST ID: ENST00000545570
  CDS Start-End: 188-1309
aaggccggttctctatggtcgacatcgcccctttgtcccgaatttcctccgggaggacgctctggtgggatccaagcacttcccccgctgcgtctgtggtcgcttttaggtgcaactggagaaggcactgaagccctacgagattcacaccgtcttcggtctcctggggtcggcgccgagtgggaggatggcggaagcctctcggccccgactcagcatcccctgctcttctatcacagacgtccggacaaccacagccctggagatgcctgaccgggagaacacgtttgtggttaaggtggaaggtccatccgagtatatcatggagacagtggatgcccagcatgtgaaggcctgggtgtctgacatccaagaatgcctgagcccaggaccctgccctgctaccagtccccgccccatgaccctccctctggcccctgggacctcattccttacaagggagaacacagacagcctggagctgtcctgcctgaatcactcggagagtctacccagccaggacctgctgcttggacccagcgagagcaatgaccgcctgtcgcagggggcatatgggggcctctcagaccgcccctcggcatccatctcccccagctctgcctccattgccgcctcccattttgactcgatggaactgcttcccccagagttgcccccccgcatccccattgaagagggacccccaacagggacagttcatcccctctcagccccctaccctcccttggacactccggaaacagccacagggtccttcctgttccagggggagccagagggcggtgagggggaccagcccctctcagggtatccttggttccacgggatgctctctcggctcaaggctgcacagttggtgctgactggcggcactggctcccacggtgtcttcctggtgcgccagagtgagacaaggcggggtgaatacgtcctcaccttcaacttccagggcaaggccaagcacctgcgtttgtcgctgaacgaggagggtcagtgccgggtccagcacctgtggttccagtccattttcgatatgctcgagcacttccgggtgcaccccatccctttggagtcgggaggctccagtgatgttgtccttgtcagctatgtcccatcctcccagcgacagcagggtgagcagagcaggtctgcaggggaggaggtgcccgtgcacccaagaagtgaggccgggagcaggctgggagccatgcgggggtgtgcgagggagatggatgccaccccgatgcctcctgcaccctcatgcccttcggagcgagtgactgtgtaaccgaccacctcccatgacccaccccagccccctgaacccccttcatggacagatcccccacagcctggggcagaagaggcgtcgagggcgccagaagtggcggcagcagcagccgcagcagccaaagagaggcaagagaaagagaaagcgggcggtggaggggtcccggaagagctggt

SEQ ID NO: 180969 - DNA, 613 bp, Homo sapiens
  Payload ID: 15639
  Gene Symbol: SH2B1
  Gene Name: SH2B adaptor protein 1
  ENST ID: ENST00000561629
  CDS Start-End: 247-613
ttggtaaagctggctcttggctctgtgttagcagctgcgggcaggactgagaaagcagtgtgactgccttttgtctaacttcccgaggatgtagaaggaaagatgaatgtctggagggaggggaagagtggtctttggaaaccaaacacccagatctgtttctttctcctgacttaggcctctcggccccgactcagcatcccctgctcttctatcacagacgtccggacaaccacagccctggagatgcctgaccgggagaacacgtttgtggttaaggtggaaggtccatccgagtatatcatggagacagtggatgcccagcatgtgaaggcctgggtgtctgacatccaagaatgcctgagcccaggggagaacacagacagcctggagctgtcctgcctgaatcactcggagagtctacccagccaggacctgctgcttggacccagcgagagcaatgaccgcctgtcgcagggggcatatgggggcctctcagaccgcccctcggcatccatctcccccagctctgcctccattgccgcctcccattttgactcgatggaactgcttcccccagagttgcccccccgcatccccattgaagagggac

SEQ ID NO: 180970 - DNA, 484 bp, Homo sapiens
  Payload ID: 15639
  Gene Symbol: SH2B1
  Gene Name: SH2B adaptor protein 1
  ENST ID: ENST00000567536
  CDS Start-End: 431-484
agagtgggagtcaggcgggctaggccggacccggagggaggggctcgggctccgggaggcagctgcggctccgactgctcaggaacctcctcctgggcccggcagagagagaccccgagtcccccggagtccgactcgctacgcgggtcttgcgagatatctggccgcctctgccgcagctggagcagagatggggtttcaccgtgttagccaggatggtcttgatctcctgacctcatgatccgcctgtctcggcctcccaaagtgctgggattacaggcgtgagccactgtgcccggccttgaacattcttaggtgcaactggagaaggcactgaagccctacgagattcacaccgtcttcggtctcctggggtcggcgccgagtgggaggatggcggaaaccctgccctgctaccagtccccgccccatgaccctccctctggcccctgggacctcattccttacaagggagaacacagac

SEQ ID NO: 180971 - DNA, 546 bp, Homo sapiens
  Payload ID: 15639
  Gene Symbol: SH2B1
  Gene Name: SH2B adaptor protein 1
  ENST ID: ENST00000566176
  CDS Start-End: 1-546
tccgctgggcccctggagacctcgtcaggccccccagtcttagacgtccggacaaccacagccctggagatgcctgaccgggagaacacgtttgtggttaaggtggaaggtccatccgagtatatcatggagacagtggatgcccagcatgtgaaggcctgggtgtctgacatccaagaatgcctgagcccaggaccctgccctgctaccagtccccgccccatgaccctccctctggcccctgggacctcattccttacaagggagaacacagacagcctggagctgtcctgcctgaatcactcggagagtctacccagccaggacctgctgcttggacccagcgagagcaatgaccgcctgtcgcagggggcatatgggggcctctcagaccgcccctcggcatccatctcccccagctctgcctccattgccgcctcccattttgactcgatggaactgcttcccccagagttgcccccccgcatccccattgaagagggacccccaacagggacagttcatcccctctcagccccctaccct

SEQ ID NO: 180972 - DNA, 533 bp, Homo sapiens
  Payload ID: 15639
  Gene Symbol: SH2B1
  Gene Name: SH2B adaptor protein 1
  ENST ID: ENST00000566209
  CDS Start-End: 364-533
aagctattctcttgcctctgcctccggagggactgggactacaggcgcgcgccaccatgcccggctaatttttgtatttttagtagagacggggtttcaccatgttggccaggctggtctcgaactcctgacctcagcctcagagatgcaaactcctggaccgcctgcccctttcctcagataaaccaaggtcgtgcaactggagaaggcactgaagccctacgagattcacaccgtcttcggtctcctggggtcggcgccgagtgggaggatggcggaactgctgccgcccacccctcgtcttctggctgcctccctctttgtgccccacaggctccccctctccacctcctggggcccatcatgaatggtgccccttccccagaggacggggcctccccctcgtctcccccgctgcccccacccccgccccctagttggcgggagttctgtgagtcccacgcccgggctgcggctctggactttgcccgccgttttcgcctctacctggcctcccacccccaatatgcggg

SEQ ID NO: 180973 - DNA, 342 bp, Homo sapiens
  Payload ID: 15639
  Gene Symbol: SH2B1
  Gene Name: SH2B adaptor protein 1
  ENST ID: ENST00000568868
  CDS Start-End: 1-342
gccagagtgagacaaggcggggtgaatacgtcctcaccttcaacttccagggcaaggccaagcacctgcgtttgtcgctgaacgaggagggtcagtgccgggtccagcacctgtggttccagtccattttcgatatgctcgagcacttccgggtgcaccccatccctttggagtcgggaggctccagtgatgttgtccttgtcagctatgtcccatcctcccagcgacagcagggtgagcagagcaggtctgcaggggaggaggtgcccgtgcacccaagaagtgaggtgtgtgtgccagaaagatggggcggggaggggggactatcacaaggagaagctt

SEQ ID NO: 180974 - DNA, 821 bp, Homo sapiens
  Payload ID: 15639
  Gene Symbol: SH2B1
  Gene Name: SH2B adaptor protein 1
  ENST ID: ENST00000569651
  CDS Start-End: 1-602
cttggttccacgggatgctctctcggctcaaggctgcacagttggtgctgactggcggcactggctcccacggtgtcttcctggtgcgccagagtgagacaaggcggggtgaatacgtcctcaccttcaacttccagggcaaggccaagcacctgcgtttgtcgctgaacgaggagggtcagtgccgggtccagcacctgtggttccagtccattttcgatatgctcgagcacttccgggtgcaccccatccctttggagtcgggaggctccagtgatgttgtccttgtcagctatgtcccatcctcccagcgacagcagggtgagcagagcaggtctgcaggggaggaggtgcccgtgcacccaagaagtgagaaccgaccacctcccatgacccaccccagccccctgaacccccttcatggacagatcccccacagcctggggcagaagaggcgtcgagggcgccagaagtggcggcagcagcagccgcagcagccaaagagaggcaagagaaagagaaagcgggcggtggaggggtcccggaagagctggtccccgtggttgagctggtccccgtggttgaattggaagaggccatagccccaggctcagaggcccagggcgctgggtctggtggggacgcgggggtgcccccaatggtgcagctgcagcagtcaccactagggggtgatggagaggaagggggccaccccagggccattaacaaccagtactccttcgtgtgagccaaccccacccgctccaccctttttaaaccccccagccctgctcgtgagattgggctgggtagggacagag

SEQ ID NO: 180975 - DNA, 588 bp, Homo sapiens
  Payload ID: 15639
  Gene Symbol: SH2B1
  Gene Name: SH2B adaptor protein 1
  ENST ID: ENST00000563591
  CDS Start-End: 399-588
atgggcgtagtagttctcaggtcggcgggctgtggaggtgatcagagtgggagtcaggcgggctaggccggacccggagggaggggctcgggctccgggaggcagctgcggctccgactgctcaggaacctcctcctgggcccggcagagagagaccccgagtcccccggagtccgactcgctacgcgggtcttgcgagatatctggccgcctctgccgcagctggaggtgcaactggagaaggcactgaagccctacgagattcacaccgtcttcggtctcctggggtcggcgccgagtgggaggatggcggaactgctgccgcccacccctcgtcttctggctgcctccctctttgtgccccacaggctccccctctccacctcctggggcccatcatgaatggtgccccttccccagaggacggggcctccccctcgtctcccccgctgcccccacccccgccccctagttggcgggagttctgtgagtcccacgcccgggctgcggctctggactttgcccgccgttttcgcctctacctggcctcccacccccaatatgcggggcccggggccgaggctgcct

SEQ ID NO: 180976 - DNA, 2935 bp, Homo sapiens
  Payload ID: 15639
  Gene Symbol: SH2B1
  Gene Name: SH2B adaptor protein 1
  Uniprot ID: Q9NRF2
  ENST ID: ENST00000618521
  CDS Start-End: 273-2543
aagtatgaaggtgcccttccctcccgccgctgttctctatggtctcttccttcagcgacgggaaagggggtcctgacgcctgcgcggaaccgggctgggcgctcgtcgcgtagtgggtgggggcgcagggagcgggagccgccgccgccgccgccgccgccggagctaacctcggggaccgagatgcagctgctgccgcccacccctcgtcttctggctgcctccctctttgtgccccacaggctccccctctccacctcctggggcccatcatgaatggtgccccttccccagaggacggggcctccccctcgtctcccccgctgcccccacccccgccccctagttggcgggagttctgtgagtcccacgcccgggctgcggctctggactttgcccgccgttttcgcctctacctggcctcccacccccaatatgcggggcccggggccgaggctgccttctcccgccgttttgctgagctcttcctgcagcactttgaagccgaggtggcccgggcctctggctccctgtcgccacccatcctggctcccctgagccctggtgcggagatttcgccacatgacctgtcccttgagagctgcagggtgggtgggcccctggctgtgctgggcccttctcgatcatctgaggacctggccggccccctcccttcctcagtctcttcctcctctacaacctcctccaagccgaagctcaagaagcgcttttccctgcgttcagtgggtcgctctgtccgaggctcagtccgtggcatcctgcagtggcgggggaccgttgaccctccctcctccgctgggcccctggagacctcgtcaggccccccagtcttaggtggaaacagcaactccaactcctctggcggggctgggaccgttggtaggggactggtcagtgatggaacgtcccctggggaaagatggactcaccgttttgagaggctgagactcagtcggggagggggcgccttgaaggatggagcagggatggtgcagagggaagagctgctgagtttcatgggggctgaggaggcagcccctgacccagccggagtgggccggggaggaggggtggctgggcctccttcagggggaggagggcagcctcagtggcagaagtgtcgcctgctgcttcgaagtgaaggagaaggaggaggaggaagtcgcctggagttctttgtaccacccaaggcctctcggccccgactcagcatcccctgctcttctatcacagacgtccggacaaccacagccctggagatgcctgaccgggagaacacgtttgtggttaaggtggaaggtccatccgagtatatcatggagacagtggatgcccagcatgtgaaggcctgggtgtctgacatccaagaatgcctgagcccaggaccctgccctgctaccagtccccgccccatgaccctccctctggcccctgggacctcattccttacaagggagaacacagacagcctggagctgtcctgcctgaatcactcggagagtctacccagccaggacctgctgcttggacccagcgagagcaatgaccgcctgtcgcagggggcatatgggggcctctcagaccgcccctcggcatccatctcccccagctctgcctccattgccgcctcccattttgactcgatggaactgcttcccccagagttgcccccccgcatccccattgaagagggacccccaacagggacagttcatcccctctcagccccctaccctcccttggacactccggaaacagccacagggtccttcctgttccagggggagccagagggcggtgagggggaccagcccctctcagggtatccttggttccacgggatgctctctcggctcaaggctgcacagttggtgctgactggcggcactggctcccacggtgtcttcctggtgcgccagagtgagacaaggcggggtgaatacgtcctcaccttcaacttccagggcaaggccaagcacctgcgtttgtcgctgaacgaggagggtcagtgccgggtccagcacctgtggttccagtccattttcgatatgctcgagcacttccgggtgcaccccatccctttggagtcgggaggctccagtgatgttgtccttgtcagctatgtcccatcctcccagcgacagcaggaaccgaccacctcccatgacccaccccagccccctgaacccccttcatggacagatcccccacagcctggggcagaagaggcgtcgagggcgccagaagtggcggcagcagcagccgcagcagccaaagagaggcaagagaaagagaaagcgggcggtggaggggtcccggaagagctggtccccgtggttgagctggtccccgtggttgaattggaagaggccatagccccaggctcagaggcccagggcgctgggtctggtggggacgcgggggtgcccccaatggtgcagctgcagcagtcaccactagggggtgatggagaggaagggggccaccccagggccattaacaaccagtactccttcgtgtgagccaaccccacccgctccaccctttttaaaccccccagccctgctcgtgagattgggctgggtagggacagaggaggccgaaatccctcccccatgcttcctgacccttgttggccaagggcatctttgatggtacaagcagaggctcgggagaggctcccgtcacacactacaggtcccctccccagggcaggggatttgggctccatgagctccttgaggggctcttctggtcagccccaccctgggggccatttccccattaactacccccagcccgaggcagggtgagggggaagggctgtcagttacattaaggtggttgttgttgttgttttaaacaaaatggagaagcataaataaataaaaaggtttatctcggttctatcgtg

SEQ ID NO: 180977 - DNA, 965 bp, Homo sapiens
  Payload ID: 15640
  Gene Symbol: SH2B2
  Gene Name: SH2B adaptor protein 2
  ENST ID: ENST00000444095
  CDS Start-End: 237-965
ttggagcgcgcggagctcggctgccagagagccgcgcgggggacgcgccgggaccgcgaggagcgcaggagccttcgaggcggtgaacgagggagggagcccagtccgccgcgggccatgagccaccgggcccggggagcccggccgcggtccgggcagcgctcagccggcgccccagcccgctcggccgcagctgcgcgcctgtagccgcaggtggctgcgatgggacggaagccatgaatggtgccggccctggccccgccgcagccgccccggtcccagtcccggtcccggtcccggactggcggcagttctgcgagctgcatgcgcaggcggccgccgtggactttgcgcacaagttctgccgtttcctgcgggacaacccagcttacgacacgcccgacgccggcgcctccttctcccgccacttcgccgccaacttcctggacgtcttcggcgaggaggtgcgccgcgtgctggtggctgggccgacgactcggggcgcggccgtgagcgcagaggccatggagccggagctcgcggacacctctgcactcaaggcggcgccctacggccactcgcggagctcggaggacgtgtccacgcacgcggccaccaaggcccgcgttcgcaagggcttctcgctgcgcaacatgagcctgtgcgtggtggacggcgtgcgcgacatgtggcaccggcgcgcctcgcccgagcccgacgcggcagctgccccgcgcaccgccgagccccgcgacaagtggacgcggcgcctgaggctgtcgcggacgctggctgccaaggtggagctggtggacattcaacgcgagggggcgctgcgcttcatggtggccgacgacgcggccgcgggctccgggggctcggctcagtggcagaagtgccgcctgctcctgcgcagggctgtggccgaggaacgcttccgcctggagttcttcgtgccgcccaaa

SEQ ID NO: 180978 - DNA, 2113 bp, Homo sapiens
  Payload ID: 15640
  Gene Symbol: SH2B2
  Gene Name: SH2B adaptor protein 2
  ENST ID: ENST00000536178
  CDS Start-End: 5-2032
ggggatggatccaagctattgtcctgcccatggcttcccatctcaggaccctctctggccgctatcatcccagcagtggagttcagcccactactctgaaccagccgcaggtggctgcgatgggacggaagccatgaatggtgccggccctggccccgccgcagccgccccggtcccagtcccggtcccggtcccggactggcggcagttctgcgagctgcatgcgcaggcggccgccgtggactttgcgcacaagttctgccgtttcctgcgggacaacccagcttacgacacgcccgacgccggcgcctccttctcccgccacttcgccgccaacttcctggacgtcttcggcgaggaggtgcgccgcgtgctggtggctgggccgacgactcggggcgcggccgtgagcgcagaggccatggagccggagctcgcggacacctctgcactcaaggcggcgccctacggccactcgcggagctcggaggacgtgtccacgcacgcggccaccaaggcccgcgttcgcaagggcttctcgctgcgcaacatgagcctgtgcgtggtggacggcgtgcgcgacatgtggcaccggcgcgcctcgcccgagcccgacgcggcagctgccccgcgcaccgccgagccccgcgacaagtggacgcggcgcctgaggctgtcgcggacgctggctgccaaggtggagctggtggacattcaacgcgagggggcgctgcgcttcatggtggccgacgacgcggccgcgggctccgggggctcggctcagtggcagaagtgccgcctgctcctgcgcagggctgtggccgaggaacgcttccgcctggagttcttcgtgccgcccaaagcctccaggcccaaggtcagcatcccactgtcagccatcattgaggtccgcaccaccatgcccctggaaatgccagagaaggataacacattcgtcctcaaggtagagaatggagccgaatacatcttggagaccatcgactctctgcagaagcactcgtgggtagctgacatccagggctgcgtggaccccggtgacagtgaggaagacaccgagctctcctgtacccgaggaggctgtctggccagccgcgtggcctcctgcagctgtgagctcctgactgatgcagtcgacctgccccgccccccagagacgacagccgtgggtgcagtggtgacagccccccacagccgaggtcgagatgccgtcagagaatccctgatccacgtcccgctagagacctttctgcagaccctggaatccccgggcggcagcggcagtgacagcaataacacaggggaacagggtgcagagacggatcccgaggctgaacccgagctggagctatccgactacccatggttccacgggacactgtcccgggtcaaggctgctcaactggttctggcaggggggccccggaaccacggcctcttcgtgatccgccaaagtgagactcggcctggggagtacgtgctgaccttcaacttccagggcaaggccaagcacctgcgcctgtccctgaacggccacggccagtgtcacgtacagcatctgtggttccagtctgtgcttgacatgctccgccacttccacacacaccccatcccactggagtcagggggctcggccgacatcacccttcgcagctatgtgcgggcccaggaccccccaccagagccgggccccacgccccctgccgcgcccgcgtccccggcctgctggagcgactcgcccggccagcactacttctccagcctcgccgcggccgcctgcccgcctgcctcgccctccgacgccgccggcgcctcctcgtcttccgcctcgtcgtcctctgccgcgtcggggcccgcccccccgcgccccgtcgagggccagctcagcgcgcggagccgcagcaacagcgccgagcgcctgctggaggccgtggccgccaccgccgccgaggagcccccggaggccgcgcccggccgcgcgcgcgccgtggagaaccagtactccttctactagcccgcggcgccgcccgggtgggacacgccaagctcttcagtgaagacacgatgttattaaaagcctgttttagggactgca

SEQ ID NO: 180979 - DNA, 490 bp, Homo sapiens
  Payload ID: 15640
  Gene Symbol: SH2B2
  Gene Name: SH2B adaptor protein 2
  ENST ID: ENST00000617975
  CDS Start-End: 69-212
catcagttcctccttgtgggtccgaggcgctctgccgccggcccctcctcacttcttcctccctggggatggatccaagctattgtcctgcccatggcttcccatctcaggaccctctctggccgctatcatcccagcagtggagttcagcccactactctgaaccaggcctccaggcccaaggtcagcatcccactgtcagccatcattgaggtccgcaccaccatgcccctggaaatgccagagaaggataacacattcgtcctcaaggtagagaatggagccgaatacatcttggagaccatcgactctctgcagaagcactcgtgggtagctgacatccagggctgcgtggaccccggtgacagtgaggaagacaccgagctctcctgtacccgaggaggctgtctggccagccgcgtggcctcctgcagctgtgagctcctgactgatgcagtcgacctgccccgccccccagagacgacagccg

SEQ ID NO: 180980 - DNA, 5406 bp, Homo sapiens
  Payload ID: 15641
  Gene Symbol: SH2B3
  Gene Name: SH2B adaptor protein 3
  Uniprot ID: Q9UQQ2
  ENST ID: ENST00000341259
  CDS Start-End: 358-2085
cccgggccaccgcctccgcccggctgcccgcccggactgtcgcggcccgcggtggcgacggcggccgctgcaaagtttccccggcggcggcggcccgggggcgcatcctcccgcaactgtcaagcgctggcggcggaaatgatgaggcgctggccattttccgagcccgggtttcctgcctgagccccgctcgagcgagccgcgagcgaggagccggcgggcgggagaggacgcgcccagggcgggggcccgcccgccccctcgggatttcgagggcccgggggcgcgcgacgccatgggccggccgggcccagagctcctgtctctcagcccggccgcaccacctgggtctccgccatgaacgggcctgccctgcagccctcctcgccctcttccgcgccctcagcctccccggcggcggccccgcggggctggagcgagttctgtgagttgcacgccgtagcggcggcccgggagctggcccgccagtactggctgttcgcccgggagcatccgcagcacgcgccgctgcgcgccgagctggtgtcgctgcagttcaccgacctcttccagcgctacttctgccgcgaggtgcgcgacggacgggcgccgggccgcgactaccgggacacaggccgtgggcccccagccaaggccgaggcgtccccggagccaggccccggccccgccgcccctggcctgcccaaggcccgcagctctgaggagctggccccgccgcggccgcccgggccctgctccttccagcactttcgccgcagcctccgccacatcttccgccgccgctcggccggggagctgccagcggcccacaccgctgccgcccccgggacccccggagaggctgctgagacccccgcccggcctggcctggccaagaagttcctgccctggagcctggcccgggagccgccacccgaggcgctgaaggaggcggtgctgcgctacagcctggccgacgaggcctccatggacagcggggcacgctggcagcgcgggaggctggcgctgcgccgggccccgggccccgatggccccgaccgcgtgctggagctcttcgacccacccaagagttcaaggcccaagctacaagcagcttgctccagcatccaggaggtccggtggtgcacacggcttgagatgcctgacaacctttacacctttgtgctgaaggtgaaggaccggacagacatcatctttgaggtgggagacgagcagcagctgaattcatggatggctgagctctcggagtgcacaggccgagggctggagagcacagaagcagagatgcatattccctcagccctagagcctagcacgtccagctccccaaggggcagcacagattcccttaaccaaggtgcttctcctggggggctgctggacccggcctgccagaagacggaccatttcctgtcctgctacccctggttccacggccccatctccagagtgaaagcagctcagctggttcagctgcagggccctgatgctcatggagtgttcctggtgcggcagagcgagacgcggcgtggggaatacgtgctcactttcaactttcaggggatagccaagcacctgcgcctgtcgctgacagagcggggccagtgccgtgtgcagcacctccactttccctcggtcgtggacatgctccaccacttccagcgctcgcccatcccactcgagtgcggcgccgcctgtgatgtccggctctccagctacgtggtagtcgtctcccaaccaccaggttcctgcaacacggtcctcttccctttctcccttcctcactgggattcagagtcccttcctcactggggttcagagttgggccttccccaccttagttcttctggctgtccccgggggctcagcccagagggtctcccagggcgatcctcaccccccgagcagatcttccacctggtgccttcgcccgaagaactggccaacagcctgcagcacctggagcatgagcctgtgaatcgagcccgggactcggactacgaaatggactcatcctcccggagccacctgcgggccatagacaatcagtacacacctctctgaccagtgaggaattccaggcctcaacagctgcccttgaggagcacaggcagaagtgtgaacttgtgaatgtaattgatctttccttccttccagagaaagatttaagggacactgttaactgctcgtgccagtttggaagtgacccttctattaggcctgttgaagggccctcctgtaggtttcatctatccacctggctttctccttattgtttacagatgtagttcttgttagaggatgccgctagctcctgcccggggtccctatgcccagtccccgttactcttagagaaaggagttggggtgagggccagagctggcagtggaaacttgttctctttttcactgacactgtcacagcggatgacagactttctacggggaggagggggggatcatcaggaagcccagaacactaacaagcggttctcccatctaccgtcagtccacatggcaggtctgctgtgtccacaccacagatgaccacatctaatcctgcttctactctcagctttaggacaaaagctctgtcagaggcacaagctgaaggtcaaaaatgatttaaaacattttacctcagactaatttctttaaaggattcaggttcaaaacttaaccactgcttatttcagtgcactgtttcaactaacacccatgctatttttgtagtcagaaacagctatgcaaaccctacctaatttacagtctgagccagcatgctggcttgtctactgcatcctcgggacagtcacctgccactgagtggccactgtccttcctaaatgtcaagaagtgaagtatgtcaccctttcagggaaattcaggcaattactgaaataggagggtggcaagaacagttctatcctggtgccttacgaataaaaaactggattctggtttacagcagctttacagtgatagttaaattaactggggctaggggaagagcaagcaaaaagggaagaaggactcctaggccctttctagtaaatccttcagcaacaaggctggcttggtgccctccaagcatctaatggcttattaaattatcccacaagtgggttttaggctccttttttgagccaaaatggaagctgggaatctggtgccataactaatgagaaactcctttaatagcccacaatcagtgttctgttctagctggctactgcttcactggattgagaatctatctatctccttgcacacatgggcacacacaatctccaccatccagggaggtcctgaagtcaaatctctatctatacaagtgatacaattcatagggggctggctcctcccagaacctgtctggaggctcagaaacgggggcagtgacagtggagtcagctgctcttgggtgccagcagagccattcagtacaacccccaggctcacagcagtggcttctaggaaactgggagtttagatcagctttacagatacatcgatcagaggctaaaatgaaacctcagcctaaaactcataggactgactgcctgggaggagggttaggtctgcttcttccacttatacttagtctctgtgctccaagaggtcaaatttttgcttctagaatttccttggggtctttcagagggtgggggaacaaacccctatgcacttttcttttttttttttttgagatggagtttctcttgtcaaccgggctggagtgcagtggtgcaatcttggctcactgcaacctccaccttcctggttcaagcgattctgcctcgacctctcaagtagctgggattacaagcaccagccaccatgcctggctaattttgtatttttagtagagacagggtttcaccatgttggccaggctggtctcgaatgtctgacctcaggtgatccacccgccttggcctcccaaagtgctgggattacaggcgcgagccaccgcgcccagcctacaccacttttagtaccaacactcttgggtgatttcatggaccctaaagcagacctgacactgatccagatttgcagtccatttttaaggacacctgtctttatttcctcaaagtcaagcagctttctctggaaaatgaatgctaattagtgtgaaccaaaagagtaagtaagagtctgaagtttttttaaaggagaaagcttattatggaaagtcactggtcctcccctccgcacaggaaaggtacccagtagataatgaaccaaattaagttccctccctccagccagaagttaaacatctgggatatgacgtcttcatgccaggggcactcatttcttagcagcctctctacatacatctctcaggtggtgccaagaggcacaccaggtagagcaaacttagcagctctgactaacaggctgcaaagtgcaagttcagattctgtggcagagatttggaaggcacccacctccagactgcttcccgtccaagttaccaggacagctcaaaaacatgctgacagaaaactcccatggctctaggaagaagtgacactaagccaacacctttctttatgtgggagcagaatcagctgatgaaggggtgggcagcagtgtggggcaggcaccccactggctgcagctagcccaccataggcacagcacatcccaccactctccttccagtcctgaccaggccccagccggcaacttctaccgagagccatggctcaacaccaaactggacagtagacatcatgatccctccagttagctctaattacagaccccaccagtacagcttgacagctcccggcaccatcccttccttcatctgacttattgaacttttacaaactaacagtcaccagcaccaaagaattaagtcaactaacctgccttgaattttagaccagcaatccatatggctttatctggtataaatcttctgcctttgatcatttctggaccgtaggaaaaaggaatagcaatcattaaaatcttgggccagagaacactatttttacataacagtttcttaacctaaagtcaaggccttggactcttccctgagggttgcctgagattccttcatgctttctattcaggactaagtcccttactgcaaatgtgttagctctaacatctcccacaagctagaggaacttgcgagtatattaacaaggacacatctgacatcctgtgtttggttagaatatacagcacattgtgataacataaagtggattcatcttgtatcattataggcagaaggtatttggcaaatttttatgtattgttttatgtactgtacaagtaacttattcttgaataatgcaaattttgctataatgtacaaattgctatatgtgaattaaaaagttttcagaatcttga

SEQ ID NO: 180981 - DNA, 2062 bp, Homo sapiens
  Payload ID: 15641
  Gene Symbol: SH2B3
  Gene Name: SH2B adaptor protein 3
  ENST ID: ENST00000538307
  CDS Start-End: 41-1162
atagtaatgagagtccgtgccgggtggagctcagaaggacatgggattcccggtgctgtgccgtggctggaggaggacctggcctggctgtgccagttggctgggagcccctccaccccagaagcccttgctctcacctcttcttctgaatcatcgttcttcgaagagttcaaggcccaagctacaagcagcttgctccagcatccaggaggtccggtggtgcacacggcttgagatgcctgacaacctttacacctttgtgctgaaggtgaaggaccggacagacatcatctttgaggtgggagacgagcagcagctgaattcatggatggctgagctctcggagtgcacaggccgagggctggagagcacagaagcagagatgcatattccctcagccctagagcctagcacgtccagctccccaaggggcagcacagattcccttaaccaaggtgcttctcctggggggctgctggacccggcctgccagaagacggaccatttcctgtcctgctacccctggttccacggccccatctccagagtgaaagcagctcagctggttcagctgcagggccctgatgctcatggagtgttcctggtgcggcagagcgagacgcggcgtggggaatacgtgctcactttcaactttcaggggatagccaagcacctgcgcctgtcgctgacagagcggggccagtgccgtgtgcagcacctccactttccctcggtcgtggacatgctccaccacttccagcgctcgcccatcccactcgagtgcggcgccgcctgtgatgtccggctctccagctacgtggtagtcgtctcccaaccaccaggttcctgcaacacggtcctcttccctttctcccttcctcactgggattcagagtcccttcctcactggggttcagagttgggccttccccaccttagttcttctggctgtccccgggggctcagcccagagggtctcccagggcgatcctcaccccccgagcagatcttccacctggtgccttcgcccgaagaactggccaacagcctgcagcacctggagcatgagcctgtgaatcgagcccgggactcggactacgaaatggactcatcctcccggagccacctgcgggccatagacaatcagtacacacctctctgaccagtgaggaattccaggcctcaacagctgcccttgaggagcacaggcagaagtgtgaacttgtgaatgtaattgatctttccttccttccagagaaagatttaagggacactgttaactgctcgtgccagtttggaagtgacccttctattaggcctgttgaagggccctcctgtaggtttcatctatccacctggctttctccttattgtttacagatgtagttcttgttagaggatgccgctagctcctgcccggggtccctatgcccagtccccgttactcttagagaaaggagttggggtgagggccagagctggcagtggaaacttgttctctttttcactgacactgtcacagcggatgacagactttctacggggaggagggggggatcatcaggaagcccagaacactaacaagcggttctcccatctaccgtcagtccacatggcaggtctgctgtgtccacaccacagatgaccacatctaatcctgcttctactctcagctttaggacaaaagctctgtcagaggcacaagctgaaggtcaaaaatgatttaaaacattttacctcagactaatttctttaaaggattcaggttcaaaacttaaccactgcttatttcagtgcactgtttcaactaacacccatgctatttttgtagtcagaaacagctatgcaaaccctacctaatttacagtctgagccagcatgctggcttgtctactgcatcctcgggacagtcacctgccactgagtggccactgtccttcctaaatgtcaagaagtgaagtatgtcaccctttcagggaaattcaggcaattactgaaataggagggtggcaagaacagttctatcctggtgccttacgaataaaaaactggattctggttt

SEQ ID NO: 180982 - DNA, 648 bp, Homo sapiens
  Payload ID: 15641
  Gene Symbol: SH2B3
  Gene Name: SH2B adaptor protein 3
  ENST ID: ENST00000550925
  CDS Start-End: 1-648
gcagttcaccgacctcttccagcgctacttctgccgcgaggtgcgcgacggacgggcgccgggccgcgactaccgggacacaggccgtgggcccccagccaaggccgaggcgtccccggagccaggccccggccccgccgcccctggcctgcccaaggcccgcagctctgaggagctggccccgccgcggccgcccgggccctgctccttccagcactttcgccgcagcctccgccacatcttccgccgccgctcggccggggagctgccagcggcccacaccgctgccgcccccgggacccccggagaggctgctgagacccccgcccggcctggcctggccaagaagttcctgccctggagcctggcccgggagccgccacccgaggcgctgaaggaggcggtgctgcgctacagcctggccgacgaggcctccatggacagcggggcacgctggcagcgcgggaggctggcgctgcgccgggccccgggccccgatggccccgaccgcgtgctggagctcttcgacccacccaagtggccagagcctgagctgtccaggctgaggtttcgactgaagcaggggttgtcctgcgcccatgtgcccacacgctgcaacctggctggagcctctggcataggacaccc

SEQ ID NO: 180983 - DNA, 3227 bp, Homo sapiens
  Payload ID: 15642
  Gene Symbol: STAC
  Gene Name: SH3 and cysteine rich domain
  Uniprot ID: Q99469
  ENST ID: ENST00000273183
  CDS Start-End: 301-1509
agaagcccgctcgcccgctgccgagtggcagtcacgactgtgaggtcgccggcgaggtggccgcgggcgcggcggggcggggcagggcgcactctcctccacgcccgcggaagtgccggggaggtgggcagggcggggagggagagggagcgaggctggaggagggcacgtcggcgcctcggcgaggatgggagtccccaggacccggagctgagcagcctggcgcgcggcgggcagggcgcgcaggacagaagcctcgctgttcctccgggagcccaacaccgttcccgcgcggccacgatgatccctccgagcagcccccgcgaggacggcgtggacgggctgcccaaggaggcggtgggcgccgagcaaccgccctctcctgcatccaccagcagccaggaatccaagctccagaaactaaaacgatcactttctttcaagaccaagagtttacggagcaaaagtgctgacaacttcttccagcgaaccaacagcgaagacatgaaactgcaagcacacatggtggctgagatcagccccagctccagcccactccctgctccaggaagcctgacgtccacacccgccagggctggtctgcatccaggtggcaaggctcatgcctttcaggaatacatcttcaagaagcccactttctgtgatgtctgcaaccacatgatagtgggaacaaatgctaagcatggactgcgctgcaaagcctgtaagatgagcatccaccacaagtgcacagatggcctggcaccccagcggtgcatgggcaagctgccaaaggggtttcggcgttactacagctcccccttgctcattcatgaacagtttggctgcattaaagaagttatgcccattgcctgtggcaataaggtggaccctgtctacgagaccctccgcttcggcacctccctggcccagaggacaaagaagggcagctccggcagtggctctgactcacctcacagaacctctacttcagatcttgtggaggttcctgaggaagccaatgggccaggaggcgggtatgacctaaggaaacgcagcaacagcgtgtttacatatccagaaaatggcactgatgatttcagagatccagcgaagaacataaaccaccagggatctctttccaaagacccattacagatgaacacctatgttgccttgtacaaatttgtaccacaggagaatgaagatttggaaatgaggccaggagacataattactcttttagaggattccaatgaagactggtggaaagggaaaattcaagacagaattggcttctttccagccaactttgttcagagactacaacaaaatgagaagatttttagatgtgttagaaccttcattgggtgtaaggaacaggggcagataacactgaaagagaatcagatctgcgtgagttctgaagaagaacaagatggttttatcagagtcctcagtggaaaaaagaaaggcctcatcccccttgatgtactagaaaacatctgattgctggctcctcctccgtttgcagtaggcaagctctgctgcgatgcctctgcctcatctcacactgcgtcaacccaaaggagctgccgcactgacccagccccccaggaaacagtgagacaagaatcaagtatctgagactgtggagtaatagccacaaaacagagggcccactgcacagcatatccaggctgccacaggtggggacgaggctgagagagtcagcaggcagagccagatgccatgcttggcagcagcagtaggactataaaccacagctgtcccccaggatcccactcctttcctgtctgtgtggtgtaagttaacacactggagtgtgctccagtttgcagggtagcccagtgcaaggttcagatccatgtagctaagtattatcctgcttccagacctatgtcaccagtaccaatcagtcagtgtcatcacatttcaggccccaagcaatctctgtgcaaagcatcagaaagacctgcttcccagcccccagcattccagtgctctccaggcttcctctctttgtgattgtgctgtccagagtgtccagcttgttctttctttctcttcagtcctctgagtacatctggtggtgtgcattagatgtgagggctatgttgacatggcatcacctccaaagacctgacctgcctaaagactgatgacaggccatccttcctgctgttctaggtactggcctgggtgacagagcaggacatgagacatagatacagtggggaggagaagtggggaaaggtggagcagagagttcttacttattgaagattatacagccctttcggttatgaagtccctgcttgaaggcaatggacctggggaagagactatcacaaaaagtctccattttcattttacatcctctctattggaggcagcacttttccctcatgctgtcctataggactccactttgaaggttgtgcctacgttgcagggaactaggaacatggaggggaaccaacaacagcatcttagaagaaatgtagccaaattggagtccattcttctttagggcagtatatgaaatcctagcagatgtaaaatggaaaagaatcctaatgcttcttccttcagaaagtagaggaactaggggcccaattagcatcatctaggggaatctctattactctgtacttatactaatgtttacaagaatgcaatatactgtgatgccttcctactcaagcctcctagcattcaaacttccatcctattagtcattaacatggttaaacttcaattcacaatcaccttggaatcaatgtcagtttgatttattttgttacagagcaataaaatcattagaacaatggtttttaaaagacttaagtggatgcatcctatgcatgtaagcattatttcccaaaccaaagcatcattcatctccatttatttcttttgttcccgctcagtgtgaagttgggaactgagaggggatggctgctggtttcacagaagtttggatgccttactcttatcttaaagccagcatccagaatttcctccctctctgatgccacatgcaaaaccaggtgtacgatgtcaagatggattctttgagagccagggtagatcatatgactgcctttctgtaaaattggatgcctagtacaaatgctctttgcctctaattcagtattccatttaataaaaacaatacagtggctggaaaggagcatcagaaa

SEQ ID NO: 180984 - DNA, 1366 bp, Homo sapiens
  Payload ID: 15642
  Gene Symbol: STAC
  Gene Name: SH3 and cysteine rich domain
  ENST ID: ENST00000457375
  CDS Start-End: 142-1167
aggagggcacgtcggcgcctcggcgaggatgggagtccccaggacccggagctgagcagcctggcgcgcggcgggcagggcgcgcaggacagaagcctcgctgttcctccgggagcccaacaccgttcccgcgcggccacgatgatccctccgagcagcccccgcgaggacggcgtggacgggctgcccaaggaggcggtgggcgccgagcaaccgccctctcctgcatccaccagcagccaggaatccaagctccagaaactaaaacgatcactttctttcaagaccaagagtttacggagcaaaagtgctgacaacttcttccagcgaaccaacagcgaagacatgaaactgcaagcacacatggtggctgagatcagccccagctccagcccactccctgctccaggaagcctgacgtccacacccgccagggctggtctgcatccaggtggcaaggctcatgcctttcaggaatacatcttcaagaagcccactttctgtgatgtctgcaaccacatgatagtggcctgtggcaataaggtggaccctgtctacgagaccctccgcttcggcacctccctggcccagaggacaaagaagggcagctccggcagtggctctgactcacctcacagaacctctacttcagatcttgtggaggttcctgaggaagccaatgggccaggaggcgggtatgacctaaggaaacgcagcaacagcgtgtttacatatccagaaaatggcactgatgatttcagagatccagcgaagaacataaaccaccagggatctctttccaaagacccattacagatgaacacctatgttgccttgtacaaatttgtaccacaggagaatgaagatttggaaatgaggccaggagacataattactcttttagaggattccaatgaagactggtggaaagggaaaattcaagacagaattggcttctttccagccaactttgttcagagactacaacaaaatgagaagatttttagatgtgttagaaccttcattgggtgtaaggaacaggggcagataacactgaaagagaatcagatctgcgtgagttctgaagaagaacaagatggttttatcagagtcctcagtggaaaaaagaaaggcctcatcccccttgatgtactagaaaacatctgattgctggctcctcctccgtttgcagtaggcaagctctgctgcgatgcctctgcctcatctcacactgcgtcaacccaaaggagctgccgcactgacccagccccccaggaaacagtgagacaagaatcaagtatctgagactgtggagtaatagccacaaaacagagggcccactgcacagcatatccaggctgccaca

SEQ ID NO: 180985 - DNA, 605 bp, Homo sapiens
  Payload ID: 15642
  Gene Symbol: STAC
  Gene Name: SH3 and cysteine rich domain
  ENST ID: ENST00000427486
  CDS Start-End: 117-272
aggatgggagtccccaggacccggagctgagcagcctggcgcgcggcgggcagggcgcgcaggacagaagcctcgctgttcctccgggagcccaacaccgttcccgcgcggccacgatgatccctccgagcagcccccgcgaggacggcgtggacgggctgcccaaggaggcggtgggcgccgagcaaccgccctctcctgcatccaccagcagccaggaatccaaggaacaaatgctaagcatggactgcgctgcaaagcctgtaagatgagcatccaccacaagtgcacagatggcctggcaccccagcggtgcatgggcaagctgccaaaggggtttcggcgttactacagctcccccttgctcattcatgaacagtttggctgcattaaagaagttatgcccattgcctgtggcaataaggtggaccctgtctacgagaccctccgcttcggcacctccctggcccagaggacaaagaagggcagctccggcagtggctctgactcacctcacagaacctctacttcagatcttgtggaggttcctgaggaagccaatgggccaggaggcgggtatgacctaaggaaacgcagcaacagcg

SEQ ID NO: 180986 - DNA, 827 bp, Homo sapiens
  Payload ID: 15642
  Gene Symbol: STAC
  Gene Name: SH3 and cysteine rich domain
  ENST ID: ENST00000434649
  CDS Start-End: 72-827
gcgggcagggcgcgcaggacagaagcctcgctgttcctccgggagcccaacaccgttcccgcgcggccacgatgatccctccgagcagcccccgcgaggacggcgtggacgggctgcccaaggaggcggtgggcgccgagcaaccgccctctcctgcatccaccagcagccaggaatccaagaccaagagtttacggagcaaaagtgctgacaacttcttccagcgaaccaacagcgaagacatgaaactgcaagcacacatggtggctgagatcagccccagctccagcccactccctgctccaggaagcctgacgtccacacccgccagggctggtctgcatccaggtggcaaggctcatgcctttcaggaatacatcttcaagaagcccactttctgtgatgtctgcaaccacatgatagtggcctgtggcaataaggtggaccctgtctacgagaccctccgcttcggcacctccctggcccagaggacaaagaagggcagctccggcagtggctctgactcacctcacagaacctctacttcagatcttgtggaggttcctgaggaagccaatgggccaggaggcgggtatgacctaaggaaacgcagcaacagcgtgtttacatatccagaaaatggcactgatgatttcagagatccagcgaagaacataaaccaccagggatctctttccaaagacccattacagatgaacacctatgttgccttgtacaaatttgtaccacaggagaatgaagatttggaaatgaggccaggagacataattactcttttagaggattccaatgaagactggtggaaa

SEQ ID NO: 180987 - DNA, 3362 bp, Homo sapiens
  Payload ID: 15643
  Gene Symbol: STAC2
  Gene Name: SH3 and cysteine rich domain 2
  Uniprot ID: Q6ZMT1
  ENST ID: ENST00000333461
  CDS Start-End: 371-1606
atggggggcgggcgcagcggacggcggagccggctggacacggacagctccttggctccctccctcggctcatccccgcggccccacttccctcctccccgcgctgcgagcagcatcctctgcagaccctcggtcctcgcgcccggggtcgtcccgctcctgcggctcagcgtggtggcctcccctcgcccgccaccccggcaactttctctgcccgctcccgcgggttgggggctgccgtgccgggggctaactgggggcagcctctggagaacggcttcagagtcccggagacgcccgccacccgcagcctgcccgcggtgggcctgccgtcggatctcggcaccctctcctcccctctccccgaaccatgaccgagatgagcgagaaggagaacgaaccggatgacgcggccacccacagccccccagggaccgtctccgccctccaggaaaccaagctccagcgattcaagcgctccctctccctcaagaccatcctccgaagtaagagcttggagaacttcttccttcgctcgggctctgagctcaagtgccccaccgaggtgctgctgacgcccccaaccccactgccccctccctccccaccacccacagcctcggacaggggcctggctaccccatccccctccccatgcccagtcccacgccccctggcagcgctcaaaccagtgaggctgcacagcttccaggaacatgtcttcaagcgagctagcccttgtgagctgtgccaccagctcatcgtaggaaactccaaacagggcttgcgatgtaagatgtgcaaagtcagcgtccacctctggtgctctgaggagatctcccaccagcaatgcccaggcaagacgtccacctccttccgccgcaacttcagttcccctctcctggtgcatgagccgccaccagtctgtgccacaagcaaagagtccccacccactggggacagtgggaaggtggaccctgtctacgagaccctgcgctatggcacctccctggcactgatgaaccgctccagtttcagcagcacctctgagtccccgacaaggagcctgagtgagcgggatgagctgaccgaggatggggaaggcagcatccgcagctctgaggaggggcctggtgacagtgcatctccagtattcacagccccagcagagagtgaagggccaggaccagaggagaagagtcctggacagcagctccccaaagccaccctgcggaaggatgtggggcccatgtactcctacgttgcactctacaagtttctgccccaggagaacaatgatctggctctgcagcctggagatcggatcatgctggtggatgactctaacgaggactggtggaagggcaagatcggcgaccgggttggcttcttcccagctaattttgtgcaacgggtgaggccaggcgagaatgtttggcgctgctgccaacccttctccgggaacaaggaacagggttacatgagcctcaaggagaaccagatctgcgtgggcgtgggcagaagcaaggatgctgacggcttcatccgcgtcagcagtggcaagaagcggggcctggtgccagtcgacgccctgactgagatctgagaggagccaagggaacccagatgacacccttgcccatgcctggaccttgcttctggccagggaggggatcaggcccccttgtccactccatacccttcctccctctgtccctctcctaggtgccacttaccgtggcttaggagccttttgtactggggaagattttatttcttgggtggggtgccctgagtgggttgatcctctgggacttggcggggatggggtggggtgggagggaatgaggaagctacaggtaggtccacccaacgcccaggcaccccagtctacttgctgggctgagtccagccctggggaagattcctggggaatttatttgctgcttctcccagccttcccctgcccacaccacctgcgcatgcctggcacacccctctccccacagagcctctgcttgggtctatgtgtgtgtgaccgtgcatctgctcctttgcaagtggggtcttgggagcaggcctttttgtgtcctcggccctccacccttggtggggaggggacccaggaccataggaaggtcctgagtccacctcctggtctccacctctgtcattccgtcaattctcaggaaagttttgcaggaatctctcccgttacttgaaacctgggcggacagatgaggggaaggctgaggtccctggaaggtgtaacaaatcagagactatctgttcaagtagaaaacccaagagctggccaggtgtggtggctcatgcctgtaatcccagcactttgggaggctgaggtgggcagatcacctgaggtcaggagttcaagaccagcctggccaacatggtgaaaccccgtctctactaaaagtacgaaacttagccaggcatgatgggggtctgcctgtaatgccagctactccagaggctgaggcaagagaatcacttgaacccgggaggcggaggtttcagtgagccgagattgcaccattgcaccccagcctgggcaacagagcgagactccgtctcaaaaaaaaaaaaagaaagaaagaaaaggaaacccaagagctgcctggacacacggaaacccaactgagaacaaaatcctggcccgtgcttggtcaaagcaaacccatttcactgtcaggacccccggtcacacaggaaccacccgccaggggagcctgtgactgtcagttcctgtcccaggctttgcccggccgccccaggaacccaaccctctgggctgacctttctcctgcttctctccaggctctgcaggggacagggcaggtgctgcaggagcccctttgctggctttatctgctcccttgttctggacacagagccctgggaaaaagagggggtggaagacagacaaggaaggtggaatgttctgttttggccaccaggaaatggggtggggtgggcatacacagagaggacccctctcttaatacagctgcttttctcggtgccaacctccctcccccaagctcagatcctcctcttatgcccttgattgtgccagcccatgccacccccatcctgggcacagttacaccctcccatgcagtgggagaaacacagaccctcgtacccaaaggcccctgccccacttctcccccacaaagcggggtctcaagccacactgccctgtttgctgccatgaggcccccccccccagcaatatcccaggggcgggcccaatgcccactgtacatgaggctgcatgatgggtctggggccttgctgattccccagacccctaattaaatgtttcttgtcccagccca

SEQ ID NO: 180988 - DNA, 2251 bp, Homo sapiens
  Payload ID: 15643
  Gene Symbol: STAC2
  Gene Name: SH3 and cysteine rich domain 2
  ENST ID: ENST00000584501
  CDS Start-End: 167-613
ctttctctgcccgctcccgcgggttgggggctgccgtgccgggggctaactgggggcagcctctggagaacggcttcagagtcccggagacgcccgccacccgcagcctgcccgcggtgggcctgccgtcggatctcggcaccctctcctcccctctccccgaaccatgaccgagatgagcgagaaggagaacgaaccggatgacgcggccacccacagccccccagggaccgtctccgccctccaggaaaccaagctccagcgattcaagcgctccctctccctcaagaccatcctccgaagtaagagcttggagaacttcttccttcgctcgggctctgagctcaagtgccccaccgaggaaactccaaacagggcttgcgatgtaagatgtgcaaagtcagcgtccacctctggtgctctgaggagatctcccaccagcaatgcccaggcaagacgtccacctccttccgccgcaacttcagttcccctctcctggtgcatgagccgccaccagtctgtgccacaagcaaagagtccccacccactggggacagtgggaaggtggaccctgtctacgagaccctgcgctatggcacctccctggcactgatgaaccgctccagtttcagcagcacctctgagtccccgacaaggagcctgagtgagcgggatgagctgaccgaggatggggaaggcagcatccgcagctctgaggaggggcctggtgacagtgcatctccagtattcacagccccagcagagagtgaagggccaggaccagaggagaagagtcctggacagcagctccccaaagccaccctgcggaaggatgtggggcccatgtactcctacgttgcactctacaagtttctgccccaggagaacaatgatctggctctgcagcctggagatcggatcatgctggtggatgactctaacgaggactggtggaagggcaagatcggcgaccgggttggcttcttcccagctaattttgtgcaacgggtgaggccaggcgagaatgtttggcgctgctgccaacccttctccgggaacaaggaacagggttacatgagcctcaaggagaaccagatctgcgtgggcgtgggcagaagcaaggatgctgacggcttcatccgcgtcagcagtggcaagaagcggggcctggtgccagtcgacgccctgactgagatctgagaggagccaagggaacccagatgacacccttgcccatgcctggaccttgcttctggccagggaggggatcaggcccccttgtccactccatacccttcctccctctgtccctctcctaggtgccacttaccgtggcttaggagccttttgtactggggaagattttatttcttgggtggggtgccctgagtgggttgatcctctgggacttggcggggatggggtggggtgggagggaatgaggaagctacaggtaggtccacccaacgcccaggcaccccagtctacttgctgggctgagtccagccctggggaagattcctggggaatttatttgctgcttctcccagccttcccctgcccacaccacctgcgcatgcctggcacacccctctccccacagagcctctgcttgggtctatgtgtgtgtgaccgtgcatctgctcctttgcaagtggggtcttgggagcaggcctttttgtgtcctcggccctccacccttggtggggaggggacccaggaccataggaaggtcctgagtccacctcctggtctccacctctgtcattccgtcaattctcaggaaagttttgcaggaatctctcccgttacttgaaacctgggcggacagatgaggggaaggctgaggtccctggaaggtgtaacaaatcagagactatctgttcaagtagaaaacccaagagctggccaggtgtggtggctcatgcctgtaatcccagcactttgggaggctgaggtgggcagatcacctgaggtcaggagttcaagaccagcctggccaacatggtgaaaccccgtctctactaaaagtacgaaacttagccaggcatgatgggggtctgcctgtaatgccagctactccagaggctgaggcaagagaatcacttgaacccgggaggcggaggtttcagtgagccgagattgcaccattgcaccccagcctgggcaacagagcgagactccgtctcaaaaaaaaaaaaagaaagaaagaaaaggaaacccaagagctgcctggacacacggaaaccca

SEQ ID NO: 180989 - DNA, 1656 bp, Homo sapiens
  Payload ID: 15644
  Gene Symbol: STAC3
  Gene Name: SH3 and cysteine rich domain 3
  Uniprot ID: Q96MF2
  ENST ID: ENST00000332782
  CDS Start-End: 203-1297
ccctgtcatttcagccctgacaccaaggcaggaggctaggaggtctacaaatagcgactgggtagctggtgtgaacacagggggtactgggggggcttagcccccaaggaagaggaccagtttttccccagcaccaccatcaaggcctcgaggctcccagctccctctacagcctgtggactgacttagggaatcccgaacgatgacagaaaaggaggtgctggagtcccctaagccctccttcccagcagagactcggcaaagtgggctacagcggctaaagcagttactcaggaagggttctacagggacaaaggagatggaacttcccccagagccccaggccaatggggaggcagtgggagctgggggtgggcccatctactacatctatgaggaagaggaagaggaagaagaggaggaggaggagccacccccagaacctcctaagctggtcaacgataagccccacaaattcaaagatcacttcttcaagaagccaaagttctgtgatgtctgtgcccggatgattgttctcaacaacaagtttgggcttcgctgtaagaactgcaaaaccaacatccatgaacactgtcagtcctatgtggaaatgcagagatgcttcggcaagatcccacctggtttccatcgggcctatagttccccactctacagcaaccagcagtacgcttgtgtcaaagatctctctgctgccaatcgcaatgatcctgtgtttgaaaccctgcgcactggggtgatcatggcaaacaaggaacggaagaagggacaggcagataagaaaaatcctgtagcagccatgatggaggaggagccagagtcggccagaccagaggaaggcaaaccccaggatggaaaccctgaaggggataagaaggctgagaagaagacacctgatgacaagcacaagcagcctggcttccagcagtctcattactttgtggctctctatcggttcaaagccctggagaaggacgatctggatttcccgccaggagagaagatcacagtcattgatgactccaatgaagaatggtggcgggggaaaatcggggagaaggtcggatttttccctccaaacttcatcattcgggtccgggctggagaacgtgtgcaccgcgtgacgagatccttcgtggggaaccgcgagatagggcagatcactctcaagaaggaccagatcgtggtgcagaaaggagacgaagcgggcggctacgtcaaggtctacaccggccgcaaggtggggctgtttcccaccgactttctagaggaaatttaggcgtgcgggcgcctgcaagcgggagacacccacaccccattctgggcgggcccagtggagtttggggaggggggcgaaagcaacgggactgctgggagaggaggggtaggaaggcccgcctgagcgcgacggggcttccgggaagggactggttctcgcccccttccccagcctggggcctcggatacctgctgcccagagcagcccggacccgaaacctttcaggccccgcttgcaagagctggaaaaaaacgcgtatctactaggaggagccagggactggggcggggggcgggggcgagggagggcgaactgtcgaatgttgcgaatttattaaacttttgacaaaacttagaaaa

SEQ ID NO: 180990 - DNA, 1014 bp, Homo sapiens
  Payload ID: 15644
  Gene Symbol: STAC3
  Gene Name: SH3 and cysteine rich domain 3
  Uniprot ID: Q96MF2
  ENST ID: ENST00000546246
  CDS Start-End: 320-856
tttcagccctgacaccaaggcaggaggctaggaggtctacaaatagcgactgggtagctggtgtgaacacagggggtactgggggggcttagcccccaaggaagaggaccagtttttccccagcaccaccatcaaggcctcgaggctcccagctccctctacagcctgtggactgacttagggaatcccgaacccacctggtttccatcgggcctatagttccccactctacagcaaccagcagtacgcttgtgtcaaagatctctctgctgccaatcgcaatgatcctgtgtttgaaaccctgcgcactggggtgatcatggcaaacaaggaacggaagaagggacaggcagataagaaaaatcctgtagcagccatgatggaggaggagccagagtcggccagaccagaggaaggcaaaccccaggatggaaaccctgaaggggataagaaggctgagaagaagacacctgatgacaagcacaagcagcctggcttccagcagtctcattactttgtggctctctatcggttcaaagccctggagaaggacgatctggatttcccgccaggagagaagatcacagtcattgatgactccaatgaagaatggtggcgggggaaaatcggggagaaggtcggatttttccctccaaacttcatcattcgggtccgggctggagaacgtgtgcaccgcgtgacgagatccttcgtggggaaccgcgagatagggcagatcactctcaagaaggaccagatcgtggtgcagaaaggagacgaagcgggcggctacgtcaaggtctacaccggccgcaaggtggggctgtttcccaccgactttctagaggaaatttaggcgtgcgggcgcctgcaagcgggagacacccacaccccattctgggcgggcccagtggagtttggggaggggggcgaaagcaacgggactgctgggagaggaggggtaggaaggcccgcctgagcgcgacggggcttccgggaagggactggttctcg

SEQ ID NO: 180991 - DNA, 1143 bp, Homo sapiens
  Payload ID: 15644
  Gene Symbol: STAC3
  Gene Name: SH3 and cysteine rich domain 3
  ENST ID: ENST00000557176
  CDS Start-End: 321-635
atttcagccctgacaccaaggcaggaggctaggaggtctacaaatagcgactgggtagctggtgtgaacacagggggtactgggggggcttagcccccaaggaagaggaccagtttttccccagcaccaccatcaaggcctcgaggctcccagctccctctacagcctgtggactgacttagggaatcccgaacccacctggtttccatcgggcctatagttccccactctacagcaaccagcagtacgcttgtgtcaaagatctctctgctgccaatcgcaatgatcctgtgtttgaaaccctgcgcactggggtgatcatggcaaacaaggaacggaagaagggacaggcagataagaaaaatgaaaccctgaaggggataagaaggctgagaagaagacacctgatgacaagcacaagcagcctggcttccagcagtctcattactttgtggctctctatcggttcaaagccctggagaaggacgatctggatttcccgccaggagagaagatcacagtcattgatgactccaatgaagaatggtggcgggggaaaatcggggagaaggtcggatttttccctccaaacttcatcattcgggtccgggctggagaacgtgtgcaccgcgtgacgagatccttcgtggggaaccgcgagatagggcagatcactctcaagaaggaccagatcgtggtgcagaaaggagacgaagcgggcggctacgtcaaggtctacaccggccgcaaggtggggctgtttcccaccgactttctagaggaaatttaggcgtgcgggcgcctgcaagcgggagacacccacaccccattctgggcgggcccagtggagtttggggaggggggcgaaagcaacgggactgctgggagaggaggggtaggaaggcccgcctgagcgcgacggggcttccgggaagggactggttctcgcccccttccccagcctggggcctcggatacctgctgcccagagcagcccggacccgaaacctttcaggccccgcttgcaagagctggaaaaaaacgcgtatctactaggaggagccagggactggggcggggggcgggggcgagggagggcgaactgtcgaatgttgcgaatttattaaacttttgacaaaactt

SEQ ID NO: 180992 - DNA, 1580 bp, Homo sapiens
  Payload ID: 15644
  Gene Symbol: STAC3
  Gene Name: SH3 and cysteine rich domain 3
  Uniprot ID: Q96MF2
  ENST ID: ENST00000554578
  CDS Start-End: 244-1221
ttcagccctgacaccaaggcaggaggctaggaggtctacaaatagcgactgggtagctggtgtgaacacagggggtactgggggggcttagcccccaaggaagaggaccagtttttccccagcaccaccatcaaggcctcgaggctcccagctccctctacagcctgtggactgacttagggaatcccgaacctacagcggctaaagcagttactcaggaagggttctacagggacaaaggagatggaacttcccccagagccccaggccaatggggaggcagtgggagctgggggtgggcccatctactacatctatgaggaagaggaagaggaagaagaggaggaggaggagccacccccagaacctcctaagctggtcaacgataagccccacaaattcaaagatcacttcttcaagaagccaaagttctgtgatgtctgtgcccggatgattgttctcaacaacaagtttgggcttcgctgtaagaactgcaaaaccaacatccatgaacactgtcagtcctatgtggaaatgcagagatgcttcggcaagatcccacctggtttccatcgggcctatagttccccactctacagcaaccagcagtacgcttgtgtcaaagatctctctgctgccaatcgcaatgatcctgtgtttgaaaccctgcgcactggggtgatcatggcaaacaaggaacggaagaagggacaggcagataagaaaaatcctgtagcagccatgatggaggaggagccagagtcggccagaccagaggaaggcaaaccccaggatggaaaccctgaaggggataagaaggctgagaagaagacacctgatgacaagcacaagcagcctggcttccagcagtctcattactttgtggctctctatcggttcaaagccctggagaaggacgatctggatttcccgccaggagagaagatcacagtcattgatgactccaatgaagaatggtggcgggggaaaatcggggagaaggtcggatttttccctccaaacttcatcattcgggtccgggctggagaacgtgtgcaccgcgtgacgagatccttcgtggggaaccgcgagatagggcagatcactctcaagaaggaccagatcgtggtgcagaaaggagacgaagcgggcggctacgtcaaggtctacaccggccgcaaggtggggctgtttcccaccgactttctagaggaaatttaggcgtgcgggcgcctgcaagcgggagacacccacaccccattctgggcgggcccagtggagtttggggaggggggcgaaagcaacgggactgctgggagaggaggggtaggaaggcccgcctgagcgcgacggggcttccgggaagggactggttctcgcccccttccccagcctggggcctcggatacctgctgcccagagcagcccggacccgaaacctttcaggccccgcttgcaagagctggaaaaaaacgcgtatctactaggaggagccagggactggggcggggggcgggggcgagggagggcgaactgtcgaatgttgcgaatttattaaacttttgacaaaacttagaaaa

SEQ ID NO: 180993 - DNA, 795 bp, Homo sapiens
  Payload ID: 15644
  Gene Symbol: STAC3
  Gene Name: SH3 and cysteine rich domain 3
  ENST ID: ENST00000553489
  CDS Start-End: 291-795
tcatttcagccctgacaccaaggcaggaggctaggaggtctacaaatagcgactgggtagctggtgtgaacacagggggtactgggggggcttagcccccaaggaagaggaccagtttttccccagcaccaccatcaaggcctcgaggctcccagctccctctacagcctgtggactgacttagggaatcccgaaccctcccctttgaggaccaccctactgcaagggacagaaagggagagaagaatgaaagggattagatttcatagtggggtccaacctcttgcaggatgacagaaaaggaggtgctggagtcccctaagccctccttcccagcagagactcggcaaagtgggctacagcggctaaagcagttactcaggaagggttctacagggacaaaggagatggaacttcccccagagccccaggccaatggggaggcagtgggagctgggggtgggcccatctactacatctatgaggaagaggaagaggaagaagaggaggaggaggagccacccccagaacctcctaagctggtcaacgataagccccacaaattcaaagatcacttcttcaagaagccaaagttctgtgatgtctgtgcccggatgattgttctcaacaacaagtttgggcttcgctgtaagaactgcaaaaccaacatccatgaacactgtcagtcctatgtggaaatgcagagatgcttcggcaagatcccacctggtttccatcgggcctatagttccccactctacagcaaccagcagtacgcttgtgtcaaagatctct

SEQ ID NO: 180994 - DNA, 6643 bp, Homo sapiens
  Payload ID: 15645
  Gene Symbol: SHANK1
  Gene Name: SH3 and multiple ankyrin repeat domains 1
  Uniprot ID: Q9Y566
  ENST ID: ENST00000293441
  CDS Start-End: 20-6505
gtcgccccgtggccccacaatgacccacagccccgcgacaagcgaggacgaggaacgccacagtgccagcgagtgtcccgaggggggctcagagtccgacagctccccagacgggccaggtcgaggcccccgggggacccggggccagggcagtggggcacctggtagcctggcctctgttagaggcctccagggccgctcaatgtccgtcccagacgacgcccacttcagcatgatggtcttcaggattggcatcccggacctgcaccagacaaaatgccttcgcttcaaccccgatgccaccatctggacggccaagcagcaggtgctctgtgccctgagcgagagcctgcaggatgtgctcaactatggcctgttccaaccggccacctccggccgcgatgccaacttcctggaggaggagaggctgctgcgggagtacccccagtcctttgagaagggggtcccctacctggagttccgatacaagacccgagtttacaaacagaccaacctggatgagaagcagctggccaagttgcacacgaagacggggttgaagaagttcctggagtatgtgcagctcgggacatctgacaaggtggcgcggctgctggacaaggggctggaccccaattaccatgactcggattcgggagagacccccttgacactggcggcccagaccgaaggctctgtagaggtgattcgaaccctgtgcctgggcggggcccacattgacttccgggcccgggatggcatgaccgcactgcataaggccgcatgcgcccgacactgcctggcactcacggcgctcctggaccttgggggttcccccaactacaaggaccgtcgggggctgacccctctgttccacacggccatggtgggtggtgacccccgatgctgcgagctgctcctgttcaacagggcccagctgggcatagctgatgagaacggctggcaggaaatccaccaggcctgccagcggggtcactctcagcacctggagcatctgcttttctacggggctgagcctggagcccagaacgcctcggggaacacggctctgcacatctgcgccctctacaacaaggagacctgtgccaggatcctcctgtatcgaggtgccgacaaggatgtgaagaacaacaacggacagacccccttccaggtggcagtgattgctgggaattttgagctgggggagctgatccgaaaccaccgagaacaggatgtggtgcccttccaggagtcccccaagtacgcggcccggcgacgggggcccccaggcacagggctgacggtgcccccggcgctgctgcgggccaacagtgacaccagcatggcgctgcccgactggatggtgttctccgccccgggggccgcgtcctctggggcccctggccctacctcagggtcccagggccagtcgcagccctcggcccccaccaccaagctcagcagcgggaccctccgaagtgccagcagcccccggggtgccagggcccgctctccatcccgagggaggcaccctgaggacgccaagaggcagccccgaggccggcccagctccagcgggacaccccgggaagggccagccgggggcacggggggctcagggggccccgggggctccctgggcagccgcgggaggcggaggaagctctactcagcggtacccggacgctccttcatggctgtgaagtcctaccaggcccaagccgagggggagatctccctgagcaagggcgagaagatcaaagtacttagcatcggggaaggaggcttctgggaaggccaggtcaaaggtcgtgttggctggttcccctctgactgcctggaagaagtggcgaatcgctctcaggagagcaagcaagaaagccgcagtgacaaggcaaagagactcttccggcattataccgtgggctcctacgacagctttgatgccccaagcttaatggatgggattggcccagggagcgattacatcattaaggagaagacagtcttgctgcagaagaaggacagtgaggggtttgggttcgtgctccggggggccaaggcgcagacccccatcgaggagttcacccccaccccggccttcccggcgctgcagtacctggagtcggtggacgagggtggcgtggcatggcgagctggactgcgaatgggagacttcctcatcgaggtgaacgggcagaatgtggtgaaggtcggccaccgacaggtggtgaacatgatccgccaagggggcaacacgctgatggtgaaggtggtgatggtcaccaggcacccggacatggatgaggcagtgcacaagaaagcaccccagcaggccaagcggctgccgcccccaaccatctccctgcgttccaaatctatgacctcagagctggaggagatggagtacgagcagcagccggcgccggtgcccagcatggagaaaaagcggaccgtgtatcagatggctctcaacaaactggacgaaatcctggccgcagctcaacagaccatcagtgcaagcgaaagccctggtcccggtggcctcgcgtccctgggcaaacaccgacccaaaggtttctttgccactgagtcgagcttcgatccccaccaccgtgcccagccaagttacgagcgtccttctttcctgcctccaggacctgggttgatgctccggcaaaaatctatcggtgcggcagaagatgacagaccttacctagcacccccagccatgaaattcagccgcagcctgtctgtgcctggttcggaggacattcccccgccacccaccacgtccccaccggagcctccctacagcacacctccagtcccctcctcctcagggcgcctcaccccctcccctcggggagggcccttcaaccctggctctggtggccccctccccgcctcctcccctgcatcctttgacgggccctcccctcccgacactcgcgtggggagccgcgagaagagcctgtaccacagtgggcccctgcccccggcccaccaccacccgccccaccaccaccaccaccacgccccgccccctcagccccaccaccaccacgcccacccccctcatcctcccgagatggagacaggcggctctcccgacgaccctccaccccgcctggctctggggccccagcccagcctgcgaggctggaggggcggcgggcccagcccgaccccgggggccccgtccccatcgcaccacggcagcgcgggcgggggcggcggctcctcccagggcccggctctacgctatttccagctgcccccgcgggcggccagcgcagccatgtacgtgcccgcccgctcgggccgcggccgcaagggcccgctggtcaagcagaccaaggtggaaggcgagccccagaagggcggcggcctcccgcccgcgccgtcgcccacgtccccggcctccccgcagccgccgcccgccgtggccgcgccctcggagaagaactccatccccatccccaccatcatcatcaaggccccgtccaccagtagcagcggccgcagcagccagggcagcagcaccgaggcggagccccccacccagccggagcccacgggaggcggcggcggcggcggctcctcgcccagccccgccccggccatgtcacccgtgcccccgtccccctcgcccgtgcccacccccgcctcgcccagcggcccggccacgctggacttcacgagccagttcggggccgccctggtgggggcggcccggagggaggggggctggcagaatgaggcgcgccggcgctccacgctgttcctgtccaccgacgcgggggacgaggacggcggggacggcgggctgggcacaggggcggccccgggcccgcggctgcgccactccaaatccatcgacgagggcatgttctccgccgagccctacctccgactggagtctgcgggcagcggcgcgggctacggcggctacggggccggtagccgagcctacgggggtggcgggggcagcagcgccttcaccagcttcctgcccccgcgacccctggtgcacccgctgaccggcaaggccctggatcccgcctccccgctggggctggccctggccgcccgcgagcgagcgctgaaggagtcctcggagggcggcggggccccccagccgcctcccaggcccccatcgccccgctacgaggccccgccgcccaccccgcaccaccactcgccccacgcccaccacgagccagtgctgcgtctctggggggcctccccgccggaccctgcgcgccgggagctggggtacagggccgggctgggcagccaggagaagtcccttcccgccagcccgcccgccgcccggcgttccctgctacaccgcctgccgcccaccgctcccggggtggggcccctcctgctgcagctggggacggagcccccggccccgcaccccggagtaagcaagccctggaggtccgcagcccccgaagaacccgagcggctgccgctgcacgtgcggttccttgaaaactgccagccccgggcccctgtgacgagcggaaggggtcccccctcggaggacgggccgggggtcccgccgcccagcccacgccggtccgtgcccccctccccgacctccccgagggccagcgaagagaacgggctgcccctgctggtcctgccgcctcccgccccctcggtggatgtggaagatggcgaattccttttcgtggaaccgctgcctccgcctctggaattctccaacagcttcgaaaagccagagtcgcccctcacgcctgggcctccccacccgctgcccgacacacctgcccctgccaccccgttaccccctgtgccacccccggctgtggccgcagcccctcccaccctggactccaccgcatccagcctgacatcctatgacagcgaggtggccaccctgacccagggggcctccgccgctcctggggacccccatccaccaggcccgcctgccccagcagcaccggctcccgctgccccacagcctggcccggaccctccgcctggcacggattctggcatcgaggaggtggacagtcggagcagcagtgaccacccactggagaccatcagcagcgcctccacgctgagcagcctatctgccgaaggtggtggcagcgcagggggtgggggcggggctggggccggtgtggccagtgggccggagcttctggacacctatgtggcctacctggacggccaggcctttgggggcagcagtactcccggcccgccataccctcctcagctcatgactccctctaagctccggggccgggcgctaggagccagcggaggcctgcggcctggccccagcgggggactccgagaccctgttacccccaccagccccaccgtctcggtgacaggggctggaaccgatgggctgctggccctgcgtgcttgttcaggaccccccacggcaggcgtggcggggggtccggtggctgtagagccagaagtcccaccggtgcccttgccgacggcctcctctctgccccggaagctgctgccctgggaggagggcccgggcccaccgccaccacctctgcccgggcccttggcccagcctcaggcctcagccttggccacagtaaaagccagcatcatcagtgaactcagctccaagcttcagcagtttgggggctcctcggcagctggcggcgctctgccctgggcccgaggaggcagtgggggaggcggagacagccaccacgggggagccagctatgtccccgagaggacctcctccctgcagcggcagagactctccgacgactcccagtcctcactcctctccaagcctgtcagcagcctgtttcagaactggcccaaaccacctctgccgccactccccaccggaacaggggtctcccctacagccgctgcggccccaggggccacctcaccctcagcctcctcctcctccacgtccacccgccacctccagggcgtggagttcgagatgcggccccctctgctccgccgggcccccagcccctcgctgctgcccgcctcggagcacaaggtcagccctgcgcccaggccctcgtccctgcccatcctgccttccggacccctctacccaggcctctttgacatccgtggctccccaactggaggggcaggaggctcggctgaccccttcgccccagtctttgtgccgccacacccggggatatccggggggctcgggggagccttgtcaggggcctcgcgctccctctcaccgacccgcctgctctcgctgcccccggacaagccgtttggcgctaaacctctggggttctggaccaagttcgacgtggctgattggctggagtggctgggtttggcggagcaccgagcccagttcctggaccacgagatcgatggctcccacctgcccgccttgaccaaggaggactacgtcgatctaggtgtgaccagggtgggccaccgcatgaacatcgaccgggctctcaaattcttcctggagaggtgatggctggcctggacggaccagccccgtccacagaactcttgagcctgctggcctcttgacctctgacccctgactgtcattctctccccgggccagggactctgttcaaactgcgccctgccctcatctcccaaggcc

SEQ ID NO: 180995 - DNA, 6459 bp, Homo sapiens
  Payload ID: 15645
  Gene Symbol: SHANK1
  Gene Name: SH3 and multiple ankyrin repeat domains 1
  Uniprot ID: Q9Y566
  ENST ID: ENST00000359082
  CDS Start-End: 1-6459
atgacccacagccccgcgacaagcgaggacgaggaacgccacagtgccagcgagtgtcccgaggggggctcagagtccgacagctccccagacgggccaggtcgaggcccccgggggacccggggccagggcagtggggcacctggtagcctggcctctgttagaggcctccagggccgctcaatgtccgtcccagacgacgcccacttcagcatgatggtcttcaggattggcatcccggacctgcaccagacaaaatgccttcgcttcaaccccgatgccaccatctggacggccaagcagcaggtgctctgtgccctgagcgagagcctgcaggatgtgctcaactatggcctgttccaaccggccacctccggccgcgatgccaacttcctggaggaggagaggctgctgcgggagtacccccagtcctttgagaagggggtcccctacctggagttccgatacaagacccgagtttacaaacagaccaacctggatgagaagcagctggccaagttgcacacgaagacggggttgaagaagttcctggagtatgtgcagctcgggacatctgacaaggtggcgcggctgctggacaaggggctggaccccaattaccatgactcggattcgggagagacccccttgacactggcggcccagaccgaaggctctgtagaggtgattcgaaccctgtgcctgggcggggcccacattgacttccgggcccgggatggcatgaccgcactgcataaggccgcatgcgcccgacactgcctggcactcacggcgctcctggaccttgggggttcccccaactacaaggaccgtcgggggctgacccctctgttccacacggccatggtgggtggtgacccccgatgctgcgagctgctcctgttcaacagggcccagctgggcatagctgatgagaacggctggcaggaaatccaccaggcctgccagcggggtcactctcagcacctggagcatctgcttttctacggggctgagcctggagcccagaacgcctcggggaacacggctctgcacatctgcgccctctacaacaaggagacctgtgccaggatcctcctgtatcgaggtgccgacaaggatgtgaagaacaacaacggacagacccccttccaggtggcagtgattgctgggaattttgagctgggggagctgatccgaaaccaccgagaacaggatgtggtgcccttccaggagtcccccaagtacgcggcccggcgacgggggcccccaggcacagggctgacggtgcccccggcgctgctgcgggccaacagtgacaccagcatggcgctgcccgactggatggtgttctccgccccgggggccgcgtcctctggggcccctggccctacctcagggtcccagggccagtcgcagccctcggcccccaccaccaagctcagcagcgggaccctccgaagtgccagcagcccccggggtgccagggcccgctctccatcccgagggaggcaccctgaggacgccaagaggcagccccgaggccggcccagctccagcgggacaccccgggaagggccagccgggggcacggggggctcagggggccccgggggctccctgggcagccgcgggaggcggaggaagctctactcagcggtacccggacgctccttcatggctgtgaagtcctaccaggcccaagccgagggggagatctccctgagcaagggcgagaagatcaaagtacttagcatcggggaaggaggcttctgggaaggccaggtcaaaggtcgtgttggctggttcccctctgactgcctggaagaagtggcgaatcgctctcaggagagcaagcaagaaagccgcagtgacaaggcaaagagactcttccggcattataccgtgggctcctacgacagctttgatgccccaagcgattacatcattaaggagaagacagtcttgctgcagaagaaggacagtgaggggtttgggttcgtgctccggggggccaaggcgcagacccccatcgaggagttcacccccaccccggccttcccggcgctgcagtacctggagtcggtggacgagggtggcgtggcatggcgagctggactgcgaatgggagacttcctcatcgaggtgaacgggcagaatgtggtgaaggtcggccaccgacaggtggtgaacatgatccgccaagggggcaacacgctgatggtgaaggtggtgatggtcaccaggcacccggacatggatgaggcagtgcacaagaaagcaccccagcaggccaagcggctgccgcccccaaccatctccctgcgttccaaatctatgacctcagagctggaggagatggagtacgagcagcagccggcgccggtgcccagcatggagaaaaagcggaccgtgtatcagatggctctcaacaaactggacgaaatcctggccgcagctcaacagaccatcagtgcaagcgaaagccctggtcccggtggcctcgcgtccctgggcaaacaccgacccaaaggtttctttgccactgagtcgagcttcgatccccaccaccgtgcccagccaagttacgagcgtccttctttcctgcctccaggacctgggttgatgctccggcaaaaatctatcggtgcggcagaagatgacagaccttacctagcacccccagccatgaaattcagccgcagcctgtctgtgcctggttcggaggacattcccccgccacccaccacgtccccaccggagcctccctacagcacacctccagtcccctcctcctcagggcgcctcaccccctcccctcggggagggcccttcaaccctggctctggtggccccctccccgcctcctcccctgcatcctttgacgggccctcccctcccgacactcgcgtggggagccgcgagaagagcctgtaccacagtgggcccctgcccccggcccaccaccacccgccccaccaccaccaccaccacgccccgccccctcagccccaccaccaccacgcccacccccctcatcctcccgagatggagacaggcggctctcccgacgaccctccaccccgcctggctctggggccccagcccagcctgcgaggctggaggggcggcgggcccagcccgaccccgggggccccgtccccatcgcaccacggcagcgcgggcgggggcggcggctcctcccagggcccggctctacgctatttccagctgcccccgcgggcggccagcgcagccatgtacgtgcccgcccgctcgggccgcggccgcaagggcccgctggtcaagcagaccaaggtggaaggcgagccccagaagggcggcggcctcccgcccgcgccgtcgcccacgtccccggcctccccgcagccgccgcccgccgtggccgcgccctcggagaagaactccatccccatccccaccatcatcatcaaggccccgtccaccagtagcagcggccgcagcagccagggcagcagcaccgaggcggagccccccacccagccggagcccacgggaggcggcggcggcggcggctcctcgcccagccccgccccggccatgtcacccgtgcccccgtccccctcgcccgtgcccacccccgcctcgcccagcggcccggccacgctggacttcacgagccagttcggggccgccctggtgggggcggcccggagggaggggggctggcagaatgaggcgcgccggcgctccacgctgttcctgtccaccgacgcgggggacgaggacggcggggacggcgggctgggcacaggggcggccccgggcccgcggctgcgccactccaaatccatcgacgagggcatgttctccgccgagccctacctccgactggagtctgcgggcagcggcgcgggctacggcggctacggggccggtagccgagcctacgggggtggcgggggcagcagcgccttcaccagcttcctgcccccgcgacccctggtgcacccgctgaccggcaaggccctggatcccgcctccccgctggggctggccctggccgcccgcgagcgagcgctgaaggagtcctcggagggcggcggggccccccagccgcctcccaggcccccatcgccccgctacgaggccccgccgcccaccccgcaccaccactcgccccacgcccaccacgagccagtgctgcgtctctggggggcctccccgccggaccctgcgcgccgggagctggggtacagggccgggctgggcagccaggagaagtcccttcccgccagcccgcccgccgcccggcgttccctgctacaccgcctgccgcccaccgctcccggggtggggcccctcctgctgcagctggggacggagcccccggccccgcaccccggagtaagcaagccctggaggtccgcagcccccgaagaacccgagcggctgccgctgcacgtgcggttccttgaaaactgccagccccgggcccctgtgacgagcggaaggggtcccccctcggaggacgggccgggggtcccgccgcccagcccacgccggtccgtgcccccctccccgacctccccgagggccagcgaagagaacgggctgcccctgctggtcctgccgcctcccgccccctcggtggatgtggaagatggcgaattccttttcgtggaaccgctgcctccgcctctggaattctccaacagcttcgaaaagccagagtcgcccctcacgcctgggcctccccacccgctgcccgacacacctgcccctgccaccccgttaccccctgtgccacccccggctgtggccgcagcccctcccaccctggactccaccgcatccagcctgacatcctatgacagcgaggtggccaccctgacccagggggcctccgccgctcctggggacccccatccaccaggcccgcctgccccagcagcaccggctcccgctgccccacagcctggcccggaccctccgcctggcacggattctggcatcgaggaggtggacagtcggagcagcagtgaccacccactggagaccatcagcagcgcctccacgctgagcagcctatctgccgaaggtggtggcagcgcagggggtgggggcggggctggggccggtgtggccagtgggccggagcttctggacacctatgtggcctacctggacggccaggcctttgggggcagcagtactcccggcccgccataccctcctcagctcatgactccctctaagctccggggccgggcgctaggagccagcggaggcctgcggcctggccccagcgggggactccgagaccctgttacccccaccagccccaccgtctcggtgacaggggctggaaccgatgggctgctggccctgcgtgcttgttcaggaccccccacggcaggcgtggcggggggtccggtggctgtagagccagaagtcccaccggtgcccttgccgacggcctcctctctgccccggaagctgctgccctgggaggagggcccgggcccaccgccaccacctctgcccgggcccttggcccagcctcaggcctcagccttggccacagtaaaagccagcatcatcagtgaactcagctccaagcttcagcagtttgggggctcctcggcagctggcggcgctctgccctgggcccgaggaggcagtgggggaggcggagacagccaccacgggggagccagctatgtccccgagaggacctcctccctgcagcggcagagactctccgacgactcccagtcctcactcctctccaagcctgtcagcagcctgtttcagaactggcccaaaccacctctgccgccactccccaccggaacaggggtctcccctacagccgctgcggccccaggggccacctcaccctcagcctcctcctcctccacgtccacccgccacctccagggcgtggagttcgagatgcggccccctctgctccgccgggcccccagcccctcgctgctgcccgcctcggagcacaaggtcagccctgcgcccaggccctcgtccctgcccatcctgccttccggacccctctacccaggcctctttgacatccgtggctccccaactggaggggcaggaggctcggctgaccccttcgccccagtctttgtgccgccacacccggggatatccggggggctcgggggagccttgtcaggggcctcgcgctccctctcaccgacccgcctgctctcgctgcccccggacaagccgtttggcgctaaacctctggggttctggaccaagttcgacgtggctgattggctggagtggctgggtttggcggagcaccgagcccagttcctggaccacgagatcgatggctcccacctgcccgccttgaccaaggaggactacgtcgatctaggtgtgaccagggtgggccaccgcatgaacatcgaccgggctctcaaattcttcctggagaggtga

SEQ ID NO: 180996 - DNA, 4785 bp, Homo sapiens
  Payload ID: 15645
  Gene Symbol: SHANK1
  Gene Name: SH3 and multiple ankyrin repeat domains 1
  Uniprot ID: Q9Y566
  ENST ID: ENST00000391813
  CDS Start-End: 1-4647
atgcaattaatggccctggagcagaggtttgggtctgggttgccgggtgggggacagcctctgtgtctcatgatgtcttctccactccccccaccacccccccatttctcctgcctccctgccagcgattacatcattaaggagaagacagtcttgctgcagaagaaggacagtgaggggtttgggttcgtgctccggggggccaaggcgcagacccccatcgaggagttcacccccaccccggccttcccggcgctgcagtacctggagtcggtggacgagggtggcgtggcatggcgagctggactgcgaatgggagacttcctcatcgaggtgaacgggcagaatgtggtgaaggtcggccaccgacaggtggtgaacatgatccgccaagggggcaacacgctgatggtgaaggtggtgatggtcaccaggcacccggacatggatgaggcagtgcacaagaaagcaccccagcaggccaagcggctgccgcccccaaccatctccctgcgttccaaatctatgacctcagagctggaggagatggagtacgagcagcagccggcgccggtgcccagcatggagaaaaagcggaccgtgtatcagatggctctcaacaaactggacgaaatcctggccgcagctcaacagaccatcagtgcaagcgaaagccctggtcccggtggcctcgcgtccctgggcaaacaccgacccaaaggtttctttgccactgagtcgagcttcgatccccaccaccgtgcccagccaagttacgagcgtccttctttcctgcctccaggacctgggttgatgctccggcaaaaatctatcggtgcggcagaagatgacagaccttacctagcacccccagccatgaaattcagccgcagcctgtctgtgcctggttcggaggacattcccccgccacccaccacgtccccaccggagcctccctacagcacacctccagtcccctcctcctcagggcgcctcaccccctcccctcggggagggcccttcaaccctggctctggtggccccctccccgcctcctcccctgcatcctttgacgggccctcccctcccgacactcgcgtggggagccgcgagaagagcctgtaccacagtgggcccctgcccccggcccaccaccacccgccccaccaccaccaccaccacgccccgccccctcagccccaccaccaccacgcccacccccctcatcctcccgagatggagacaggcggctctcccgacgaccctccaccccgcctggctctggggccccagcccagcctgcgaggctggaggggcggcgggcccagcccgaccccgggggccccgtccccatcgcaccacggcagcgcgggcgggggcggcggctcctcccagggcccggctctacgctatttccagctgcccccgcgggcggccagcgcagccatgtacgtgcccgcccgctcgggccgcggccgcaagggcccgctggtcaagcagaccaaggtggaaggcgagccccagaagggcggcggcctcccgcccgcgccgtcgcccacgtccccggcctccccgcagccgccgcccgccgtggccgcgccctcggagaagaactccatccccatccccaccatcatcatcaaggccccgtccaccagtagcagcggccgcagcagccagggcagcagcaccgaggcggagccccccacccagccggagcccacgggaggcggcggcggcggcggctcctcgcccagccccgccccggccatgtcacccgtgcccccgtccccctcgcccgtgcccacccccgcctcgcccagcggcccggccacgctggacttcacgagccagttcggggccgccctggtgggggcggcccggagggaggggggctggcagaatgaggcgcgccggcgctccacgctgttcctgtccaccgacgcgggggacgaggacggcggggacggcgggctgggcacaggggcggccccgggcccgcggctgcgccactccaaatccatcgacgagggcatgttctccgccgagccctacctccgactggagtctgcgggcagcggcgcgggctacggcggctacggggccggtagccgagcctacgggggtggcgggggcagcagcgccttcaccagcttcctgcccccgcgacccctggtgcacccgctgaccggcaaggccctggatcccgcctccccgctggggctggccctggccgcccgcgagcgagcgctgaaggagtcctcggagggcggcggggccccccagccgcctcccaggcccccatcgccccgctacgaggccccgccgcccaccccgcaccaccactcgccccacgcccaccacgagccagtgctgcgtctctggggggcctccccgccggaccctgcgcgccgggagctggggtacagggccgggctgggcagccaggagaagtcccttcccgccagcccgcccgccgcccggcgttccctgctacaccgcctgccgcccaccgctcccggggtggggcccctcctgctgcagctggggacggagcccccggccccgcaccccggagtaagcaagccctggaggtccgcagcccccgaagaacccgagcggctgccgctgcacgtgcggttccttgaaaactgccagccccgggcccctgtgacgagcggaaggggtcccccctcggaggacgggccgggggtcccgccgcccagcccacgccggtccgtgcccccctccccgacctccccgagggccagcgaagagaacgggctgcccctgctggtcctgccgcctcccgccccctcggtggatgtggaagatggcgaattccttttcgtggaaccgctgcctccgcctctggaattctccaacagcttcgaaaagccagagtcgcccctcacgcctgggcctccccacccgctgcccgacacacctgcccctgccaccccgttaccccctgtgccacccccggctgtggccgcagcccctcccaccctggactccaccgcatccagcctgacatcctatgacagcgaggtggccaccctgacccagggggcctccgccgctcctggggacccccatccaccaggcccgcctgccccagcagcaccggctcccgctgccccacagcctggcccggaccctccgcctggcacggattctggcatcgaggaggtggacagtcggagcagcagtgaccacccactggagaccatcagcagcgcctccacgctgagcagcctatctgccgaaggtggtggcagcgcagggggtgggggcggggctggggccggtgtggccagtgggccggagcttctggacacctatgtggcctacctggacggccaggcctttgggggcagcagtactcccggcccgccataccctcctcagctcatgactccctctaagctccggggccgggcgctaggagccagcggaggcctgcggcctggccccagcgggggactccgagaccctgttacccccaccagccccaccgtctcggtgacaggggctggaaccgatgggctgctggccctgcgtgcttgttcaggaccccccacggcaggcgtggcggggggtccggtggctgtagagccagaagtcccaccggtgcccttgccgacggcctcctctctgccccggaagctgctgccctgggaggagggcccgggcccaccgccaccacctctgcccgggcccttggcccagcctcaggcctcagccttggccacagtaaaagccagcatcatcagtgaactcagctccaagcttcagcagtttgggggctcctcggcagctggcggcgctctgccctgggcccgaggaggcagtgggggaggcggagacagccaccacgggggagccagctatgtccccgagaggacctcctccctgcagcggcagagactctccgacgactcccagtcctcactcctctccaagcctgtcagcagcctgtttcagaactggcccaaaccacctctgccgccactccccaccggaacaggggtctcccctacagccgctgcggccccaggggccacctcaccctcagcctcctcctcctccacgtccacccgccacctccagggcgtggagttcgagatgcggccccctctgctccgccgggcccccagcccctcgctgctgcccgcctcggagcacaaggtcagccctgcgcccaggccctcgtccctgcccatcctgccttccggacccctctacccaggcctctttgacatccgtggctccccaactggaggggcaggaggctcggctgaccccttcgccccagtctttgtgccgccacacccggggatatccggggggctcgggggagccttgtcaggggcctcgcgctccctctcaccgacccgcctgctctcgctgcccccggacaagccgtttggcgctaaacctctggggttctggaccaagttcgacgtggctgattggctggagtggctgggtttggcggagcaccgagcccagttcctggaccacgagatcgatggctcccacctgcccgccttgaccaaggaggactacgtcgatctaggtgtgaccagggtgggccaccgcatgaacatcgaccgggctctcaaattcttcctggagaggtgatggctggcctggacggaccagccccgtccacagaactcttgagcctgctggcctcttgacctctgacccctgactgtcattctctccccgggccagggactctgttcaaactgcgccctgccctcatctcccaaggcc

SEQ ID NO: 180997 - DNA, 6622 bp, Homo sapiens
  Payload ID: 15645
  Gene Symbol: SHANK1
  Gene Name: SH3 and multiple ankyrin repeat domains 1
  ENST ID: ENST00000391814
  CDS Start-End: 89-6598
ggccgcgggcgccgccgaccgggactcagcagccccgccaggcagccgcctgtgatgctgccgtcccccgtcgccccgtggccccacaatgacccacagccccgcgacaagcgaggacgaggaacgccacagtgccagcgagtgtcccgaggggggctcagagtccgacagctccccagacgggccaggtcgaggcccccgggggacccggggccagggcagtggggcacctggtagcctggcctctgttagaggcctccagggccgctcaatgtccgtcccagacgacgcccacttcagcatgatggtcttcaggattggcatcccggacctgcaccagacaaaatgccttcgcttcaaccccgatgccaccatctggacggccaagcagcaggtgctctgtgccctgagcgagagcctgcaggatgtgctcaactatggcctgttccaaccggccacctccggccgcgatgccaacttcctggaggaggagaggctgctgcgggagtacccccagtcctttgagaagggggtcccctacctggagttccgatacaagacccgagtttacaaacagaccaacctggatgagaagcagctggccaagttgcacacgaagacggggttgaagaagttcctggagtatgtgcagctcgggacatctgacaaggtggcgcggctgctggacaaggggctggaccccaattaccatgactcggattcgggagagacccccttgacactggcggcccagaccgaaggctctgtagaggtgattcgaaccctgtgcctgggcggggcccacattgacttccgggcccgggatggcatgaccgcactgcataaggccgcatgcgcccgacactgcctggcactcacggcgctcctggaccttgggggttcccccaactacaaggaccgtcgggggctgacccctctgttccacacggccatggtgggtggtgacccccgatgctgcgagctgctcctgttcaacagggcccagctgggcatagctgatgagaacggctggcaggaaatccaccaggcctgccagcggggtcactctcagcacctggagcatctgcttttctacggggctgagcctggagcccagaacgcctcggggaacacggctctgcacatctgcgccctctacaacaaggagacctgtgccaggatcctcctgtatcgaggtgccgacaaggatgtgaagaacaacaacggacagacccccttccaggtggcagtgattgctgggaattttgagctgggggagctgatccgaaaccaccgagaacaggatgtggtgcccttccaggagtcccccaagtacgcggcccggcgacgggggcccccaggcacagggctgacggtgcccccggcgctgctgcgggccaacagtgacaccagcatggcgctgcccgactggatggtgttctccgccccgggggccgcgtcctctggggcccctggccctacctcagggtcccagggccagtcgcagccctcggcccccaccaccaagctcagcagcgggaccctccgaagtgccagcagcccccggggtgccagggcccgctctccatcccgagggaggcaccctgaggacgccaagaggcagccccgaggccggcccagctccagcgggacaccccgggaagggccagccgggggcacggggggctcagggggccccgggggctccctgggcagccgcgggaggcggaggaagctctactcagcggtacccggacgctccttcatggctgtgaagtcctaccaggcccaagccgagggggagatctccctgagcaagggcgagaagatcaaagtacttagcatcggggaaggaggcttctgggaaggccaggtcaaaggtcgtgttggctggttcccctctgactgcctggaagaagtggcgaatcgctctcaggagagcaagcaagaaagccgcagtgacaaggcaaagagactcttccggcattataccgtgggctcctacgacagctttgatgccccaagcttaatggatgggattggcccagggagcgattacatcattaaggagaagacagtcttgctgcagaagaaggacagtgaggggtttgggttcgtgctccggggggccaaggcgcagacccccatcgaggagttcacccccaccccggccttcccggcgctgcagtacctggagtcggtggacgagggtggcgtggcatggcgagctggactgcgaatgggagacttcctcatcgaggtgaacgggcagaatgtggtgaaggtcggccaccgacaggtggtgaacatgatccgccaagggggcaacacgctgatggtgaaggtggtgatggtcaccaggcacccggacatggatgaggcagtgcacaagaaagcaccccagcaggccaagcggctgccgcccccaaccatctccctgcgttccaaatctatgacctcagagctggaggagatggtctccccctggaagaagaagagtgagtacgagcagcagccggcgccggtgcccagcatggagaaaaagcggaccgtgtatcagatggctctcaacaaactggacgaaatcctggccgcagctcaacagaccatcagtgcaagcgaaagccctggtcccggtggcctcgcgtccctgggcaaacaccgacccaaaggtttctttgccactgagtcgagcttcgatccccaccaccgtgcccagccaagttacgagcgtccttctttcctgcctccaggacctgggttgatgctccggcaaaaatctatcggtgcggcagaagatgacagaccttacctagcacccccagccatgaaattcagccgcagcctgtctgtgcctggttcggaggacattcccccgccacccaccacgtccccaccggagcctccctacagcacacctccagtcccctcctcctcagggcgcctcaccccctcccctcggggagggcccttcaaccctggctctggtggccccctccccgcctcctcccctgcatcctttgacgggccctcccctcccgacactcgcgtggggagccgcgagaagagcctgtaccacagtgggcccctgcccccggcccaccaccacccgccccaccaccaccaccaccacgccccgccccctcagccccaccaccaccacgcccacccccctcatcctcccgagatggagacaggcggctctcccgacgaccctccaccccgcctggctctggggccccagcccagcctgcgaggctggaggggcggcgggcccagcccgaccccgggggccccgtccccatcgcaccacggcagcgcgggcgggggcggcggctcctcccagggcccggctctacgctatttccagctgcccccgcgggcggccagcgcagccatgtacgtgcccgcccgctcgggccgcggccgcaagggcccgctggtcaagcagaccaaggtggaaggcgagccccagaagggcggcggcctcccgcccgcgccgtcgcccacgtccccggcctccccgcagccgccgcccgccgtggccgcgccctcggagaagaactccatccccatccccaccatcatcatcaaggccccgtccaccagtagcagcggccgcagcagccagggcagcagcaccgaggcggagccccccacccagccggagcccacgggaggcggcggcggcggcggctcctcgcccagccccgccccggccatgtcacccgtgcccccgtccccctcgcccgtgcccacccccgcctcgcccagcggcccggccacgctggacttcacgagccagttcggggccgccctggtgggggcggcccggagggaggggggctggcagaatgaggcgcgccggcgctccacgctgttcctgtccaccgacgcgggggacgaggacggcggggacggcgggctgggcacaggggcggccccgggcccgcggctgcgccactccaaatccatcgacgagggcatgttctccgccgagccctacctccgactggagtctgcgggcagcggcgcgggctacggcggctacggggccggtagccgagcctacgggggtggcgggggcagcagcgccttcaccagcttcctgcccccgcgacccctggtgcacccgctgaccggcaaggccctggatcccgcctccccgctggggctggccctggccgcccgcgagcgagcgctgaaggagtcctcggagggcggcggggccccccagccgcctcccaggcccccatcgccccgctacgaggccccgccgcccaccccgcaccaccactcgccccacgcccaccacgagccagtgctgcgtctctggggggcctccccgccggaccctgcgcgccgggagctggggtacagggccgggctgggcagccaggagaagtcccttcccgccagcccgcccgccgcccggcgttccctgctacaccgcctgccgcccaccgctcccggggtggggcccctcctgctgcagctggggacggagcccccggccccgcaccccggagtaagcaagccctggaggtccgcagcccccgaagaacccgagcggctgccgctgcacgtgcggttccttgaaaactgccagccccgggcccctgtgacgagcggaaggggtcccccctcggaggacgggccgggggtcccgccgcccagcccacgccggtccgtgcccccctccccgacctccccgagggccagcgaagagaacgggctgcccctgctggtcctgccgcctcccgccccctcggtggatgtggaagatggcgaattccttttcgtggaaccgctgcctccgcctctggaattctccaacagcttcgaaaagccagagtcgcccctcacgcctgggcctccccacccgctgcccgacacacctgcccctgccaccccgttaccccctgtgccacccccggctgtggccgcagcccctcccaccctggactccaccgcatccagcctgacatcctatgacagcgaggtggccaccctgacccagggggcctccgccgctcctggggacccccatccaccaggcccgcctgccccagcagcaccggctcccgctgccccacagcctggcccggaccctccgcctggcacggattctggcatcgaggaggtggacagtcggagcagcagtgaccacccactggagaccatcagcagcgcctccacgctgagcagcctatctgccgaaggtggtggcagcgcagggggtgggggcggggctggggccggtgtggccagtgggccggagcttctggacacctatgtggcctacctggacggccaggcctttgggggcagcagtactcccggcccgccataccctcctcagctcatgactccctctaagctccggggccgggcgctaggagccagcggaggcctgcggcctggccccagcgggggactccgagaccctgttacccccaccagccccaccgtctcggtgacaggggctggaaccgatgggctgctggccctgcgtgcttgttcaggaccccccacggcaggcgtggcggggggtccggtggctgtagagccagaagtcccaccggtgcccttgccgacggcctcctctctgccccggaagctgctgccctgggaggagggcccgggcccaccgccaccacctctgcccgggcccttggcccagcctcaggcctcagccttggccacagtaaaagccagcatcatcagtgaactcagctccaagcttcagcagtttgggggctcctcggcagctggcggcgctctgccctgggcccgaggaggcagtgggggaggcggagacagccaccacgggggagccagctatgtccccgagaggacctcctccctgcagcggcagagactctccgacgactcccagtcctcactcctctccaagcctgtcagcagcctgtttcagaactggcccaaaccacctctgccgccactccccaccggaacaggggtctcccctacagccgctgcggccccaggggccacctcaccctcagcctcctcctcctccacgtccacccgccacctccagggcgtggagttcgagatgcggccccctctgctccgccgggcccccagcccctcgctgctgcccgcctcggagcacaaggtcagccctgcgcccaggccctcgtccctgcccatcctgccttccggacccctctacccaggcctctttgacatccgtggctccccaactggaggggcaggaggctcggctgaccccttcgccccagtctttgtgccgccacacccggggatatccggggggctcgggggagccttgtcaggggcctcgcgctccctctcaccgacccgcctgctctcgctgcccccggacaagccgtttggcgctaaacctctggggttctggaccaagttcgacgtggctgattggctggagtggctgggtttggcggagcaccgagcccagttcctggaccacgagatcgatggctcccacctgcccgccttgaccaaggaggactacgtcgatctaggtgtgaccagggtgggccaccgcatgaacatcgaccgggctctcaaattcttcctggagaggtgatggctggcctggacggaccagccc

SEQ ID NO: 180998 - DNA, 668 bp, Homo sapiens
  Payload ID: 15645
  Gene Symbol: SHANK1
  Gene Name: SH3 and multiple ankyrin repeat domains 1
  ENST ID: ENST00000468654
  CDS Start-End: 1-552
cccggcccgccataccctcctcagctcatgactccctctaagctccggggccgggcgctaggagccagcggaggcctgcggcctggccccagcgggggactccgagaccctgttacccccaccagccccaccgtctcggtgacaggggctggaaccgatgggctgctggccctgcgtgcttgttcaggaccccccacggcaggcgtggcggggggtccggtggctgtagagccagaagtcccaccggtgcccttgccgacggcctcctctctgccccggaagctgctgccctgggaggagggcccgggcccaccgccaccacctctgcccgggcccttggcccagcctcaggcctcagccttggccacagtaaaagccagcatcatcagtgaactcagctccaagcttcagcagtttgggggctcctcggcagctggcggcgctctgccctgggcccgaggaggcagtgggggaggcggagacagccaccacgggggagccagctatgtccccgagaggacctcctccctgcagcggcagagtatagaatagtggtgaagagctcagactttggtgccatataaccgggctctgccacttcctgtgtgtccttagactctccgacgactcccagtcctcactcctctccaagcctgtcagcagcctgt

SEQ ID NO: 180999 - DNA, 7271 bp, Homo sapiens
  Payload ID: 15646
  Gene Symbol: SHANK2
  Gene Name: SH3 and multiple ankyrin repeat domains 2
  ENST ID: ENST00000338508
  CDS Start-End: 52-3837
tcctttcctccatgctgcctggatctggcgagctggggtgattaattggctatgatgatgaacgtccccggcggaggagcggccgcggtgatgatgacgggctacaataatggtcgctgtccccggaattctctctacagtgactgcattattgaggagaagacggtggtcctgcagaaaaaagacaatgagggctttggattcgtgcttcgaggggccaaagctgacacacccattgaagaattcacaccaacaccggctttcccagccctacagtacctggagtccgtggatgaaggtggggtggcgtggcaagccggactaaggaccggggacttcttgattgaggttaacaatgagaatgttgtcaaagtcggccacaggcaggtggtgaacatgatccggcagggagggaatcacctggtccttaaggtggtcacggtgaccaggaatctggaccccgacgacaccgccaggaagaaagctcccccgcctccaaagcgggcaccgaccacagccctcaccctgcgctccaagtccatgacctcggagctggaggagctcgtggataaagcctcggtccggaagaagaaggataaacccgaggagatagtcccggcctccaagccctcccgcgctgctgagaacatggctgtggaaccgagggtggcgaccatcaagcagcggcccagcagccggtgcttcccggcgggctcagacatgaactctgtgtacgaacgccaaggaatcgccgtgatgacgcccactgttcctgggagcccaaaagccccgtttctgggcatccctcgaggtacgatgcgaaggcagaaatcaatagacagcagaatctttctatcaggaataacagaggaagagcggcagtttctggctcctccaatgctgaagttcaccagaagcctgtccatgccggacacctctgaggacatcccccctccaccgcagtctgtgcccccgtccccaccaccaccttccccaaccacttacaactgccccaagtccccaactccaagagtctacgggacgattaagcctgcgttcaatcagaattctgccgccaaggtgtcccccgccaccaggtccgacaccgtggccaccatgatgagggagaaggggatgtacttcaggagagagctggaccgctactccttggactctgaagacctctacagtcggaatgccggcccgcaagccaacttccgcaacaagagaggccagatgccagaaaacccatactcagaggtggggaagatcgccagcaaagccgtctacgtccccgccaagcccgccaggcggaaggggatgctggtgaagcagtccaacgtggaggacagccccgagaagacgtgctccatccctatcccgaccatcatcgtgaaggagccgtccaccagcagcagcggcaagagcagccagggcagcagcatggagatcgacccccaggccccggagccaccgagccagctgcggcctgacgaaagcctgaccgtcagcagcccctttgccgccgccatcgccggagccgtccgcgaccgtgagaagcggctggaagccaggaggaactccccggccttcctctccacagacctgggggatgaggatgtgggcctggggccacccgcccccaggacgcggccctccatgttccccgaggagggggattttgctgacgaggacagcgctgagcagctgtcatcccccatgccgagtgccacgcccagggagcccgaaaaccatttcgtgggtggcgccgaggccagtgctccgggtgaggctgggaggccgctgaattccacgtccaaagcccaggggcccgagagcagcccagcagtgccctccgcgagcagcggcacagccggccccgggaattatgtccacccactcacagggcggctgcttgatcccagctccccgctggccctggcactctccgcaagggaccgagccatgaaggagtctcaacagggacccaaaggggaggcccccaaggccgacctcaacaaacctctttacattgataccaaaatgcggcccagcctggatgccggcttccctacggtcaccaggcagaacacccggggacccctgaggcggcaggagacggagaacaagtacgagaccgacctgggccgagaccggaaaggcgatgacaagaagaacatgctgatcgacatcatggacacgtcccagcagaagtcggctggcctgctgatggtgcacaccgtggacgccactaagctggacaacgccctgcaggaagaggacgagaaggcagaggtggagatgaagccagacagctcgccgtccgaggtgccagaaggtgtttccgaaaccgaaggtgctttacagatctccgctgcccccgagcccaccaccgtgcccggcagaaccatcgtcgcggtgggctccatggaagaggcggtgattttgccattccgcatccctcctccccctctggcatccgtggacttggatgaggattttatttttacagagccattgcctcctcccctggaatttgcaaatagttttgatatccccgatgaccgggcagcttctgtcccggctctctcagacttagtgaagcagaagaaaagcgacacccctcagtccccttcgttgaactccagccaaccaaccaactctgcagacagcaagaagccagccagtctttcaaactgtctgcctgcctcattcctgccaccccctgaaagctttgacgccgtcgccgactctgggatcgaggaggtggacagccggagtagcagcgaccaccacctcgagacgaccagcactatctccaccgtgtctagcatctccaccctgtcttccgaaggtggagagaatgtggacacctgcacagtctatgcagatgggcaagcatttatggttgacaaacccccagtacctcctaagccaaaaatgaagcccatcattcacaaaagcaatgcactttatcaagacgcgctcgtggaagaagatgtagatagctttgttatccccccgcccgctcccccgcccccgccgggcagtgcccagcctgggatggccaaggttctccagccaaggacctccaagttgtggggcgacgtcacagagatcaaaagcccgattctctcaggcccaaaggcaaacgttattagtgaattgaactctatcctacagcaaatgaaccgagagaaattggcaaagccgggggaaggactggattcaccaatgggagccaagtccgccagcctcgctccaagaagcccggagatcatgagcaccatctcaggtacacggagcacgacggtcaccttcactgttcgccccggcacctcccagcccatcaccctgcagagccggccccccgactatgaaagcaggacctcaggaacaagacgtgccccaagccctgtggtctcgccaacagagatgaacaaagagaccctgcccgcccccctgtctgctgccaccgcctctccttctcccgctctctcagatgtctttagccttccaagccagcccccttctggggatctatttggcttgaacccagcgggacgcagtaggtcgccatccccctcgatactgcaacagccaatctcaaataagccttttacaactaaacctgtccacctgtggactaaaccagatgtggccgattggctggaaagtctaaacttgggtgaacataaagaggccttcatggacaatgagatcgatggcagtcacttaccaaacctgcagaaggaggacctcatcgatcttggggtaactcgagtcgggcacagaatgaacatagaaagggctttgaaacagctgctggacagataaggacggctgctctccacctcgcagactgctcttgttataagtagagatgggctcgtgctgaaacatctgaatgccaagcgaagtctgtgagcatcaaccccactccatgggtttgtctcctggtacccaaagaaatactgagttgtgtccacaacatggctgggtcttcagacccctggctcaccatgtgggtgtcttgggcagtttctatcacacatgggacaaggggagggagtttttctaacatggaaaaagattctcagcctgccgcccagcatgcaggtggcctcgctttgccgggtccgagaggctccccgtcaattttgcacgggatcctagctcttgtaggcagacaccagtgcactctagatacctcctgagacctccgtcctctgctttccgggcagctctcaccaccccaggccccggcatgaggcctttcctcagtcctgtggcctctcagaggacacctgatgctcacctgcccctctttctcctgcacttggcttgcagtgagatgctcccagatgcatttgtccagtgccccatcatgggcctgaaaggcagagaaactttttcctacacagattcttttccccatctcctcctgtggtttgcatccatggctctttggccatgaggttcctggcagtgctgggagtttggatgggatcgtgcccagctttgcttagctttctttatttctgcaaatctgttagcataattccaaggtggccaagcagatgtcacatggagttagtcaaagcacaaagtcacgattccacaatggaggggagacctggccaagggagccagccagcgtgcaactgcccaagctccaggtctccaggacaagagcagttgtctgccatgagcacccatccaggatggagaataagggcttctctgcctctcagaattctttttaattgaagatgtcttgagctctgcaaagatcagagcaggtgagcatccactttgacatgaaggacaagaagacgcatggctcatggcgggcacatgcggctgccagtgagacagcgtctcctctgggagctgggcgggcacagcatcctcagttctgtgcccagccaagggtgagcatctctgctgagacagtccttttgctctcggaggccagggaagatggtacttagaggcttttcccctatcgctctgggtgtctaggaatcccaccagcttgtcttaacagtacaacagcttctttgaggacccagtgggtatggagtatagacagaacccagggttgagaacagaaggtgggcggcaggatcagagtgaaagcagaggcgtgaggagaggaaagcagggaggtctcctgggctgccaggtcagcctctctggcaaggctttcttgagccccgcccctttctttccccggagtccctccaccccataacaatacctcgaatttccaaaagaggtcaccagatgcacatgggccgcaaaacacacagtcaggcttccagcacattctcccccatttggaggatactcgaatgtcaggtttttggttttattattatttcagaactagctcagcccatctctaattataaaacatggttttgttttttttttttcctttttttcttgattaggtctggaacagctctagaatgaacacataaaatttagcaatttaaaatctttctttactgcaagtttaaatagttgtacagatagtttataagcacaatattttaagaaaaaaaagtggctggtctactaggcagcctttgtgccacttcagtgctagaaagttaaagaaaaaaaaacttttgtgatttaataatactatttctgtggaataattataaaagtatgacctttttaaatcaaccttatttggatgcatctgaaccagcagagctgtgttatattttctatctttgctagaacttcgtcattgaaggacaatttcttcaaagtggttacaattcataatgcagcagtttctccaaaaacaaaaacaaaacacacaccacacacacgcgcttttccagtcacacacccctgatgttggaaccaagtttttggaccttctgttccaaaaccttttgcaggtcaatctttgtatttgaaatgatccaatccaacttgaagtcaattgaatattaaggcgctttacttccgtgtgctttcagtttttccatcatgagatgaatgagcattactctagataaatttcaagacaggatactacaggtggcctgctgaggctgccccatattttagaaaatgtaaaaatggtggtttggccattaatttgtcttccatttgatgataccgcaaaattccgtgagtccattcctttggcatggcactttccctgggcctacagttggtattacctctgtgctcagtgccaggcaaaacactagctcaaaggagagtcaaggaaaccgctggcagacgataaccagtcgaaactcgtgacttcggtttgttgaactttggcagccagttggtgagggccagatgttattccctttcttaaagatactccaagccacatgccactaaccacaagcaagctggctgcaagactaaagagctgataacatagtttatttttacactgtcttattatagagaagtaatagacctatcagaacctgcactgaccaacaaataaacacatgttgccaagatgaatcggtctctatctctatctgcttattttggtactgaaagcaatagttcctcattcaaatcaccacccactgttctccccctttgggacatgttaggacgaggccctattccatgcccctctttaatggtggaacaaatgttaaactgctcatctaaagatcatgttgatattattccaggttttaagatcaacttttgttacatactgtaatttaaataaactgcatttacatgcctagtttctgtaatattgtgtatacaaaacccaaatctctcaaaatgtaaattatgtatacctgccaagataccttttccagggtgtctgcgcacattttaagttaattcacataatataaaaattactcaatgtgactgttgatttgctgaactttacatatcacaaagtgaattatttgtgatactttagttaataaaatggtaaatttttttctcagttattgaacaagcaagcattatccagttgatctggcaatgactttttgtgtgtgggccacaatattgattttcccattaacaatttttttttgttttttaaatactaatatgtttcacactatagtttgtgtaacaacacgtgttcgcattatctatgttgctgttacttttgtgcttttattctttttagactttataaaaaaaaaaaaaagctcctgtaatttgcactttctcccaatccttaaatctcttgtatggcaaccaaaattactgtaaaaaaataaatatactattgcact

SEQ ID NO: 181000 - DNA, 1373 bp, Homo sapiens
  Payload ID: 15646
  Gene Symbol: SHANK2
  Gene Name: SH3 and multiple ankyrin repeat domains 2
  ENST ID: ENST00000357171
  CDS Start-End: 35-769
gatgaacgtccccggcggaggagcggccgcggtgatgatgacgggctacaataatggtcgctgtccccggaattctctctacagtgactgcattattgaggagaagacggtggtcctgcagaaaaaagacaatgagggctttggattcgtgcttcgaggggccaaagctgacacacccattgaagaattcacaccaacaccggctttcccagccctacagtacctggagtccgtggatgaaggtggggtggcgtggcaagccggactaaggaccggggacttcttgattgaggttaacaatgagaatgttgtcaaagtcggccacaggcaggtggtgaacatgatccggcagggagggaatcacctggtccttaaggtggtcacggtgaccaggaatctggaccccgacgacaccgccaggaagaaagctcccccgcctccaaagcgggcaccgaccacagccctcaccctgcgctccaagtccatgacctcggagctggaggagctcgtgcaagcctcggtccggaagaagaaggataaacccgaggagatagtcccggcctccaagccctcccgcgctgctgagaacatggctgtggaaccgagggtggcgaccatcaagcagcggcccagcagccggtgcttcccggcgggctcagacatgaactctgtgtacgaacgccaaggaatcgccgtgatgacgcccactgttcctgggagcccaaaagccccgtttctgggcatccctcgagaagcccggagatcatgagcaccatctcaggtacacggagcacgacggtcaccttcactgttcgccccggcacctcccagcccatcaccctgcagagccggccccccgactatgaaagcaggacctcaggaacaagacgtgccccaagccctgtggtctcgccaacagagatgaacaaagagaccctgcccgcccccctgtctgctgccaccgcctctccttctcccgctctctcagatgtctttagccttccaagccagcccccttctggggatctatttggcttgaacccagcgggacgcagtaggtcgccatccccctcgatactgcaacagccaatctcaaataagccttttacaactaaacctgtccacctgtggactaaaccagatgtggccgattggctggaaagtctaaacttgggtgaacataaagaggccttcatggacaatgagatcgatggcagtcacttaccaaacctgcagaaggaggacctcatcgatcttggggtaactcgagtcgggcacagaatgaacatagaaagggctttgaaacagctgctggacagataaggacggctgctctccacctcgcagactgctcttgttataagtagagatgg

SEQ ID NO: 181001 - DNA, 9208 bp, Homo sapiens
  Payload ID: 15646
  Gene Symbol: SHANK2
  Gene Name: SH3 and multiple ankyrin repeat domains 2
  ENST ID: ENST00000409161
  CDS Start-End: 434-4195
ttaaacccccttcaaggaaaagcaaaacaaaactgctgcctcatttctcctctggctgattttcccgggcttccctggaagatgcgtgtggtcgggacaagccggaggagctcattcccgacgccgccgctgctgaggccgccgctgccgccgccgccgttcgggccacttactttctttgccctgggcggcgtcctggccagccccccttgagcctccagctcagccatccctcaggcagccgccccaccatgtatgactccttcctccggctggctccggctctgcctgcccccaccctgcaagtctcattgtgccacgctcgcctatcccggtagccacccccctcttccttcgctcctcctgcaccctcgctgcctcctttcctccatgctgcctggatctggcgagctggggtgattaattggctatgatgatgaacgtccccggcggaggagcggccgcggtgatgatgacgggctacaataatggtcgctgtccccggaattctctctacagtgactgcattattgaggagaagacggtggtcctgcagaaaaaagacaatgagggctttggattcgtgcttcgaggggccaaagctgacacacccattgaagaattcacaccaacaccggctttcccagccctacagtacctggagtccgtggatgaaggtggggtggcgtggcaagccggactaaggaccggggacttcttgattgaggttaacaatgagaatgttgtcaaagtcggccacaggcaggtggtgaacatgatccggcagggagggaatcacctggtccttaaggtggtcacggtgaccaggaatctggaccccgacgacaccgccaggaagaaagctcccccgcctccaaagcgggcaccgaccacagccctcaccctgcgctccaagtccatgacctcggagctggaggagctcgtggataaagataaacccgaggagatagtcccggcctccaagccctcccgcgctgctgagaacatggctgtggaaccgagggtggcgaccatcaagcagcggcccagcagccggtgcttcccggcgggctcagacatgaactctgtgtacgaacgccaaggaatcgccgtgatgacgcccactgttcctgggagcccaaaagccccgtttctgggcatccctcgaggtacgatgcgaaggcagaaatcaatagacagcagaatctttctatcaggaataacagaggaagagcggcagtttctggctcctccaatgctgaagttcaccagaagcctgtccatgccggacacctctgaggacatcccccctccaccgcagtctgtgcccccgtccccaccaccaccttccccaaccacttacaactgccccaagtccccaactccaagagtctacgggacgattaagcctgcgttcaatcagaattctgccgccaaggtgtcccccgccaccaggtccgacaccgtggccaccatgatgagggagaaggggatgtacttcaggagagagctggaccgctactccttggactctgaagacctctacagtcggaatgccggcccgcaagccaacttccgcaacaagagaggccagatgccagaaaacccatactcagaggtggggaagatcgccagcaaagccgtctacgtccccgccaagcccgccaggcggaaggggatgctggtgaagcagtccaacgtggaggacagccccgagaagacgtgctccatccctatcccgaccatcatcgtgaaggagccgtccaccagcagcagcggcaagagcagccagggcagcagcatggagatcgacccccaggccccggagccaccgagccagctgcggcctgacgaaagcctgaccgtcagcagcccctttgccgccgccatcgccggagccgtccgcgaccgtgagaagcggctggaagccaggaggaactccccggccttcctctccacagacctgggggatgaggatgtgggcctggggccacccgcccccaggacgcggccctccatgttccccgaggagggggattttgctgacgaggacagcgctgagcagctgtcatcccccatgccgagtgccacgcccagggagcccgaaaaccatttcgtgggtggcgccgaggccagtgctccgggtgaggctgggaggccgctgaattccacgtccaaagcccaggggcccgagagcagcccagcagtgccctccgcgagcagcggcacagccggccccgggaattatgtccacccactcacagggcggctgcttgatcccagctccccgctggccctggcactctccgcaagggaccgagccatgaaggagtctcaacagggacccaaaggggaggcccccaaggccgacctcaacaaacctctttacattgataccaaaatgcggcccagcctggatgccggcttccctacggtcaccaggcagaacacccggggacccctgaggcggcaggagacggagaacaagtacgagaccgacctgggccgagaccggaaaggcgatgacaagaagaacatgctgatcgacatcatggacacgtcccagcagaagtcggctggcctgctgatggtgcacaccgtggacgccactaagctggacaacgccctgcaggaagaggacgagaaggcagaggtggagatgaagccagacagctcgccgtccgaggtgccagaaggtgtttccgaaaccgaaggtgctttacagatctccgctgcccccgagcccaccaccgtgcccggcagaaccatcgtcgcggtgggctccatggaagaggcggtgattttgccattccgcatccctcctccccctctggcatccgtggacttggatgaggattttatttttacagagccattgcctcctcccctggaatttgcaaatagttttgatatccccgatgaccgggcagcttctgtcccggctctctcagacttagtgaagcagaagaaaagcgacacccctcagtccccttcgttgaactccagccaaccaaccaactctgcagacagcaagaagccagccagtctttcaaactgtctgcctgcctcattcctgccaccccctgaaagctttgacgccgtcgccgactctgggatcgaggaggtggacagccggagtagcagcgaccaccacctcgagacgaccagcactatctccaccgtgtctagcatctccaccctgtcttccgaaggtggagagaatgtggacacctgcacagtctatgcagatgggcaagcatttatggttgacaaacccccagtacctcctaagccaaaaatgaagcccatcattcacaaaagcaatgcactttatcaagacgcgctcgtggaagaagatgtagatagctttgttatccccccgcccgctcccccgcccccgccgggcagtgcccagcctgggatggccaaggttctccagccaaggacctccaagttgtggggcgacgtcacagagatcaaaagcccgattctctcaggcccaaaggcaaacgttattagtgaattgaactctatcctacagcaaatgaaccgagagaaattggcaaagccgggggaaggactggattcaccaatgggagccaagtccgccagcctcgctccaagaagcccggagatcatgagcaccatctcaggtacacggagcacgacggtcaccttcactgttcgccccggcacctcccagcccatcaccctgcagagccggccccccgactatgaaagcaggacctcaggaacaagacgtgccccaagccctgtggtctcgccaacagagatgaacaaagagaccctgcccgcccccctgtctgctgccaccgcctctccttctcccgctctctcagatgtctttagccttccaagccagcccccttctggggatctatttggcttgaacccagcgggacgcagtaggtcgccatccccctcgatactgcaacagccaatctcaaataagccttttacaactaaacctgtccacctgtggactaaaccagatgtggccgattggctggaaagtctaaacttgggtgaacataaagaggccttcatggacaatgagatcgatggcagtcacttaccaaacctgcagaaggaggacctcatcgatcttggggtaactcgagtcgggcacagaatgaacatagaaagggctttgaaacagctgctggacagataaggacggctgctctccacctcgcagactgctcttgttataagtagagatgggctcgtgctgaaacatctgaatgccaagcgaagtctgtgagcatcaaccccactccatgggtttgtctcctggtacccaaagaaatactgagttgtgtccacaacatggctgggtcttcagacccctggctcaccatgtgggtgtcttgggcagtttctatcacacatgggacaaggggagggagtttttctaacatggaaaaagattctcagcctgccgcccagcatgcaggtggcctcgctttgccgggtccgagaggctccccgtcaattttgcacgggatcctagctcttgtaggcagacaccagtgcactctagatacctcctgagacctccgtcctctgctttccgggcagctctcaccaccccaggccccggcatgaggcctttcctcagtcctgtggcctctcagaggacacctgatgctcacctgcccctctttctcctgcacttggcttgcagtgagatgctcccagatgcatttgtccagtgccccatcatgggcctgaaaggcagagaaactttttcctacacagattcttttccccatctcctcctgtggtttgcatccatggctctttggccatgaggttcctggcagtgctgggagtttggatgggatcgtgcccagctttgcttagctttctttatttctgcaaatctgttagcataattccaaggtggccaagcagatgtcacatggagttagtcaaagcacaaagtcacgattccacaatggaggggagacctggccaagggagccagccagcgtgcaactgcccaagctccaggtctccaggacaagagcagttgtctgccatgagcacccatccaggatggagaataagggcttctctgcctctcagaattctttttaattgaagatgtcttgagctctgcaaagatcagagcaggtgagcatccactttgacatgaaggacaagaagacgcatggctcatggcgggcacatgcggctgccagtgagacagcgtctcctctgggagctgggcgggcacagcatcctcagttctgtgcccagccaagggtgagcatctctgctgagacagtccttttgctctcggaggccagggaagatggtacttagaggcttttcccctatcgctctgggtgtctaggaatcccaccagcttgtcttaacagtacaacagcttctttgaggacccagtgggtatggagtatagacagaacccagggttgagaacagaaggtgggcggcaggatcagagtgaaagcagaggcgtgaggagaggaaagcagggaggtctcctgggctgccaggtcagcctctctggcaaggctttcttgagccccgcccctttctttccccggagtccctccaccccataacaatacctcgaatttccaaaagaggtcaccagatgcacatgggccgcaaaacacacagtcaggcttccagcacattctcccccatttggaggatactcgaatgtcaggtttttggttttattattatttcagaactagctcagcccatctctaattataaaacatggttttgttttttttttttcctttttttcttgattaggtctggaacagctctagaatgaacacataaaatttagcaatttaaaatctttctttactgcaagtttaaatagttgtacagatagtttataagcacaatattttaagaaaaaaaagtggctggtctactaggcagcctttgtgccacttcagtgctagaaagttaaagaaaaaaaaacttttgtgatttaataatactatttctgtggaataattataaaagtatgacctttttaaatcaaccttatttggatgcatctgaaccagcagagctgtgttatattttctatctttgctagaacttcgtcattgaaggacaatttcttcaaagtggttacaattcataatgcagcagtttctccaaaaacaaaaacaaaacacacaccacacacacgcgcttttccagtcacacacccctgatgttggaaccaagtttttggaccttctgttccaaaaccttttgcaggtcaatctttgtatttgaaatgatccaatccaacttgaagtcaattgaatattaaggcgctttacttccgtgtgctttcagtttttccatcatgagatgaatgagcattactctagataaatttcaagacaggatactacaggtggcctgctgaggctgccccatattttagaaaatgtaaaaatggtggtttggccattaatttgtcttccatttgatgataccgcaaaattccgtgagtccattcctttggcatggcactttccctgggcctacagttggtattacctctgtgctcagtgccaggcaaaacactagctcaaaggagagtcaaggaaaccgctggcagacgataaccagtcgaaactcgtgacttcggtttgttgaactttggcagccagttggtgagggccagatgttattccctttcttaaagatactccaagccacatgccactaaccacaagcaagctggctgcaagactaaagagctgataacatagtttatttttacactgtcttattatagagaagtaatagacctatcagaacctgcactgaccaacaaataaacacatgttgccaagatgaatcggtctctatctctatctgcttattttggtactgaaagcaatagttcctcattcaaatcaccacccactgttctccccctttgggacatgttaggacgaggccctattccatgcccctctttaatggtggaacaaatgttaaactgctcatctaaagatcatgttgatattattccaggttttaagatcaacttttgttacatactgtaatttaaataaactgcatttacatgcctagtttctgtaatattgtgtatacaaaacccaaatctctcaaaatgtaaattatgtatacctgccaagataccttttccagggtgtctgcgcacattttaagttaattcacataatataaaaattactcaatgtgactgttgatttgctgaactttacatatcacaaagtgaattatttgtgatactttagttaataaaatggtaaatttttttctcagttattgaacaagcaagcattatccagttgatctggcaatgactttttgtgtgtgggccacaatattgattttcccattaacaatttttttttgttttttaaatactaatatgtttcacactatagtttgtgtaacaacacgtgttcgcattatctatgttgctgttacttttgtgcttttattctttttagactttataaaaaaaaaaaaaagctcctgtaatttgcactttctcccaatccttaaatctcttgtatggcaaccaaaattactgtaaaaaaataaatatactattgcactaaggttgtggttctgattgcaaacaaacagtgaacactgtctgaattaaacaaaaagctgcccgacttgcaatctaatgtagattatctcaggcattgtggccagctctgcctctctaaaactgaccagaaaaatctctctcatcgagtaaacaggctcctgtcactgagctaatctgccttggttccatttccttattctcaatttatcaatggatacgtgcatgttatttcagaattatgcaaaacgtcaaaatctgcttctgtgaccgctgctataggcgtggagctgaggctcggcttttccttttgttctgggtggaagcagcggtgccgcggagggccagccagatccggacccttcccttagggtccagtctccccacaccccagcagggtgtcttctagccataaggccaagggagtggcagaactgggccgcctctctggttgacaagcaaaccacatgctaaggcttggagcaagagagaatttgtgtctattggcaaagaactaagccaggaagacatgggccatccctccgctttagggaagcatattttaaacctaaacgttgaacttcttctttggcctcaccagtgaaaacttgttgtctttagttcctaaagtttcttctactttggcacattccccagttgagcagcagcctctatgcttccacgttcaggaaaaattccagtcctcatatcttttgtagttcaccctcaagctctcccgcttcaccatccaatagtttctcccaaaccttggcacccccctagactttgcttccaatggtttcttccagaccacttttcctagatgaatatattcgtttaccttactaggaaaattattggaagattttttcttttacttgaaattggaggcattttaataactggcgaactggaatgtgtttctgtatttgtagacaaccatgaacccatgcaagtaggtgaacattccacagtggctgggtgaccacagcagctgcatgcagacaggactgcccgtgctttgtggggaatcagagaatttccaaacttgtttctcagacttccgcagatctcatcactttgatttctaatccatgctgtattggtgattttgtttatcgttcctgtaacttgttctacattccacagtctttaccgttttatgttcaaaattacaacaatccctgtccattgattccactctggaactctttgttcatgccaattttgaaattttaatacgagccttcaaataaacacagaaaagaaaaaaaaaaaggaaaaaaaataaagtgtgtgccttgggtgttttgaacctgatctgcataaaaccatattgtattcaaatgctgtatctttcatgaaaggataaatatatcttcaatgtattaatgtagctgataaaatagttatagtgccttgttttctgaactgagaagcccatatcaatgcacaacgtaaagaaaggacggttcgagctatgaaatgttgaggacacctacacgtgattctggagcctttctcatcataagactgtggaaaatacacagtcgtttaagttaaaaataaaaagtaaattga

SEQ ID NO: 181002 - DNA, 2123 bp, Homo sapiens
  Payload ID: 15646
  Gene Symbol: SHANK2
  Gene Name: SH3 and multiple ankyrin repeat domains 2
  Uniprot ID: Q9UPX8
  ENST ID: ENST00000409530
  CDS Start-End: 74-919
ctcctcctgcaccctcgctgcctcctttcctccatgctgcctggatctggcgagctggggtgattaattggctatgatgatgaacgtccccggcggaggagcggccgcggtgatgatgacgggctacaataatggtcgctgtccccggaattctctctacagtgactgcattattgaggagaagacggtggtcctgcagaaaaaagacaatgagggctttggattcgtgcttcgaggggccaaagctgacacacccattgaagaattcacaccaacaccggctttcccagccctacagtacctggagtccgtggatgaaggtggggtggcgtggcaagccggactaaggaccggggacttcttgattgaggttaacaatgagaatgttgtcaaagtcggccacaggcaggtggtgaacatgatccggcagggagggaatcacctggtccttaaggtggtcacggtgaccaggaatctggaccccgacgacaccgccaggaagaaagctcccccgcctccaaagcgggcaccgaccacagccctcaccctgcgctccaagtccatgacctcggagctggaggagctcgtggataaagcctcggtccggaagaagaaggataaacccgaggagatagtcccggcctccaagccctcccgcgctgctgagaacatggctgtggaaccgagggtggcgaccatcaagcagcggcccagcagccggtgcttcccggcgggctcagacatgaactctgtgtacgaacgccaaggaatcgccgtgatgacgcccactgttcctgggagcccaaaagccccgtttctgggcatccctcgaggtacgatgcgaaggcagaaatcaataggtaagaagtgtggcactcccccacagaagttgcccctgggctttcaaacacagccttaggcccctcaggaattctgagccctgggcctctcacagttgccttggcgtcccaccccagcaaggccctgccagcccacccaccagagggtgggaacctggccttgcccactagggagccattggaacatctgagtggcatgaaactcatcccccctgaaggacacaaaatctagggtggcttctgtcatcttgaagcccagttatctgtgataattccagcagggtaaagcgggagggtgggcggggtggtgcgagccaacccccctcccccaccctgccctgctcagggtgggaagggtaagtgggttccctgcattccccagccaccaccaggcctggagtatgagctcagcagatgtacttccaagggtggttgggtcaggtctcgaaatgaaataatgtactgtgtgttgcagaaaactgccttcctttcttcttaatgtcacaattattcctattgaccctgttgcaggcaaaggtacacttgaccttgagacaaggtcacacttgaccctttgagacagtccctttgtgagataattcagcattgcctttactgtgtcaattctggtagaagctaaggcccttgccctgtgagagttgtggaggcaaccctgggactctggtctgcccagcccaccccaggggcactgtcctgtgtgttctggaaatgcctctgggctgctgtgcaaaagcgcagcgtgcttgtgagtctcaggtggataactgtaggcagtcactaggcagtaagtggccgtggaggtggtgtctgctgtgcttaaagctccccctgcaccagcaaactcagggaaagctgcgtatttgtcttgcggttactggttaataacaactgatttcctcctgtcagacagcagaatctttctatcaggttagtgaaccttacggtttggaatctgtaatctgaatgtaacccagtttactttataaggtgtattcttaaattagtactccttgggaacagaattgccagacagccaactcagagtgactggtcaatggagaacactttgaacgagccatctttgcaatgccaaaatgtcctcccacaaggagtatgttaaatttggaatacccttatcgaatggaagttttcattggaataaattattgtagtttgtcctaggactttttttcatttcaagtaatttattttgctacctctttgaaaacctgcatgctccca

SEQ ID NO: 181003 - DNA, 635 bp, Homo sapiens
  Payload ID: 15646
  Gene Symbol: SHANK2
  Gene Name: SH3 and multiple ankyrin repeat domains 2
  ENST ID: ENST00000458632
  CDS Start-End: 1-635
agacccccctgaccttagccgctcagctggacgactctgtggaggtcatcaaagctctcaaaaatggtggagctcacctggacttccgtgccaaagatgggatgaccgccctacacaaagctgcccgagcgaggaaccaagttgccctgaagacccttttagagcttggtgcatccccagattataaagacagttacggcctcaccccgctgtatcacacagccatcgtcggaggtgatccctactgctgcgagcttctcctgcacgaacacgccactgtgtgctgcaaagatgagaacggctggcacgagatccaccaggcctgcaggtacgggcacgtgcagcacctggagcacctgctgttctacggggcagacatgagtgcccagaatgcctcggggaacacggccttgcacatctgcgccctctacaaccaggacagctgtgcaagagtgcttctgtttcgaggcggaaataaggagttaaaaaactacaacagccagactccatttcagccacagaaagcagctaccagagaccataggtgggtgtcagttcccacacttctgctgctcaggcccccccggacacacgaagccagggccgccctgccatctgcgtcccccagagtgctg

SEQ ID NO: 181004 - DNA, 460 bp, Homo sapiens
  Payload ID: 15646
  Gene Symbol: SHANK2
  Gene Name: SH3 and multiple ankyrin repeat domains 2
  ENST ID: ENST00000426687
  CDS Start-End: 1-460
gtacagaaacccgcgctgaccgcagcaagaagcttttcaggcactacaccgtgggctcctatgacagcttcgacacttccagtgactgcattattgaggagaagacggtggtcctgcagaaaaaagacaatgagggctttggattcgtgcttcgaggggccaaagctgacacacccattgaagaattcacaccaacaccggctttcccagccctacagtacctggagtccgtggatgaaggtggggtggcgtggcaagccggactaaggaccggggacttcttgattgaggttaacaatgagaatgttgtcaaagtcggccacaggcaggtggtgaacatgatccggcagggagggaatcacctggtccttaaggtggtcacggtgaccaggaatctggaccccgacgacaccgccaggaagaaagataaacccgaggagatagtcccggcctccaagcc

SEQ ID NO: 181005 - DNA, 557 bp, Homo sapiens
  Payload ID: 15646
  Gene Symbol: SHANK2
  Gene Name: SH3 and multiple ankyrin repeat domains 2
  ENST ID: ENST00000425049
  CDS Start-End: 1-557
attctataaactgcagggcccaagctgcaggtttcaccttcctgagggtcgccacccgggaggcagaggcaccaggatggacgtgggaactacctccgctcttcctttctcacagtgcccttccgagaggccccggcgtactccaaccgccggcggcggccccccaacacgctggccgccccccgggtcctgctgcgctccaacagtgacaacaacctcaatgccagcgctcccgactgggccgtctgctccacggccacctcgcaccgcagcctgtcaccccagctgctgcagcagatgcccagcaagcccgagggggccgcgaagaccattgggagctacgtgcccgggccccgcagccggtccccatcgctcaacaggctgggcggcgcaggcgaggacggcaagaggccgcagcctctctggcatgtcgggtcgccttttgctcttggtgccaacaaggactcactctcggccttcgagtacccggggcccaagcggaagctctacagtgccgtgcccgggaggctcttcgtcgctgtcaagccataccaacc

SEQ ID NO: 181006 - DNA, 9426 bp, Homo sapiens
  Payload ID: 15646
  Gene Symbol: SHANK2
  Gene Name: SH3 and multiple ankyrin repeat domains 2
  Uniprot ID: Q9UPX8
  ENST ID: ENST00000423696
  CDS Start-End: 1-4413
atgaagtctttgttaaatgccttcaccaagaaggaagtgcccttccgagaggccccggcgtactccaaccgccggcggcggccccccaacacgctggccgccccccgggtcctgctgcgctccaacagtgacaacaacctcaatgccagcgctcccgactgggccgtctgctccacggccacctcgcaccgcagcctgtcaccccagctgctgcagcagatgcccagcaagcccgagggggccgcgaagaccattgggagctacgtgcccgggccccgcagccggtccccatcgctcaacaggctgggcggcgcaggcgaggacggcaagaggccgcagcctctctggcatgtcgggtcgccttttgctcttggtgccaacaaggactcactctcggccttcgagtacccggggcccaagcggaagctctacagtgccgtgcccgggaggctcttcgtcgctgtcaagccataccaaccccaagtggacggcgagatcccccttcaccgcggtgacagggtcaaagttctgagcatcggtgaagggggcttctgggaaggcagcgcccgcggccacatcggatggtttccggcggagtgcgtggaggaggtccagtgtaagcccagggacagccaggcagaaacccgcgctgaccgcagcaagaagcttttcaggcactacaccgtgggctcctatgacagcttcgacacttccagtgactgcattattgaggagaagacggtggtcctgcagaaaaaagacaatgagggctttggattcgtgcttcgaggggccaaagctgacacacccattgaagaattcacaccaacaccggctttcccagccctacagtacctggagtccgtggatgaaggtggggtggcgtggcaagccggactaaggaccggggacttcttgattgaggttaacaatgagaatgttgtcaaagtcggccacaggcaggtggtgaacatgatccggcagggagggaatcacctggtccttaaggtggtcacggtgaccaggaatctggaccccgacgacaccgccaggaagaaagctcccccgcctccaaagcgggcaccgaccacagccctcaccctgcgctccaagtccatgacctcggagctggaggagctcgtggataaagcctcggtccggaagaagaaggataaacccgaggagatagtcccggcctccaagccctcccgcgctgctgagaacatggctgtggaaccgagggtggcgaccatcaagcagcggcccagcagccggtgcttcccggcgggctcagacatgaactctgtgtacgaacgccaaggaatcgccgtgatgacgcccactgttcctgggagcccaaaagccccgtttctgggcatccctcgaggtacgatgcgaaggcagaaatcaatagacagcagaatctttctatcaggaataacagaggaagagcggcagtttctggctcctccaatgctgaagttcaccagaagcctgtccatgccggacacctctgaggacatcccccctccaccgcagtctgtgcccccgtccccaccaccaccttccccaaccacttacaactgccccaagtccccaactccaagagtctacgggacgattaagcctgcgttcaatcagaattctgccgccaaggtgtcccccgccaccaggtccgacaccgtggccaccatgatgagggagaaggggatgtacttcaggagagagctggaccgctactccttggactctgaagacctctacagtcggaatgccggcccgcaagccaacttccgcaacaagagaggccagatgccagaaaacccatactcagaggtggggaagatcgccagcaaagccgtctacgtccccgccaagcccgccaggcggaaggggatgctggtgaagcagtccaacgtggaggacagccccgagaagacgtgctccatccctatcccgaccatcatcgtgaaggagccgtccaccagcagcagcggcaagagcagccagggcagcagcatggagatcgacccccaggccccggagccaccgagccagctgcggcctgacgaaagcctgaccgtcagcagcccctttgccgccgccatcgccggagccgtccgcgaccgtgagaagcggctggaagccaggaggaactccccggccttcctctccacagacctgggggatgaggatgtgggcctggggccacccgcccccaggacgcggccctccatgttccccgaggagggggattttgctgacgaggacagcgctgagcagctgtcatcccccatgccgagtgccacgcccagggagcccgaaaaccatttcgtgggtggcgccgaggccagtgctccgggtgaggctgggaggccgctgaattccacgtccaaagcccaggggcccgagagcagcccagcagtgccctccgcgagcagcggcacagccggccccgggaattatgtccacccactcacagggcggctgcttgatcccagctccccgctggccctggcactctccgcaagggaccgagccatgaaggagtctcaacagggacccaaaggggaggcccccaaggccgacctcaacaaacctctttacattgataccaaaatgcggcccagcctggatgccggcttccctacggtcaccaggcagaacacccggggacccctgaggcggcaggagacggagaacaagtacgagaccgacctgggccgagaccggaaaggcgatgacaagaagaacatgctgatcgacatcatggacacgtcccagcagaagtcggctggcctgctgatggtgcacaccgtggacgccactaagctggacaacgccctgcaggaagaggacgagaaggcagaggtggagatgaagccagacagctcgccgtccgaggtgccagaaggtgtttccgaaaccgaaggtgctttacagatctccgctgcccccgagcccaccaccgtgcccggcagaaccatcgtcgcggtgggctccatggaagaggcggtgattttgccattccgcatccctcctccccctctggcatccgtggacttggatgaggattttatttttacagagccattgcctcctcccctggaatttgcaaatagttttgatatccccgatgaccgggcagcttctgtcccggctctctcagacttagtgaagcagaagaaaagcgacacccctcagtccccttcgttgaactccagccaaccaaccaactctgcagacagcaagaagccagccagtctttcaaactgtctgcctgcctcattcctgccaccccctgaaagctttgacgccgtcgccgactctgggatcgaggaggtggacagccggagtagcagcgaccaccacctcgagacgaccagcactatctccaccgtgtctagcatctccaccctgtcttccgaaggtggagagaatgtggacacctgcacagtctatgcagatgggcaagcatttatggttgacaaacccccagtacctcctaagccaaaaatgaagcccatcattcacaaaagcaatgcactttatcaagacgcgctcgtggaagaagatgtagatagctttgttatccccccgcccgctcccccgcccccgccgggcagtgcccagcctgggatggccaaggttctccagccaaggacctccaagttgtggggcgacgtcacagagatcaaaagcccgattctctcaggcccaaaggcaaacgttattagtgaattgaactctatcctacagcaaatgaaccgagagaaattggcaaagccgggggaaggactggattcaccaatgggagccaagtccgccagcctcgctccaagaagcccggagatcatgagcaccatctcaggtacacggagcacgacggtcaccttcactgttcgccccggcacctcccagcccatcaccctgcagagccggccccccgactatgaaagcaggacctcaggaacaagacgtgccccaagccctgtggtctcgccaacagagatgaacaaagagaccctgcccgcccccctgtctgctgccaccgcctctccttctcccgctctctcagatgtctttagccttccaagccagcccccttctggggatctatttggcttgaacccagcgggacgcagtaggtcgccatccccctcgatactgcaacagccaatctcaaataagccttttacaactaaacctgtccacctgtggactaaaccagatgtggccgattggctggaaagtctaaacttgggtgaacataaagaggccttcatggacaatgagatcgatggcagtcacttaccaaacctgcagaaggaggacctcatcgatcttggggtaactcgagtcgggcacagaatgaacatagaaagggctttgaaacagctgctggacagataaggacggctgctctccacctcgcagactgctcttgttataagtagagatgggctcgtgctgaaacatctgaatgccaagcgaagtctgtgagcatcaaccccactccatgggtttgtctcctggtacccaaagaaatactgagttgtgtccacaacatggctgggtcttcagacccctggctcaccatgtgggtgtcttgggcagtttctatcacacatgggacaaggggagggagtttttctaacatggaaaaagattctcagcctgccgcccagcatgcaggtggcctcgctttgccgggtccgagaggctccccgtcaattttgcacgggatcctagctcttgtaggcagacaccagtgcactctagatacctcctgagacctccgtcctctgctttccgggcagctctcaccaccccaggccccggcatgaggcctttcctcagtcctgtggcctctcagaggacacctgatgctcacctgcccctctttctcctgcacttggcttgcagtgagatgctcccagatgcatttgtccagtgccccatcatgggcctgaaaggcagagaaactttttcctacacagattcttttccccatctcctcctgtggtttgcatccatggctctttggccatgaggttcctggcagtgctgggagtttggatgggatcgtgcccagctttgcttagctttctttatttctgcaaatctgttagcataattccaaggtggccaagcagatgtcacatggagttagtcaaagcacaaagtcacgattccacaatggaggggagacctggccaagggagccagccagcgtgcaactgcccaagctccaggtctccaggacaagagcagttgtctgccatgagcacccatccaggatggagaataagggcttctctgcctctcagaattctttttaattgaagatgtcttgagctctgcaaagatcagagcaggtgagcatccactttgacatgaaggacaagaagacgcatggctcatggcgggcacatgcggctgccagtgagacagcgtctcctctgggagctgggcgggcacagcatcctcagttctgtgcccagccaagggtgagcatctctgctgagacagtccttttgctctcggaggccagggaagatggtacttagaggcttttcccctatcgctctgggtgtctaggaatcccaccagcttgtcttaacagtacaacagcttctttgaggacccagtgggtatggagtatagacagaacccagggttgagaacagaaggtgggcggcaggatcagagtgaaagcagaggcgtgaggagaggaaagcagggaggtctcctgggctgccaggtcagcctctctggcaaggctttcttgagccccgcccctttctttccccggagtccctccaccccataacaatacctcgaatttccaaaagaggtcaccagatgcacatgggccgcaaaacacacagtcaggcttccagcacattctcccccatttggaggatactcgaatgtcaggtttttggttttattattatttcagaactagctcagcccatctctaattataaaacatggttttgttttttttttttcctttttttcttgattaggtctggaacagctctagaatgaacacataaaatttagcaatttaaaatctttctttactgcaagtttaaatagttgtacagatagtttataagcacaatattttaagaaaaaaaagtggctggtctactaggcagcctttgtgccacttcagtgctagaaagttaaagaaaaaaaaacttttgtgatttaataatactatttctgtggaataattataaaagtatgacctttttaaatcaaccttatttggatgcatctgaaccagcagagctgtgttatattttctatctttgctagaacttcgtcattgaaggacaatttcttcaaagtggttacaattcataatgcagcagtttctccaaaaacaaaaacaaaacacacaccacacacacgcgcttttccagtcacacacccctgatgttggaaccaagtttttggaccttctgttccaaaaccttttgcaggtcaatctttgtatttgaaatgatccaatccaacttgaagtcaattgaatattaaggcgctttacttccgtgtgctttcagtttttccatcatgagatgaatgagcattactctagataaatttcaagacaggatactacaggtggcctgctgaggctgccccatattttagaaaatgtaaaaatggtggtttggccattaatttgtcttccatttgatgataccgcaaaattccgtgagtccattcctttggcatggcactttccctgggcctacagttggtattacctctgtgctcagtgccaggcaaaacactagctcaaaggagagtcaaggaaaccgctggcagacgataaccagtcgaaactcgtgacttcggtttgttgaactttggcagccagttggtgagggccagatgttattccctttcttaaagatactccaagccacatgccactaaccacaagcaagctggctgcaagactaaagagctgataacatagtttatttttacactgtcttattatagagaagtaatagacctatcagaacctgcactgaccaacaaataaacacatgttgccaagatgaatcggtctctatctctatctgcttattttggtactgaaagcaatagttcctcattcaaatcaccacccactgttctccccctttgggacatgttaggacgaggccctattccatgcccctctttaatggtggaacaaatgttaaactgctcatctaaagatcatgttgatattattccaggttttaagatcaacttttgttacatactgtaatttaaataaactgcatttacatgcctagtttctgtaatattgtgtatacaaaacccaaatctctcaaaatgtaaattatgtatacctgccaagataccttttccagggtgtctgcgcacattttaagttaattcacataatataaaaattactcaatgtgactgttgatttgctgaactttacatatcacaaagtgaattatttgtgatactttagttaataaaatggtaaatttttttctcagttattgaacaagcaagcattatccagttgatctggcaatgactttttgtgtgtgggccacaatattgattttcccattaacaatttttttttgttttttaaatactaatatgtttcacactatagtttgtgtaacaacacgtgttcgcattatctatgttgctgttacttttgtgcttttattctttttagactttataaaaaaaaaaaaaagctcctgtaatttgcactttctcccaatccttaaatctcttgtatggcaaccaaaattactgtaaaaaaataaatatactattgcactaaggttgtggttctgattgcaaacaaacagtgaacactgtctgaattaaacaaaaagctgcccgacttgcaatctaatgtagattatctcaggcattgtggccagctctgcctctctaaaactgaccagaaaaatctctctcatcgagtaaacaggctcctgtcactgagctaatctgccttggttccatttccttattctcaatttatcaatggatacgtgcatgttatttcagaattatgcaaaacgtcaaaatctgcttctgtgaccgctgctataggcgtggagctgaggctcggcttttccttttgttctgggtggaagcagcggtgccgcggagggccagccagatccggacccttcccttagggtccagtctccccacaccccagcagggtgtcttctagccataaggccaagggagtggcagaactgggccgcctctctggttgacaagcaaaccacatgctaaggcttggagcaagagagaatttgtgtctattggcaaagaactaagccaggaagacatgggccatccctccgctttagggaagcatattttaaacctaaacgttgaacttcttctttggcctcaccagtgaaaacttgttgtctttagttcctaaagtttcttctactttggcacattccccagttgagcagcagcctctatgcttccacgttcaggaaaaattccagtcctcatatcttttgtagttcaccctcaagctctcccgcttcaccatccaatagtttctcccaaaccttggcacccccctagactttgcttccaatggtttcttccagaccacttttcctagatgaatatattcgtttaccttactaggaaaattattggaagattttttcttttacttgaaattggaggcattttaataactggcgaactggaatgtgtttctgtatttgtagacaaccatgaacccatgcaagtaggtgaacattccacagtggctgggtgaccacagcagctgcatgcagacaggactgcccgtgctttgtggggaatcagagaatttccaaacttgtttctcagacttccgcagatctcatcactttgatttctaatccatgctgtattggtgattttgtttatcgttcctgtaacttgttctacattccacagtctttaccgttttatgttcaaaattacaacaatccctgtccattgattccactctggaactctttgttcatgccaattttgaaattttaatacgagccttcaaataaacacagaaaagaaaaaaaaaaaggaaaaaaaataaagtgtgtgccttgggtgttttgaacctgatctgcataaaaccatattgtattcaaatgctgtatctttcatgaaaggataaatatatcttcaatgtattaatgtagctgataaaatagttatagtgccttgttttctgaactgagaagcccatatcaatgcacaacgtaaagaaaggacggttcgagctatgaaatgttgaggacacctacacgtgattctggagcctttctcatcataagactgtggaaaatacacagtcgtttaagttaaaaataaaaagtaaattga

SEQ ID NO: 181007 - DNA, 939 bp, Homo sapiens
  Payload ID: 15646
  Gene Symbol: SHANK2
  Gene Name: SH3 and multiple ankyrin repeat domains 2
  ENST ID: ENST00000449116
  CDS Start-End: 74-889
ctcctcctgcaccctcgctgcctcctttcctccatgctgcctggatctggcgagctggggtgattaattggctatgatgatgaacgtccccggcggaggagcggccgcggtgatgatgacgggctacaataatggtcgctgtccccggaattctctctacagtgactgcattattgaggagaagacggtggtcctgcagaaaaaagacaatgagggctttggattcgtgcttcgaggggccaaagctgacacacccattgaagaattcacaccaacaccggctttcccagccctacagtacctggagtccgtggatgaaggtggggtggcgtggcaagccggactaaggaccggggacttcttgattgaggttaacaatgagaatgttgtcaaagtcggccacaggcaggtggtgaacatgatccggcagggagggaatcacctggtccttaaggtggtcacggtgaccaggaatctggaccccgacgacaccgccaggaagaaagctcccccgcctccaaagcgggcaccgaccacagccctcaccctgcgctccaagtccatgacctcggagctggaggagctcgataaacccgaggagatagtcccggcctccaagccctcccgcgctgctgagaacatggctgtggaaccgagggtggcgaccatcaagcagcggcccagcagccggtgcttcccggcgggctcagacatgaactctgtgtacgaacgccaaggaatcgccgtgatgacgcccactgttcctgggagcccaaaagccccgtttctgggcatccctcgaggtacgatgcgaaggcagaaatcaataggtaagaagtgtggcactcccccacagaagttgcccctgggctttcaaacacagccttaggcccctcaggaattctgagccctgggcctctcacagttgccttggcgtcc

SEQ ID NO: 181008 - DNA, 8850 bp, Homo sapiens
  Payload ID: 15646
  Gene Symbol: SHANK2
  Gene Name: SH3 and multiple ankyrin repeat domains 2
  ENST ID: ENST00000449833
  CDS Start-End: 52-3837
tcctttcctccatgctgcctggatctggcgagctggggtgattaattggctatgatgatgaacgtccccggcggaggagcggccgcggtgatgatgacgggctacaataatggtcgctgtccccggaattctctctacagtgactgcattattgaggagaagacggtggtcctgcagaaaaaagacaatgagggctttggattcgtgcttcgaggggccaaagctgacacacccattgaagaattcacaccaacaccggctttcccagccctacagtacctggagtccgtggatgaaggtggggtggcgtggcaagccggactaaggaccggggacttcttgattgaggttaacaatgagaatgttgtcaaagtcggccacaggcaggtggtgaacatgatccggcagggagggaatcacctggtccttaaggtggtcacggtgaccaggaatctggaccccgacgacaccgccaggaagaaagctcccccgcctccaaagcgggcaccgaccacagccctcaccctgcgctccaagtccatgacctcggagctggaggagctcggtttgcaagcctcggtccggaagaagaaggataaacccgaggagatagtcccggcctccaagccctcccgcgctgctgagaacatggctgtggaaccgagggtggcgaccatcaagcagcggcccagcagccggtgcttcccggcgggctcagacatgaactctgtgtacgaacgccaaggaatcgccgtgatgacgcccactgttcctgggagcccaaaagccccgtttctgggcatccctcgaggtacgatgcgaaggcagaaatcaatagacagcagaatctttctatcaggaataacagaggaagagcggcagtttctggctcctccaatgctgaagttcaccagaagcctgtccatgccggacacctctgaggacatcccccctccaccgcagtctgtgcccccgtccccaccaccaccttccccaaccacttacaactgccccaagtccccaactccaagagtctacgggacgattaagcctgcgttcaatcagaattctgccgccaaggtgtcccccgccaccaggtccgacaccgtggccaccatgatgagggagaaggggatgtacttcaggagagagctggaccgctactccttggactctgaagacctctacagtcggaatgccggcccgcaagccaacttccgcaacaagagaggccagatgccagaaaacccatactcagaggtggggaagatcgccagcaaagccgtctacgtccccgccaagcccgccaggcggaaggggatgctggtgaagcagtccaacgtggaggacagccccgagaagacgtgctccatccctatcccgaccatcatcgtgaaggagccgtccaccagcagcagcggcaagagcagccagggcagcagcatggagatcgacccccaggccccggagccaccgagccagctgcggcctgacgaaagcctgaccgtcagcagcccctttgccgccgccatcgccggagccgtccgcgaccgtgagaagcggctggaagccaggaggaactccccggccttcctctccacagacctgggggatgaggatgtgggcctggggccacccgcccccaggacgcggccctccatgttccccgaggagggggattttgctgacgaggacagcgctgagcagctgtcatcccccatgccgagtgccacgcccagggagcccgaaaaccatttcgtgggtggcgccgaggccagtgctccgggtgaggctgggaggccgctgaattccacgtccaaagcccaggggcccgagagcagcccagcagtgccctccgcgagcagcggcacagccggccccgggaattatgtccacccactcacagggcggctgcttgatcccagctccccgctggccctggcactctccgcaagggaccgagccatgaaggagtctcaacagggacccaaaggggaggcccccaaggccgacctcaacaaacctctttacattgataccaaaatgcggcccagcctggatgccggcttccctacggtcaccaggcagaacacccggggacccctgaggcggcaggagacggagaacaagtacgagaccgacctgggccgagaccggaaaggcgatgacaagaagaacatgctgatcgacatcatggacacgtcccagcagaagtcggctggcctgctgatggtgcacaccgtggacgccactaagctggacaacgccctgcaggaagaggacgagaaggcagaggtggagatgaagccagacagctcgccgtccgaggtgccagaaggtgtttccgaaaccgaaggtgctttacagatctccgctgcccccgagcccaccaccgtgcccggcagaaccatcgtcgcggtgggctccatggaagaggcggtgattttgccattccgcatccctcctccccctctggcatccgtggacttggatgaggattttatttttacagagccattgcctcctcccctggaatttgcaaatagttttgatatccccgatgaccgggcagcttctgtcccggctctctcagacttagtgaagcagaagaaaagcgacacccctcagtccccttcgttgaactccagccaaccaaccaactctgcagacagcaagaagccagccagtctttcaaactgtctgcctgcctcattcctgccaccccctgaaagctttgacgccgtcgccgactctgggatcgaggaggtggacagccggagtagcagcgaccaccacctcgagacgaccagcactatctccaccgtgtctagcatctccaccctgtcttccgaaggtggagagaatgtggacacctgcacagtctatgcagatgggcaagcatttatggttgacaaacccccagtacctcctaagccaaaaatgaagcccatcattcacaaaagcaatgcactttatcaagacgcgctcgtggaagaagatgtagatagctttgttatccccccgcccgctcccccgcccccgccgggcagtgcccagcctgggatggccaaggttctccagccaaggacctccaagttgtggggcgacgtcacagagatcaaaagcccgattctctcaggcccaaaggcaaacgttattagtgaattgaactctatcctacagcaaatgaaccgagagaaattggcaaagccgggggaaggactggattcaccaatgggagccaagtccgccagcctcgctccaagaagcccggagatcatgagcaccatctcaggtacacggagcacgacggtcaccttcactgttcgccccggcacctcccagcccatcaccctgcagagccggccccccgactatgaaagcaggacctcaggaacaagacgtgccccaagccctgtggtctcgccaacagagatgaacaaagagaccctgcccgcccccctgtctgctgccaccgcctctccttctcccgctctctcagatgtctttagccttccaagccagcccccttctggggatctatttggcttgaacccagcgggacgcagtaggtcgccatccccctcgatactgcaacagccaatctcaaataagccttttacaactaaacctgtccacctgtggactaaaccagatgtggccgattggctggaaagtctaaacttgggtgaacataaagaggccttcatggacaatgagatcgatggcagtcacttaccaaacctgcagaaggaggacctcatcgatcttggggtaactcgagtcgggcacagaatgaacatagaaagggctttgaaacagctgctggacagataaggacggctgctctccacctcgcagactgctcttgttataagtagagatgggctcgtgctgaaacatctgaatgccaagcgaagtctgtgagcatcaaccccactccatgggtttgtctcctggtacccaaagaaatactgagttgtgtccacaacatggctgggtcttcagacccctggctcaccatgtgggtgtcttgggcagtttctatcacacatgggacaaggggagggagtttttctaacatggaaaaagattctcagcctgccgcccagcatgcaggtggcctcgctttgccgggtccgagaggctccccgtcaattttgcacgggatcctagctcttgtaggcagacaccagtgcactctagatacctcctgagacctccgtcctctgctttccgggcagctctcaccaccccaggccccggcatgaggcctttcctcagtcctgtggcctctcagaggacacctgatgctcacctgcccctctttctcctgcacttggcttgcagtgagatgctcccagatgcatttgtccagtgccccatcatgggcctgaaaggcagagaaactttttcctacacagattcttttccccatctcctcctgtggtttgcatccatggctctttggccatgaggttcctggcagtgctgggagtttggatgggatcgtgcccagctttgcttagctttctttatttctgcaaatctgttagcataattccaaggtggccaagcagatgtcacatggagttagtcaaagcacaaagtcacgattccacaatggaggggagacctggccaagggagccagccagcgtgcaactgcccaagctccaggtctccaggacaagagcagttgtctgccatgagcacccatccaggatggagaataagggcttctctgcctctcagaattctttttaattgaagatgtcttgagctctgcaaagatcagagcaggtgagcatccactttgacatgaaggacaagaagacgcatggctcatggcgggcacatgcggctgccagtgagacagcgtctcctctgggagctgggcgggcacagcatcctcagttctgtgcccagccaagggtgagcatctctgctgagacagtccttttgctctcggaggccagggaagatggtacttagaggcttttcccctatcgctctgggtgtctaggaatcccaccagcttgtcttaacagtacaacagcttctttgaggacccagtgggtatggagtatagacagaacccagggttgagaacagaaggtgggcggcaggatcagagtgaaagcagaggcgtgaggagaggaaagcagggaggtctcctgggctgccaggtcagcctctctggcaaggctttcttgagccccgcccctttctttccccggagtccctccaccccataacaatacctcgaatttccaaaagaggtcaccagatgcacatgggccgcaaaacacacagtcaggcttccagcacattctcccccatttggaggatactcgaatgtcaggtttttggttttattattatttcagaactagctcagcccatctctaattataaaacatggttttgttttttttttttcctttttttcttgattaggtctggaacagctctagaatgaacacataaaatttagcaatttaaaatctttctttactgcaagtttaaatagttgtacagatagtttataagcacaatattttaagaaaaaaaagtggctggtctactaggcagcctttgtgccacttcagtgctagaaagttaaagaaaaaaaaacttttgtgatttaataatactatttctgtggaataattataaaagtatgacctttttaaatcaaccttatttggatgcatctgaaccagcagagctgtgttatattttctatctttgctagaacttcgtcattgaaggacaatttcttcaaagtggttacaattcataatgcagcagtttctccaaaaacaaaaacaaaacacacaccacacacacgcgcttttccagtcacacacccctgatgttggaaccaagtttttggaccttctgttccaaaaccttttgcaggtcaatctttgtatttgaaatgatccaatccaacttgaagtcaattgaatattaaggcgctttacttccgtgtgctttcagtttttccatcatgagatgaatgagcattactctagataaatttcaagacaggatactacaggtggcctgctgaggctgccccatattttagaaaatgtaaaaatggtggtttggccattaatttgtcttccatttgatgataccgcaaaattccgtgagtccattcctttggcatggcactttccctgggcctacagttggtattacctctgtgctcagtgccaggcaaaacactagctcaaaggagagtcaaggaaaccgctggcagacgataaccagtcgaaactcgtgacttcggtttgttgaactttggcagccagttggtgagggccagatgttattccctttcttaaagatactccaagccacatgccactaaccacaagcaagctggctgcaagactaaagagctgataacatagtttatttttacactgtcttattatagagaagtaatagacctatcagaacctgcactgaccaacaaataaacacatgttgccaagatgaatcggtctctatctctatctgcttattttggtactgaaagcaatagttcctcattcaaatcaccacccactgttctccccctttgggacatgttaggacgaggccctattccatgcccctctttaatggtggaacaaatgttaaactgctcatctaaagatcatgttgatattattccaggttttaagatcaacttttgttacatactgtaatttaaataaactgcatttacatgcctagtttctgtaatattgtgtatacaaaacccaaatctctcaaaatgtaaattatgtatacctgccaagataccttttccagggtgtctgcgcacattttaagttaattcacataatataaaaattactcaatgtgactgttgatttgctgaactttacatatcacaaagtgaattatttgtgatactttagttaataaaatggtaaatttttttctcagttattgaacaagcaagcattatccagttgatctggcaatgactttttgtgtgtgggccacaatattgattttcccattaacaatttttttttgttttttaaatactaatatgtttcacactatagtttgtgtaacaacacgtgttcgcattatctatgttgctgttacttttgtgcttttattctttttagactttataaaaaaaaaaaaaagctcctgtaatttgcactttctcccaatccttaaatctcttgtatggcaaccaaaattactgtaaaaaaataaatatactattgcactaaggttgtggttctgattgcaaacaaacagtgaacactgtctgaattaaacaaaaagctgcccgacttgcaatctaatgtagattatctcaggcattgtggccagctctgcctctctaaaactgaccagaaaaatctctctcatcgagtaaacaggctcctgtcactgagctaatctgccttggttccatttccttattctcaatttatcaatggatacgtgcatgttatttcagaattatgcaaaacgtcaaaatctgcttctgtgaccgctgctataggcgtggagctgaggctcggcttttccttttgttctgggtggaagcagcggtgccgcggagggccagccagatccggacccttcccttagggtccagtctccccacaccccagcagggtgtcttctagccataaggccaagggagtggcagaactgggccgcctctctggttgacaagcaaaccacatgctaaggcttggagcaagagagaatttgtgtctattggcaaagaactaagccaggaagacatgggccatccctccgctttagggaagcatattttaaacctaaacgttgaacttcttctttggcctcaccagtgaaaacttgttgtctttagttcctaaagtttcttctactttggcacattccccagttgagcagcagcctctatgcttccacgttcaggaaaaattccagtcctcatatcttttgtagttcaccctcaagctctcccgcttcaccatccaatagtttctcccaaaccttggcacccccctagactttgcttccaatggtttcttccagaccacttttcctagatgaatatattcgtttaccttactaggaaaattattggaagattttttcttttacttgaaattggaggcattttaataactggcgaactggaatgtgtttctgtatttgtagacaaccatgaacccatgcaagtaggtgaacattccacagtggctgggtgaccacagcagctgcatgcagacaggactgcccgtgctttgtggggaatcagagaatttccaaacttgtttctcagacttccgcagatctcatcactttgatttctaatccatgctgtattggtgattttgtttatcgttcctgtaacttgttctacattccacagtctttaccgttttatgttcaaaattacaacaatccctgtccattgattccactctggaactctttgttcatgccaattttgaaattttaatacgagccttcaaataaacacagaaaagaaaaaaaaaaaggaaaaaaaataaagtgtgtgccttgggtgttttgaacctgatctgcataaaaccatattgtattcaaatgctgtatctttcatgaaaggataaatatatcttcaatgtattaatgtagctgataaaatagttatagtgccttgttttctgaactgagaagcccatatcaatgcacaacgtaaagaaaggacggttcgagctatgaaatgttgaggacacctacacgtgattctggagcctttctcatcataagactgtggaaaatacacagtcgtttaagttaaaaataaaaagtaaattga

SEQ ID NO: 181009 - DNA, 6821 bp, Homo sapiens
  Payload ID: 15646
  Gene Symbol: SHANK2
  Gene Name: SH3 and multiple ankyrin repeat domains 2
  ENST ID: ENST00000424924
  CDS Start-End: 1-3387
ctggtccttaaggtggtcacggtgaccaggaatctggaccccgacgacaccgccaggaagaaagctcccccgcctccaaagcgggcaccgaccacagccctcaccctgcgctccaagtccatgacctcggagctggaggagctcgataaacccgaggagatagtcccggcctccaagccctcccgcgctgctgagaacatggctgtggaaccgagggtggcgaccatcaagcagcggcccagcagccggtgcttcccggcgggctcagacatgaactctgtgtacgaacgccaaggaatcgccgtgatgacgcccactgttcctgggagcccaaaagccccgtttctgggcatccctcgaggtacgatgcgaaggcagaaatcaatagacagcagaatctttctatcaggaataacagaggaagagcggcagtttctggctcctccaatgctgaagttcaccagaagcctgtccatgccggacacctctgaggacatcccccctccaccgcagtctgtgcccccgtccccaccaccaccttccccaaccacttacaactgccccaagtccccaactccaagagtctacgggacgattaagcctgcgttcaatcagaattctgccgccaaggtgtcccccgccaccaggtccgacaccgtggccaccatgatgagggagaaggggatgtacttcaggagagagctggaccgctactccttggactctgaagacctctacagtcggaatgccggcccgcaagccaacttccgcaacaagagaggccagatgccagaaaacccatactcagaggtggggaagatcgccagcaaagccgtctacgtccccgccaagcccgccaggcggaaggggatgctggtgaagcagtccaacgtggaggacagccccgagaagacgtgctccatccctatcccgaccatcatcgtgaaggagccgtccaccagcagcagcggcaagagcagccagggcagcagcatggagatcgacccccaggccccggagccaccgagccagctgcggcctgacgaaagcctgaccgtcagcagcccctttgccgccgccatcgccggagccgtccgcgaccgtgagaagcggctggaagccaggaggaactccccggccttcctctccacagacctgggggatgaggatgtgggcctggggccacccgcccccaggacgcggccctccatgttccccgaggagggggattttgctgacgaggacagcgctgagcagctgtcatcccccatgccgagtgccacgcccagggagcccgaaaaccatttcgtgggtggcgccgaggccagtgctccgggtgaggctgggaggccgctgaattccacgtccaaagcccaggggcccgagagcagcccagcagtgccctccgcgagcagcggcacagccggccccgggaattatgtccacccactcacagggcggctgcttgatcccagctccccgctggccctggcactctccgcaagggaccgagccatgaaggagtctcaacagggacccaaaggggaggcccccaaggccgacctcaacaaacctctttacattgataccaaaatgcggcccagcctggatgccggcttccctacggtcaccaggcagaacacccggggacccctgaggcggcaggagacggagaacaagtacgagaccgacctgggccgagaccggaaaggcgatgacaagaagaacatgctgatcgacatcatggacacgtcccagcagaagtcggctggcctgctgatggtgcacaccgtggacgccactaagctggacaacgccctgcaggaagaggacgagaaggcagaggtggagatgaagccagacagctcgccgtccgaggtgccagaaggtgtttccgaaaccgaaggtgctttacagatctccgctgcccccgagcccaccaccgtgcccggcagaaccatcgtcgcggtgggctccatggaagaggcggtgattttgccattccgcatccctcctccccctctggcatccgtggacttggatgaggattttatttttacagagccattgcctcctcccctggaatttgcaaatagttttgatatccccgatgaccgggcagcttctgtcccggctctctcagacttagtgaagcagaagaaaagcgacacccctcagtccccttcgttgaactccagccaaccaaccaactctgcagacagcaagaagccagccagtctttcaaactgtctgcctgcctcattcctgccaccccctgaaagctttgacgccgtcgccgactctgggatcgaggaggtggacagccggagtagcagcgaccaccacctcgagacgaccagcactatctccaccgtgtctagcatctccaccctgtcttccgaaggtggagagaatgtggacacctgcacagtctatgcagatgggcaagcatttatggttgacaaacccccagtacctcctaagccaaaaatgaagcccatcattcacaaaagcaatgcactttatcaagacgcgctcgtggaagaagatgtagatagctttgttatccccccgcccgctcccccgcccccgccgggcagtgcccagcctgggatggccaaggttctccagccaaggacctccaagttgtggggcgacgtcacagagatcaaaagcccgattctctcaggcccaaaggcaaacgttattagtgaattgaactctatcctacagcaaatgaaccgagagaaattggcaaagccgggggaaggactggattcaccaatgggagccaagtccgccagcctcgctccaagaagcccggagatcatgagcaccatctcaggtacacggagcacgacggtcaccttcactgttcgccccggcacctcccagcccatcaccctgcagagccggccccccgactatgaaagcaggacctcaggaacaagacgtgccccaagccctgtggtctcgccaacagagatgaacaaagagaccctgcccgcccccctgtctgctgccaccgcctctccttctcccgctctctcagatgtctttagccttccaagccagcccccttctggggatctatttggcttgaacccagcgggacgcagtaggtcgccatccccctcgatactgcaacagccaatctcaaataagccttttacaactaaacctgtccacctgtggactaaaccagatgtggccgattggctggaaagtctaaacttgggtgaacataaagaggccttcatggacaatgagatcgatggcagtcacttaccaaacctgcagaaggaggacctcatcgatcttggggtaactcgagtcgggcacagaatgaacatagaaagggctttgaaacagctgctggacagataaggacggctgctctccacctcgcagactgctcttgttataagtagagatgggctcgtgctgaaacatctgaatgccaagcgaagtctgtgagcatcaaccccactccatgggtttgtctcctggtacccaaagaaatactgagttgtgtccacaacatggctgggtcttcagacccctggctcaccatgtgggtgtcttgggcagtttctatcacacatgggacaaggggagggagtttttctaacatggaaaaagattctcagcctgccgcccagcatgcaggtggcctcgctttgccgggtccgagaggctccccgtcaattttgcacgggatcctagctcttgtaggcagacaccagtgcactctagatacctcctgagacctccgtcctctgctttccgggcagctctcaccaccccaggccccggcatgaggcctttcctcagtcctgtggcctctcagaggacacctgatgctcacctgcccctctttctcctgcacttggcttgcagtgagatgctcccagatgcatttgtccagtgccccatcatgggcctgaaaggcagagaaactttttcctacacagattcttttccccatctcctcctgtggtttgcatccatggctctttggccatgaggttcctggcagtgctgggagtttggatgggatcgtgcccagctttgcttagctttctttatttctgcaaatctgttagcataattccaaggtggccaagcagatgtcacatggagttagtcaaagcacaaagtcacgattccacaatggaggggagacctggccaagggagccagccagcgtgcaactgcccaagctccaggtctccaggacaagagcagttgtctgccatgagcacccatccaggatggagaataagggcttctctgcctctcagaattctttttaattgaagatgtcttgagctctgcaaagatcagagcaggtgagcatccactttgacatgaaggacaagaagacgcatggctcatggcgggcacatgcggctgccagtgagacagcgtctcctctgggagctgggcgggcacagcatcctcagttctgtgcccagccaagggtgagcatctctgctgagacagtccttttgctctcggaggccagggaagatggtacttagaggcttttcccctatcgctctgggtgtctaggaatcccaccagcttgtcttaacagtacaacagcttctttgaggacccagtgggtatggagtatagacagaacccagggttgagaacagaaggtgggcggcaggatcagagtgaaagcagaggcgtgaggagaggaaagcagggaggtctcctgggctgccaggtcagcctctctggcaaggctttcttgagccccgcccctttctttccccggagtccctccaccccataacaatacctcgaatttccaaaagaggtcaccagatgcacatgggccgcaaaacacacagtcaggcttccagcacattctcccccatttggaggatactcgaatgtcaggtttttggttttattattatttcagaactagctcagcccatctctaattataaaacatggttttgttttttttttttcctttttttcttgattaggtctggaacagctctagaatgaacacataaaatttagcaatttaaaatctttctttactgcaagtttaaatagttgtacagatagtttataagcacaatattttaagaaaaaaaagtggctggtctactaggcagcctttgtgccacttcagtgctagaaagttaaagaaaaaaaaacttttgtgatttaataatactatttctgtggaataattataaaagtatgacctttttaaatcaaccttatttggatgcatctgaaccagcagagctgtgttatattttctatctttgctagaacttcgtcattgaaggacaatttcttcaaagtggttacaattcataatgcagcagtttctccaaaaacaaaaacaaaacacacaccacacacacgcgcttttccagtcacacacccctgatgttggaaccaagtttttggaccttctgttccaaaaccttttgcaggtcaatctttgtatttgaaatgatccaatccaacttgaagtcaattgaatattaaggcgctttacttccgtgtgctttcagtttttccatcatgagatgaatgagcattactctagataaatttcaagacaggatactacaggtggcctgctgaggctgccccatattttagaaaatgtaaaaatggtggtttggccattaatttgtcttccatttgatgataccgcaaaattccgtgagtccattcctttggcatggcactttccctgggcctacagttggtattacctctgtgctcagtgccaggcaaaacactagctcaaaggagagtcaaggaaaccgctggcagacgataaccagtcgaaactcgtgacttcggtttgttgaactttggcagccagttggtgagggccagatgttattccctttcttaaagatactccaagccacatgccactaaccacaagcaagctggctgcaagactaaagagctgataacatagtttatttttacactgtcttattatagagaagtaatagacctatcagaacctgcactgaccaacaaataaacacatgttgccaagatgaatcggtctctatctctatctgcttattttggtactgaaagcaatagttcctcattcaaatcaccacccactgttctccccctttgggacatgttaggacgaggccctattccatgcccctctttaatggtggaacaaatgttaaactgctcatctaaagatcatgttgatattattccaggttttaagatcaacttttgttacatactgtaatttaaataaactgcatttacatgcctagtttctgtaatattgtgtatacaaaacccaaatctctcaaaatgtaaattatgtatacctgccaagataccttttccagggtgtctgcgcacattttaagttaattcacataatataaaaattactcaatgtgactgttgatttgctgaactttacatatcacaaagtgaattatttgtgatactttagttaataaaatggtaaatttttttctcagttattgaacaagcaagcattatccagttgatctggcaatgactttttgtgtgtgggccacaatattgattttcccattaacaatttttttttgttttttaaatactaatatgtttcacactatagtttgtgtaacaacacgtgttcgcattatctatgttgctgttacttttgtgcttttattctttttagactttataaaaaaaaaaaaaagctcctgtaatttgcactttctcccaatccttaaatctcttgtatggcaaccaaaattactgtaaaaaaataaatatactattgcact

SEQ ID NO: 181010 - DNA, 1376 bp, Homo sapiens
  Payload ID: 15646
  Gene Symbol: SHANK2
  Gene Name: SH3 and multiple ankyrin repeat domains 2
  ENST ID: ENST00000412252
  CDS Start-End: 1-772
gatgaacgtccccggcggaggagcggccgcggtgatgatgacgggctacaataatggtcgctgtccccggaattctctctacagtgactgcattattgaggagaagacggtggtcctgcagaaaaaagacaatgagggctttggattcgtgcttcgaggggccaaagctgacacacccattgaagaattcacaccaacaccggctttcccagccctacagtacctggagtccgtggatgaaggtggggtggcgtggcaagccggactaaggaccggggacttcttgattgaggttaacaatgagaatgttgtcaaagtcggccacaggcaggtggtgaacatgatccggcagggagggaatcacctggtccttaaggtggtcacggtgaccaggaatctggaccccgacgacaccgccaggaagaaagctcccccgcctccaaagcgggcaccgaccacagccctcaccctgcgctccaagtccatgacctcggagctggaggagctcgtggataaagcctcggtccggaagaagaaggataaacccgaggagatagtcccggcctccaagccctcccgcgctgctgagaacatggctgtggaaccgagggtggcgaccatcaagcagcggcccagcagccggtgcttcccggcgggctcagacatgaactctgtgtacgaacgccaaggaatcgccgtgatgacgcccactgttcctgggagcccaaaagccccgtttctgggcatccctcgagaagcccggagatcatgagcaccatctcaggtacacggagcacgacggtcaccttcactgttcgccccggcacctcccagcccatcaccctgcagagccggccccccgactatgaaagcaggacctcaggaacaagacgtgccccaagccctgtggtctcgccaacagagatgaacaaagagaccctgcccgcccccctgtctgctgccaccgcctctccttctcccgctctctcagatgtctttagccttccaagccagcccccttctggggatctatttggcttgaacccagcgggacgcagtaggtcgccatccccctcgatactgcaacagccaatctcaaataagccttttacaactaaacctgtccacctgtggactaaaccagatgtggccgattggctggaaagtctaaacttgggtgaacataaagaggccttcatggacaatgagatcgatggcagtcacttaccaaacctgcagaaggaggacctcatcgatcttggggtaactcgagtcgggcacagaatgaacatagaaagggctttgaaacagctgctggacagataaggacggctgctctccacctcgcagactgctcttgttataagtagagatgg

SEQ ID NO: 181011 - DNA, 9062 bp, Homo sapiens
  Payload ID: 15646
  Gene Symbol: SHANK2
  Gene Name: SH3 and multiple ankyrin repeat domains 2
  Uniprot ID: Q9UPX8
  ENST ID: ENST00000601538
  CDS Start-End: 79-5628
ctctagaatacagacagttcctgctctaagaggccatctgtgaggctcagtctcccaacacctctgacacaggcagccatgccgcgcagcccaacatccagcgaggacgagatggcccagagcttctccgactactccgtggggtcggagtcagacagctccaaagaagagaccatctatgacacgatccgggccactgcggagaagccgggcggtgccaggacggaggagagccagggcaacacgctggtgatccgcgtggtcatccatgacctgcagcagacgaaatgcattcgatttaacccggatgccacagtgtgggttgcaaagcagcggatcctgtgtacattaacccagagtttgaaagatgtcctgaactacggcctgttccagccggccagcaatgggcgtgacggcaagttcctggatgaggagcggctcctgcgcgagtacccacagcccgtgggtgagggcgttccttccctggagtttcgatacaagaagcgggtgtataaacaagccagtctcgatgagaaacagttggccaagctccacacgaagaccaatctgaagaaatgcatggatcacattcagcatcgcttggtggagaagatcaccaagatgctggaccgaggcctggatcccaatttccacgacccggagaccggagagacccccctgaccttagccgctcagctggacgactctgtggaggtcatcaaagctctcaaaaatggtggagctcacctggacttccgtgccaaagatgggatgaccgccctacacaaagctgcccgagcgaggaaccaagttgccctgaagacccttttagagcttggtgcatccccagattataaagacagttacggcctcaccccgctgtatcacacagccatcgtcggaggtgatccctactgctgcgagcttctcctgcacgaacacgccactgtgtgctgcaaagatgagaacggctggcacgagatccaccaggcctgcaggtacgggcacgtgcagcacctggagcacctgctgttctacggggcagacatgagtgcccagaatgcctcggggaacacggccttgcacatctgcgccctctacaaccaggacagctgtgcaagagtgcttctgtttcgaggcggaaataaggagttaaaaaactacaacagccagactccatttcaggtggccataatagcaggcaactttgagctggcagaatacatcaagaaccacaaggaaacagacattgtgcccttccgagaggccccggcgtactccaaccgccggcggcggccccccaacacgctggccgccccccgggtcctgctgcgctccaacagtgacaacaacctcaatgccagcgctcccgactgggccgtctgctccacggccacctcgcaccgcagcctgtcaccccagctgctgcagcagatgcccagcaagcccgagggggccgcgaagaccattgggagctacgtgcccgggccccgcagccggtccccatcgctcaacaggctgggcggcgcaggcgaggacggcaagaggccgcagcctctctggcatgtcgggtcgccttttgctcttggtgccaacaaggactcactctcggccttcgagtacccggggcccaagcggaagctctacagtgccgtgcccgggaggctcttcgtcgctgtcaagccataccaaccccaagtggacggcgagatcccccttcaccgcggtgacagggtcaaagttctgagcatcggtgaagggggcttctgggaaggcagcgcccgcggccacatcggatggtttccggcggagtgcgtggaggaggtccagtgtaagcccagggacagccaggcagaaacccgcgctgaccgcagcaagaagcttttcaggcactacaccgtgggctcctatgacagcttcgacacttccagtgactgcattattgaggagaagacggtggtcctgcagaaaaaagacaatgagggctttggattcgtgcttcgaggggccaaagctgacacacccattgaagaattcacaccaacaccggctttcccagccctacagtacctggagtccgtggatgaaggtggggtggcgtggcaagccggactaaggaccggggacttcttgattgaggttaacaatgagaatgttgtcaaagtcggccacaggcaggtggtgaacatgatccggcagggagggaatcacctggtccttaaggtggtcacggtgaccaggaatctggaccccgacgacaccgccaggaagaaagctcccccgcctccaaagcgggcaccgaccacagccctcaccctgcgctccaagtccatgacctcggagctggaggagctcgtggataaagcctcggtccggaagaagaaggataaacccgaggagatagtcccggcctccaagccctcccgcgctgctgagaacatggctgtggaaccgagggtggcgaccatcaagcagcggcccagcagccggtgcttcccggcgggctcagacatgaactctgtgtacgaacgccaaggaatcgccgtgatgacgcccactgttcctgggagcccaaaagccccgtttctgggcatccctcgaggtacgatgcgaaggcagaaatcaatagacagcagaatctttctatcaggaataacagaggaagagcggcagtttctggctcctccaatgctgaagttcaccagaagcctgtccatgccggacacctctgaggacatcccccctccaccgcagtctgtgcccccgtccccaccaccaccttccccaaccacttacaactgccccaagtccccaactccaagagtctacgggacgattaagcctgcgttcaatcagaattctgccgccaaggtgtcccccgccaccaggtccgacaccgtggccaccatgatgagggagaaggggatgtacttcaggagagagctggaccgctactccttggactctgaagacctctacagtcggaatgccggcccgcaagccaacttccgcaacaagagaggccagatgccagaaaacccatactcagaggtggggaagatcgccagcaaagccgtctacgtccccgccaagcccgccaggcggaaggggatgctggtgaagcagtccaacgtggaggacagccccgagaagacgtgctccatccctatcccgaccatcatcgtgaaggagccgtccaccagcagcagcggcaagagcagccagggcagcagcatggagatcgacccccaggccccggagccaccgagccagctgcggcctgacgaaagcctgaccgtcagcagcccctttgccgccgccatcgccggagccgtccgcgaccgtgagaagcggctggaagccaggaggaactccccggccttcctctccacagacctgggggatgaggatgtgggcctggggccacccgcccccaggacgcggccctccatgttccccgaggagggggattttgctgacgaggacagcgctgagcagctgtcatcccccatgccgagtgccacgcccagggagcccgaaaaccatttcgtgggtggcgccgaggccagtgctccgggtgaggctgggaggccgctgaattccacgtccaaagcccaggggcccgagagcagcccagcagtgccctccgcgagcagcggcacagccggccccgggaattatgtccacccactcacagggcggctgcttgatcccagctccccgctggccctggcactctccgcaagggaccgagccatgaaggagtctcaacagggacccaaaggggaggcccccaaggccgacctcaacaaacctctttacattgataccaaaatgcggcccagcctggatgccggcttccctacggtcaccaggcagaacacccggggacccctgaggcggcaggagacggagaacaagtacgagaccgacctgggccgagaccggaaaggcgatgacaagaagaacatgctgatcgacatcatggacacgtcccagcagaagtcggctggcctgctgatggtgcacaccgtggacgccactaagctggacaacgccctgcaggaagaggacgagaaggcagaggtggagatgaagccagacagctcgccgtccgaggtgccagaaggtgtttccgaaaccgaaggtgctttacagatctccgctgcccccgagcccaccaccgtgcccggcagaaccatcgtcgcggtgggctccatggaagaggcggtgattttgccattccgcatccctcctccccctctggcatccgtggacttggatgaggattttatttttacagagccattgcctcctcccctggaatttgcaaatagttttgatatccccgatgaccgggcagcttctgtcccggctctctcagacttagtgaagcagaagaaaagcgacacccctcagtccccttcgttgaactccagccaaccaaccaactctgcagacagcaagaagccagccagtctttcaaactgtctgcctgcctcattcctgccaccccctgaaagctttgacgccgtcgccgactctgggatcgaggaggtggacagccggagtagcagcgaccaccacctcgagacgaccagcactatctccaccgtgtctagcatctccaccctgtcttccgaaggtggagagaatgtggacacctgcacagtctatgcagatgggcaagcatttatggttgacaaacccccagtacctcctaagccaaaaatgaagcccatcattcacaaaagcaatgcactttatcaagacgcgctcgtggaagaagatgtagatagctttgttatccccccgcccgctcccccgcccccgccgggcagtgcccagcctgggatggccaaggttctccagccaaggacctccaagttgtggggcgacgtcacagagatcaaaagcccgattctctcaggcccaaaggcaaacgttattagtgaattgaactctatcctacagcaaatgaaccgagagaaattggcaaagccgggggaaggactggattcaccaatgggagccaagtccgccagcctcgctccaagaagcccggagatcatgagcaccatctcaggtacacggagcacgacggtcaccttcactgttcgccccggcacctcccagcccatcaccctgcagagccggccccccgactatgaaagcaggacctcaggaacaagacgtgccccaagccctgtggtctcgccaacagagatgaacaaagagaccctgcccgcccccctgtctgctgccaccgcctctccttctcccgctctctcagatgtctttagccttccaagccagcccccttctggggatctatttggcttgaacccagcgggacgcagtaggtcgccatccccctcgatactgcaacagccaatctcaaataagccttttacaactaaacctgtccacctgtggactaaaccagatgtggccgattggctggaaagtctaaacttgggtgaacataaagaggccttcatggacaatgagatcgatggcagtcacttaccaaacctgcagaaggaggacctcatcgatcttggggtaactcgagtcgggcacagaatgaacatagaaagggctttgaaacagctgctggacagataaggacggctgctctccacctcgcagactgctcttgttataagtagagatgggctcgtgctgaaacatctgaatgccaagcgaagtctgtgagcatcaaccccactccatgggtttgtctcctggtacccaaagaaatactgagttgtgtccacaacatggctgggtcttcagacccctggctcaccatgtgggtgtcttgggcagtttctatcacacatgggacaaggggagggagtttttctaacatggaaaaagattctcagcctgccgcccagcatgcaggtggcctcgctttgccgggtccgagaggctccccgtcaattttgcacgggatcctagctcttgtaggcagacaccagtgcactctagatacctcctgagacctccgtcctctgctttccgggcagctctcaccaccccaggccccggcatgaggcctttcctcagtcctgtggcctctcagaggacacctgatgctcacctgcccctctttctcctgcacttggcttgcagtgagatgctcccagatgcatttgtccagtgccccatcatgggcctgaaaggcagagaaactttttcctacacagattcttttccccatctcctcctgtggtttgcatccatggctctttggccatgaggttcctggcagtgctgggagtttggatgggatcgtgcccagctttgcttagctttctttatttctgcaaatctgttagcataattccaaggtggccaagcagatgtcacatggagttagtcaaagcacaaagtcacgattccacaatggaggggagacctggccaagggagccagccagcgtgcaactgcccaagctccaggtctccaggacaagagcagttgtctgccatgagcacccatccaggatggagaataagggcttctctgcctctcagaattctttttaattgaagatgtcttgagctctgcaaagatcagagcaggtgagcatccactttgacatgaaggacaagaagacgcatggctcatggcgggcacatgcggctgccagtgagacagcgtctcctctgggagctgggcgggcacagcatcctcagttctgtgcccagccaagggtgagcatctctgctgagacagtccttttgctctcggaggccagggaagatggtacttagaggcttttcccctatcgctctgggtgtctaggaatcccaccagcttgtcttaacagtacaacagcttctttgaggacccagtgggtatggagtatagacagaacccagggttgagaacagaaggtgggcggcaggatcagagtgaaagcagaggcgtgaggagaggaaagcagggaggtctcctgggctgccaggtcagcctctctggcaaggctttcttgagccccgcccctttctttccccggagtccctccaccccataacaatacctcgaatttccaaaagaggtcaccagatgcacatgggccgcaaaacacacagtcaggcttccagcacattctcccccatttggaggatactcgaatgtcaggtttttggttttattattatttcagaactagctcagcccatctctaattataaaacatggttttgttttttttttttcctttttttcttgattaggtctggaacagctctagaatgaacacataaaatttagcaatttaaaatctttctttactgcaagtttaaatagttgtacagatagtttataagcacaatattttaagaaaaaaaagtggctggtctactaggcagcctttgtgccacttcagtgctagaaagttaaagaaaaaaaaacttttgtgatttaataatactatttctgtggaataattataaaagtatgacctttttaaatcaaccttatttggatgcatctgaaccagcagagctgtgttatattttctatctttgctagaacttcgtcattgaaggacaatttcttcaaagtggttacaattcataatgcagcagtttctccaaaaacaaaaacaaaacacacaccacacacacgcgcttttccagtcacacacccctgatgttggaaccaagtttttggaccttctgttccaaaaccttttgcaggtcaatctttgtatttgaaatgatccaatccaacttgaagtcaattgaatattaaggcgctttacttccgtgtgctttcagtttttccatcatgagatgaatgagcattactctagataaatttcaagacaggatactacaggtggcctgctgaggctgccccatattttagaaaatgtaaaaatggtggtttggccattaatttgtcttccatttgatgataccgcaaaattccgtgagtccattcctttggcatggcactttccctgggcctacagttggtattacctctgtgctcagtgccaggcaaaacactagctcaaaggagagtcaaggaaaccgctggcagacgataaccagtcgaaactcgtgacttcggtttgttgaactttggcagccagttggtgagggccagatgttattccctttcttaaagatactccaagccacatgccactaaccacaagcaagctggctgcaagactaaagagctgataacatagtttatttttacactgtcttattatagagaagtaatagacctatcagaacctgcactgaccaacaaataaacacatgttgccaagatgaatcggtctctatctctatctgcttattttggtactgaaagcaatagttcctcattcaaatcaccacccactgttctccccctttgggacatgttaggacgaggccctattccatgcccctctttaatggtggaacaaatgttaaactgctcatctaaagatcatgttgatattattccaggttttaagatcaacttttgttacatactgtaatttaaataaactgcatttacatgcctagtttctgtaatattgtgtatacaaaacccaaatctctcaaaatgtaaattatgtatacctgccaagataccttttccagggtgtctgcgcacattttaagttaattcacataatataaaaattactcaatgtgactgttgatttgctgaactttacatatcacaaagtgaattatttgtgatactttagttaataaaatggtaaatttttttctcagttattgaacaagcaagcattatccagttgatctggcaatgactttttgtgtgtgggccacaatattgattttcccattaacaatttttttttgttttttaaatactaatatgtttcacactatagtttgtgtaacaacacgtgttcgcattatctatgttgctgttacttttgtgcttttattctttttagactttataaaaaaaaaaaaaagctcctgtaatttgcactttctcccaatccttaaatctcttgtatggcaaccaaaattactgtaaaaaaataaatatactattgcact

SEQ ID NO: 181012 - DNA, 1879 bp, Homo sapiens
  Payload ID: 15646
  Gene Symbol: SHANK2
  Gene Name: SH3 and multiple ankyrin repeat domains 2
  ENST ID: ENST00000608988
  CDS Start-End: 371-751
cttccccaccccctgcacctgagccgcggcggcggctcctgagctccggcggggctgggcgcggcgccgctcgggttcccgcggccgatccaggtgtgcgcggacgctggcgctcccggggggctcggacccgcccccgactcgccgagccaggatatttttgttggtataaaattatggattgagaatacttttctttcatcacttgaaaattactgtgccactttcttttggtctccacagtttctgatgagaaatgtctggaaatctctccaggcaccctgctttggccctctagaatacagacagttcctgctctaagaggccatctgtgaggctcagtctcccaacacctctgacacaggcagccatgccgcgcagcccaacatccagcgaggacgagatggcccagagcttctccgactactccgtggggtcggagtcagacagctccaaagaagagaccatctatgacacgatccgggccactgcggagaagccgggcggtgccaggacggaggagagccagggcaacacgctggtgatccgcgtggtcatccatgacctgcagcagacgaaatgcattcgatttaacccggatgccacagtgtgggttgcaaagcagcggatcctgtgtacattaacccagagtttgaaagatgtcctgaactacggcctgttccagccggccagcaatgggcgtgacgggcgttccttccctggagtttcgatacaagaagcgggtgtataaacaagccagtctcgatgagaaacagttggccaagctccacacgaagaccaatctgaagaaatgcatggatcacattcagcatcgcttggtggagaagatcaccaagatgctggaccgaggcctggatcccaatttccacgacccggagaccggagagacccccctgaccttagccgctcagctggacgactctgtggaggtcatcaaagctctcaaaaatggtggagctcacctggacttccgtgccaaagatgggatgaccgccctacacaaagctgcccgagcgaggaaccaagttgccctgaagacccttttagagcttggtgcatccccagattataaagacagttacggcctcaccccgctgtatcacacagccatcgtcggaggtgatccctactgctgcgagcttctcctgcacgaacacgccactgtgtgctgcaaagatgagaacggctggcacgagatccaccaggcctgcaggtacgggcacgtgcagcacctggagcacctgctgttctacggggcagacatgagtgcccagaatgcctcggggaacacggccttgcacatctgcgccctctacaaccaggacagctgtgcaagagtgcttctgtttcgaggcggaaataaggagttaaaaaactacaacagccagactccatttcagatggactctcactctgttgcgcagagtgcaatggcacgatcccggctcactgcaacctccacttcccgggttcaagcgattctcctgcctcagcctcccaagtagctgggattacaggttcgtgccaccatgcctggctagtttttgtatttttggtggagatgggttttgctatgttggccagactggtctcgaactcttgaccttaagtgatctgcctgcctctacctccgaaattgttgggattacaggcatgagccttcatgtctgacccagtctattaagttttatcatgaatctatgttgtcatatccgatgtgtcttgataaaatatttatccaaaatccgatcctgcaactgtcaaagatgattatgtagatttcccctgcttatctgctaatgcgatgaattatatttgtcaattttcttatttctaaaataaactcacctagccatga

SEQ ID NO: 181013 - DNA, 434 bp, Homo sapiens
  Payload ID: 15646
  Gene Symbol: SHANK2
  Gene Name: SH3 and multiple ankyrin repeat domains 2
  ENST ID: ENST00000618363
  CDS Start-End: 1-326
acgaacacgccactgtgtgctgcaaagatgagaacggctggcacgagatccaccaggcctgcaggtacgggcacgtgcagcacctggagcacctgctgttctacggggcagacatgagtgcccagaatgcctcggggaacacggccttgcacatctgcgccctctacaaccaggacagctgtgcaagagtgcttctgtttcgaggcggaaataaggagttaaaaaactacaacagccagactccatttcaggtggccataatagcaggcaactttgagctggcagaatacatcaagaaccacaaggaaacagacattggtgagtaggcacgtggagaaactgtgttgggatttggtttggagatgctctgaggaatcagtcactcaccagctttttaaaattctcctaagattggtttagagcctgcttttagc

SEQ ID NO: 181014 - DNA, 2775 bp, Homo sapiens
  Payload ID: 15646
  Gene Symbol: SHANK2
  Gene Name: SH3 and multiple ankyrin repeat domains 2
  ENST ID: ENST00000468619
  CDS Start-End: 1-223
agccgggtttgagagcagcccgtctacgtgcagttggttcccagctgacagacagaatatggggtgggctttgtcaccagcacgctgggtctggcatgcccagctatgctcggaagtgcaccgtgcccagacacccgccacctctccccgggtcccagctgctctagcaccgaggggccgggctgcacgcctgtccttcctcccatccaggaaggttatataatgagcggaccgctgccaaagtcagagggaaaatgaagtctttgttaaatgccttcaccaagaaggaagtgcccttccgagaggccccggcgtactccaaccgccggcggcggccccccaacacgctggccgccccccgggtcctgctgcgctccaacagtgacaacaacctcaatgccagcgctcccgactgggccgtctgctccacggccacctcgcaccgcagcctgtcaccccagctgctgcagcagatgcccagcaagcccgagggggccgcgaagaccattgggagctacgtgcccgggccccgcagccggtccccatcgctcaacaggctgggcggcgcaggcgaggacggcaagaggccgcagcctctctggcatgtcgggtcgccttttgctcttggtgccaacaaggactcactctcggccttcgagtacccggggcccaagcggaagctctacagtgccgtgcccgggaggctcttcgtcgctgtcaagccataccaaccccaagtggacggcgagatcccccttcaccgcggtgacagggtcaaagttctgagcatcggtgaagggggcttctgggaaggcagcgcccgcggccacatcggatggtttccggcggagtgcgtggaggaggtccagtgtaagcccagggacagccaggcagaaacccgcgctgaccgcagcaagaagcttttcaggcactacaccgtgggctcctatgacagcttcgacacttccaggttgcagacacatttgggggtccctgcaaccctcggagacagctggagtctggacctgtagggcctggttgtggaaacagccccgctgcctcctgcccggtggctctggaggccccttccgcacatccagggcgggtcggctgctccagttctgccttcccacccagtgctgggatgtgcaacgccccccaccgaatgctcagatgtgcagccccctcctctgctggcctggaccttggacctcacacgtgcacatgttctgacatcagtgcctcatccgatgtccaaccccggccagaggaaccaccgtcgcttcagccccactctgaccttggaagccccaccctgcatggaggcagaggtgggaactctgtcatccaccgttccccacagaccactcacagccgctttaagagaacagccagggcttctaggcaggagcacgacagtgttcacgctgatggccagggagcctcctcagccagcagcagccgactcgtgcttgtgcattgttcagatggaagcatgatcattggatggaagttcctggcacaggtgcaagttgaccctgagtcattccagaaggattcgggcctcaccggaaagaacgccaggaaaagccatagggcaacagctcttctgccatttcagtcctcatgggtgaaactggggtaaagcgtgagtggctggggccctgctgacacctgcacttgtgcgtcaccgccaagctgtgtccctagactgccctgggtgagtaggcagccaacgtctgcagccccgtgtggtcagctgctcctgccctcccgcctcatcacggcccttcagacatcagggccggctgcctaccttccaaccccactctgtctggaatgttcttttctcttctgtcccctccccagtcctccaacccattctcctatgtatacttcagtcctcctcctccaggaagtcttccaggtgcccgtatggttctcacagaaccacgtcctgcactgttgaaggcacacatttctgtgactgtggattgatgtttatcttcctcacttgcccggcctttgctctaacgatcaccacagactagggggctcaaaacaagagaagtcacttacctgtcacagccctggaggccagaggtccaaaaccaagatgacagcagggccacgctccctccgggggctccaggggagagtcttcctcctccacctctgctgttggcctgcagtccttggtgctcctcagctgggccacatcactccagcctccacatcactccagcctctgcctccaccttcccatggcctcctctgcactgcctctgggtgtcaacctccctctgcttttctcgcgtaagggcacagtcattggtttaggaccctccctaaatccaggaagatctcaactcaagacccttaactaattatacctgcaaagacccaaattccaagtgtcgtcactttcacagacgctgggggttaggaattggacacatttttttgggtgggttgagtcaccattcaactgaccacaccagacaactctataaggaccagactgggcctggtttgttccttcctaaatgcccagcacccagttcatcccctgactctcagtgggtattcaggatgtaacagctggattgatttattgatttacacggcggcttgacactggccccagttacttctgaactttgaaacccagtcccagctggtcacggaagaactaaagctgtcaccagacggggccaccaacccagctgggatcctgagagctatgagtaaagccatctggtctaccccaataac

SEQ ID NO: 181015 - DNA, 7091 bp, Homo sapiens
  Payload ID: 15647
  Gene Symbol: SHANK3
  Gene Name: SH3 and multiple ankyrin repeat domains 3
  ENST ID: ENST00000262795
  CDS Start-End: 1-5193
atggacggccccggggccagcgccgtggtcgtgcgcgtcggcatcccggacctgcagcagacgaagtgcctgcgcctggacccggccgcgcccgtgtgggccgccaagcagcgcgtgctctgcgccctcaaccacagcctccaggacgcgctcaactatgggcttttccagccgccctcccggggccgcgccggcaagttcctggatgaggagcggctcctgcaggagtacccgcccaacctggacacgcccctgccctacctggagtttcgatacaagcggcgagtttatgcccagaacctcatcgatgataagcagtttgcaaagcttcacacaaaggcgaacctgaagaagttcatggactacgtccagctgcatagcacggacaaggtggcacgcctgttggacaaggggctggaccccaacttccatgaccctgactcaggagagtgccccctgagcctcgcagcccagctggacaacgccacggacctgctaaaggtgctgaagaatggtggtgcccacctggacttccgcactcgcgatgggctcactgccgtgcactgtgccacacgccagcggaatgcggcagcactgacgaccctgctggacctgggggcttcacctgactacaaggacagccgcggcttgacacccctctaccacagcgccctggggggtggggatgccctctgctgtgagctgcttctccacgaccacgctcagctggggatcaccgacgagaatggctggcaggagatccaccaggcctgccgctttgggcacgtgcagcatctggagcacctgctgttctatggggcagacatgggggcccagaacgcctcggggaacacagccctgcacatctgtgccctctacaaccaggagagctgtgctcgtgtcctgctcttccgtggagctaacagggatgtccgcaactacaacagccagacagccttccaggtggccatcatcgcagggaactttgagcttgcagaggttatcaagacccacaaagactcggatgttgtaccattcagggaaacccccagctatgcgaagcggcggcgactggctggccccagtggcttggcatcccctcggcctctgcagcgctcagccagcgatatcaacctgaagggggaggcacagccagcagcttctcctggaccctcgctgagaagcctcccccaccagctgctgctccagcggctgcaagaggagaaagatcgtgaccgggatgccgaccaggagagcaacatcagtggccctttagcaggcagggccggccaaagcaagatcagtccagctggcccaggggatccgggccctggacctggagggcccgcgccccctgcgccccccgcaccgccgccccggggcccgaagcggaaactttacagcgccgtccccggccgcaagttcatcgccgtgaaggcgcacagcccgcagggtgaaggcgagatcccgctgcaccgcggcgaggccgtgaaggtgctcagcattggggagggcggtttctgggagggaaccgtgaaaggccgcacgggctggttcccggccgactgcgtggaggaagtgcagatgaggcagcatgacacacggcctgaaacgcgggaggaccggacgaagcggctctttcggcactacacagtgggctcctacgacagcctcacctcacacagcgattatgtcattgatgacaaagtggctgtcctgcagaaacgggaccacgagggctttggttttgtgctccggggagccaaagcagagacccccatcgaggagttcacgcccacgccagccttcccggcgctgcagtatctcgagtcggtggacgtggagggtgtggcctggagggccgggctgcgcacgggagacttcctcatcgaggtgaacggggtgaacgtggtgaaggtcggacacaagcaggtggtggctctgattcgccagggtggcaaccgcctcgtcatgaaggttgtgtctgtgacaaggaagccagaagaggacggggctcggcgcagagccccaccgccccccaagagggcccccagcaccacactgaccctgcgctccaagtccatgacagctgagctcgaggaacttgcctccattcggagaagaaaaggggagaagctggacgagatgctggcagccgccgcagagccaacgctgcggccagacatcgcagacgcagactccagagccgccaccgtcaaacagaggcccaccagtcggaggatcacacccgccgagattagctcattgtttgaacgccagggcctcccaggcccagagaagctgccgggctccttgcggaaggggattccacggaccaagtctgtaggggaggacgagaagctggcgtccctgctggaagggcgcttcccgcggagcacctcgatgcaagacccggtgcgcgagggtcgcggcatcccgcccccgccgcagaccgcgccgcctcccccgcccgcgccctactacttcgactcggggccgcccccggccttctcgccgccgcccccgccgggccgcgcctacgacacggtgcgctccagcttcaagcccggcctggaggcgcgcctgggcgcgggcgctgccggcctgtacgagccgggcgcggccctcggcccgctgccgtatcccgagcggcagaagcgcgcgcgctccatgatcatcctgcaggactcggcgcccgagtcgggcgacgcccctcgacccccgcccgcggccaccccgcccgagcgacccaagcgccggccgcggccgcccggccccgacagcccctacgccaacctgggcgccttcagcgccagcctcttcgctccgtccaagccgcagcgccgcaagagccccctggtgaagcagctgcaggtggaggacgcgcaggagcgcgcggccctggccgtgggcagccccggtcccggcggcggcagcttcgcccgcgagccctccccgacccaccgcggtccgcgcccgggtggcctcgactacggcgcgggcgatggcccggggctcgcgttcggcggcccgggcccggccaaggaccggcggctggaggagcggcgccgctccactgtgttcctgtccgtgggggccatcgagggcagcgcccccggcgcggatctgccatccctacagccctcccgctccatcgacgagcgcctcctggggaccggccccaccgccggccgcgacctgctgctgccctccccggtgtctgccctgaagccgttggtcagcggcccgagcctggggccctcgggttccaccttcatccacccactcaccggcaaacccctggaccccagctcacccctggcccttgccctggctgcccgagagcgagctctggcctcccaggcgccctcccggtcccccacacccgtgcacagtcccgacgccgaccgccccggacccctgtttgtggatgtacaggcccgggacccagagcgagggtccctggcttccccggctttctccccacggagcccagcctggattcctgtgcctgctcgcagggaggcagagaaggtcccccgggaggagcggaagtcacccgaggacaagaagtccatgatcctcagcgtcctggacacatccctgcagcggccagctggcctcatcgttgtgcacgccaccagcaacgggcaggagcccagcaggctggggggggccgaagaggagcgcccgggcaccccggagttggccccggcccccatgcagtcagcggctgtggcagagcccctgcccagcccccgggcccagccccctggtggcaccccggcagacgccgggccaggccagggcagctcagaggaagagccagagctggtgtttgctgtgaacctgccacctgcccagctgtcgtccagcgatgaggagaccagggaggagctggcccgaattgggttggtgccaccccctgaagagtttgccaacggggtcctgctggccaccccactcgctggcccgggcccctcgcccaccacggtgcccagcccggcctcagggaagcccagcagtgagccaccccctgcccctgagtctgcagccgactctggggtggaggaggctgacacacgcagctccagcgacccccacctggagaccacaagcaccatctccacggtgtccagcatgtccaccttgagctcggagagcggggaactcactgacacccacacctccttcgctgacggacacacttttctactcgagaagccaccagtgcctcccaagcccaagctcaagtccccgctggggaaggggccggtgaccttcagggacccgctgctgaagcagtcctcggacagcgagctcatggcccagcagcaccacgccgcctctgccgggctggcctctgccgccgggcctgcccgccctcgctacctcttccagagaaggtccaagctatggggggaccccgtggagagccgggggctccctgggcctgaagacgacaaaccaactgtgatcagtgagctcagctcccgcctgcagcagctgaacaaggacacgcgttccctgggggaggaaccagttggtggcctgggcagcctgctggaccctgccaagaagtcgcccatcgcagcagctcggctcttcagcagcctcggtgagctgagctccatttcagcgcagcgcagccccgggggcccgggcggcggggcctcgtactcggtgaggcccagtggccgctaccccgtggcgagacgcgccccgagcccggtgaagcccgcgtcgctggagcgggtggaggggctgggggcgggcgcggggggcgcagggcggcccttcggcctcacgccccccaccatcctcaagtcgtccagcctctccatcccgcacgagcccaaggaggtgcgcttcgtggtgcgcagcgtgagcgcgcgcagtcgctccccctcgccgtcgccgctgccctcgcccgcgtccggccccggccccggcgcccccggcccacgccgacccttccagcagaagccgctgcagctctggagcaagttcgacgtgggcgactggctggagagcatccacctaggcgagcaccgcgaccgcttcgaggaccatgagatagaaggcgcgcacctacccgcgcttaccaaggacgacttcgtggagctgggcgtcacgcgcgtgggccaccgcatgaacatcgagcgcgcgctcaggcagctggacggcagctgacgccccacccccactcccgccccggccgtgccctgccggcagggccccccacccccaccccgggccgcgggctcggcctgccccttacgacggcgcccgggccaggaatgttgcatgaatcgtcctgtttgctgttgctcggagactcgccctgtacattgcttagtgccctcaccggccgcccagcccacccagcgcacagtcaggaagggcgtggaccagggaggctggggcgggaggtgccgggggtggggtgccctagcgtgaccacctccttcgcagctcctggtggccattctcccagagggggaacctagtccagcatgcgaggtcaggacccgccttggtgactcggggggaggggggagacattgggattctcgatgggggccaaggagcccccctgttttgcatattttaatccactctatatttggaacgagaaaaggaacaaatatctctgtccgtaatagtttcctctcccctcccttctacttccactggtcccactgcagctgcccagtcttccatctccggcccctcactgccactgccaccccacaacggggcaggggacgctccagctggtctggggttggccagggccctagtggcccgccctggggccccagctcggcccctcgcctcgctgagctctagtgtgccccaccgacccttcaggtgctgctcgtggtgggaggggcggcaggccgcgggtcctgctgtgcacccgcgggaccagccggcctgggagaccatcggccgggggggatgagggcagggccctgccgctccaccgcagccatcttcctcacagggtctctccccaaggagggggctagcttggtccccatgctcttgggcaactacagcagagaagcctccctgccttggaccccaaagtctcctgtcctgccctttatgtgtgtgggtgaaactgggtgcgtctgagcacgtgggagccgtgtgtgtgcctgattactgagtggccaccaggggccgctctggactagcgcggggccgtggaggcgtgcaccgtgtgcatgcgtggggtgtacctgtgagagcaccctgtctcctcttccaaagaaagtcagaggccatcctgcaccctgggtccagctgtttgcccagcctgtccttccagagcctcacccagcctgagcggggttccctggtgaatccctgctgcttggggaggccccaagggccccttggaggcagcgcccccaccttgggcttctgagggcatcatagggggacccctagagtcagttcaccacaggccctggggagagtcaaagacccccgagggtgcccagccccccacactgtgactcctcacactcagcgatgacctgtggggtggggggccctgggacgtttttaaacctagggtttggagtctggactaagctccatccacgtcactcacaagtttctgtttatatttctagctttttttaataaaataaaaaaaaaaagaaaacagaagttttcacaacccaggggcctggcacgccggtctgtgcctgcccgccccgccctggcccaccggccccactccctgggcacagagtcacacccactcatccttccgccaacagtccaggtcacacagcagcagtcactgtaacagactgccacatacacactcggtctcacactcacctgtgggttttggttccgttcaatttgggtttttaactttacagggtcagttccgcttcacctccttttgtatggagttccatccggggggtttcaccccctgctccagtcctgaggcctcctgaccctgacgttgtgatacgccccacagagatctatgtttcttatattattattattgataataattattataatattattatgtaataaatttataagaaatg

SEQ ID NO: 181016 - DNA, 5175 bp, Homo sapiens
  Payload ID: 15647
  Gene Symbol: SHANK3
  Gene Name: SH3 and multiple ankyrin repeat domains 3
  ENST ID: ENST00000445220
  CDS Start-End: 1-5175
atggacggccccggggccagcgccgtggtcgtgcgcgtcggcatcccggacctgcagcagacgaagtgcctgcgcctggacccggccgcgcccgtgtgggccgccaagcagcgcgtgctctgcgccctcaaccacagcctccaggacgcgctcaactatgggcttttccagccgccctcccggggccgcgccggcaagttcctggatgaggagcggctcctgcaggagtacccgcccaacctggacacgcccctgccctacctggagtttcgatacaagcggcgagtttatgcccagaacctcatcgatgataagcagtttgcaaagcttcacacaaaggcgaacctgaagaagttcatggactacgtccagctgcatagcacggacaaggtggcacgcctgttggacaaggggctggaccccaacttccatgaccctgactcaggagagtgccccctgagcctcgcagcccagctggacaacgccacggacctgctaaaggtgctgaagaatggtggtgcccacctggacttccgcactcgcgatgggctcactgccgtgcactgtgccacacgccagcggaatgcggcagcactgacgaccctgctggacctgggggcttcacctgactacaaggacagccgcggcttgacacccctctaccacagcgccctggggggtggggatgccctctgctgtgagctgcttctccacgaccacgctcagctggggatcaccgacgagaatggctggcaggagatccaccaggcctgccgctttgggcacgtgcagcatctggagcacctgctgttctatggggcagacatgggggcccagaacgcctcggggaacacagccctgcacatctgtgccctctacaaccaggagagctgtgctcgtgtcctgctcttccgtggagctaacagggatgtccgcaactacaacagccagacagccttccaggtggccatcatcgcagggaactttgagcttgcagaggttatcaagacccacaaagactcggatgttgtaccattcagggaaacccccagctatgcgaagcggcggcgactggctggccccagtggcttggcatcccctcggcctctgcagcgctcagccagcgatatcaacctgaagggggaggcacagccagcagcttctcctggaccctcgctgagaagcctcccccaccagctgctgctccagcggctgcaagaggagaaagatcgtgaccgggatgccgaccaggagagcaacatcagtggccctttagcaggcagggccggccaaagcaagatcagggagggggctggcaggccctgccccgcgccccctgcgccccccgcaccgccgccccggggcccgaagcggaaactttacagcgccgtccccggccgcaagttcatcgccgtgaaggcgcacagcccgcagggtgaaggcgagatcccgctgcaccgcggcgaggccgtgaaggtgctcagcattggggagggcggtttctgggagggaaccgtgaaaggccgcacgggctggttcccggccgactgcgtggaggaagtgcagatgaggcagcatgacacacggcctgaaacgcgggaggaccggacgaagcggctctttcggcactacacagtgggctcctacgacagcctcacctcacacagcgattatgtcattgatgacaaagtggctgtcctgcagaaacgggaccacgagggctttggttttgtgctccggggagccaaagcagagacccccatcgaggagttcacgcccacgccagccttcccggcgctgcagtatctcgagtcggtggacgtggagggtgtggcctggagggccgggctgcgcacgggagacttcctcatcgaggtgaacggggtgaacgtggtgaaggtcggacacaagcaggtggtggctctgattcgccagggtggcaaccgcctcgtcatgaaggttgtgtctgtgacaaggaagccagaagaggacggggctcggcgcagagccccaccgccccccaagagggcccccagcaccacactgaccctgcgctccaagtccatgacagctgagctcgaggaacttgcctccattcggagaagaaaaggggagaagctggacgagatgctggcagccgccgcagagccaacgctgcggccagacatcgcagacgcagactccagagccgccaccgtcaaacagaggcccaccagtcggaggatcacacccgccgagattagctcattgtttgaacgccagggcctcccaggcccagagaagctgccgggctccttgcggaaggggattccacggaccaagtctgtaggggaggacgagaagctggcgtccctgctggaagggcgcttcccgcggagcacctcgatgcaagacccggtgcgcgagggtcgcggcatcccgcccccgccgcagaccgcgccgcctcccccgcccgcgccctactacttcgactcggggccgcccccggccttctcgccgccgcccccgccgggccgcgcctacgacacggtgcgctccagcttcaagcccggcctggaggcgcgcctgggcgcgggcgctgccggcctgtacgagccgggcgcggccctcggcccgctgccgtatcccgagcggcagaagcgcgcgcgctccatgatcatcctgcaggactcggcgcccgagtcgggcgacgcccctcgacccccgcccgcggccaccccgcccgagcgacccaagcgccggccgcggccgcccggccccgacagcccctacgccaacctgggcgccttcagcgccagcctcttcgctccgtccaagccgcagcgccgcaagagccccctggtgaagcagctgcaggtggaggacgcgcaggagcgcgcggccctggccgtgggcagccccggtcccggcggcggcagcttcgcccgcgagccctccccgacccaccgcggtccgcgcccgggtggcctcgactacggcgcgggcgatggcccggggctcgcgttcggcggcccgggcccggccaaggaccggcggctggaggagcggcgccgctccactgtgttcctgtccgtgggggccatcgagggcagcgcccccggcgcggatctgccatccctacagccctcccgctccatcgacgagcgcctcctggggaccggccccaccgccggccgcgacctgctgctgccctccccggtgtctgccctgaagccgttggtcagcggcccgagcctggggccctcgggttccaccttcatccacccactcaccggcaaacccctggaccccagctcacccctggcccttgccctggctgcccgagagcgagctctggcctcccaggcgccctcccggtcccccacacccgtgcacagtcccgacgccgaccgccccggacccctgtttgtggatgtacaggcccgggacccagagcgagggtccctggcttccccggctttctccccacggagcccagcctggattcctgtgcctgctcgcagggaggcagagaaggtcccccgggaggagcggaagtcacccgaggacaagaagtccatgatcctcagcgtcctggacacatccctgcagcggccagctggcctcatcgttgtgcacgccaccagcaacgggcaggagcccagcaggctggggggggccgaagaggagcgcccgggcaccccggagttggccccggcccccatgcagtcagcggctgtggcagagcccctgcccagcccccgggcccagccccctggtggcaccccggcagacgccgggccaggccagggcagctcagaggaagagccagagctggtgtttgctgtgaacctgccacctgcccagctgtcgtccagcgatgaggagaccagggaggagctggcccgaattgggttggtgccaccccctgaagagtttgccaacggggtcctgctggccaccccactcgctggcccgggcccctcgcccaccacggtgcccagcccggcctcagggaagcccagcagtgagccaccccctgcccctgagtctgcagccgactctggggtggaggaggctgacacacgcagctccagcgacccccacctggagaccacaagcaccatctccacggtgtccagcatgtccaccttgagctcggagagcggggaactcactgacacccacacctccttcgctgacggacacacttttctactcgagaagccaccagtgcctcccaagcccaagctcaagtccccgctggggaaggggccggtgaccttcagggacccgctgctgaagcagtcctcggacagcgagctcatggcccagcagcaccacgccgcctctgccgggctggcctctgccgccgggcctgcccgccctcgctacctcttccagagaaggtccaagctatggggggaccccgtggagagccgggggctccctgggcctgaagacgacaaaccaactgtgatcagtgagctcagctcccgcctgcagcagctgaacaaggacacgcgttccctgggggaggaaccagttggtggcctgggcagcctgctggaccctgccaagaagtcgcccatcgcagcagctcggctcttcagcagcctcggtgagctgagctccatttcagcgcagcgcagccccgggggcccgggcggcggggcctcgtactcggtgaggcccagtggccgctaccccgtggcgagacgcgccccgagcccggtgaagcccgcgtcgctggagcgggtggaggggctgggggcgggcgcggggggcgcagggcggcccttcggcctcacgccccccaccatcctcaagtcgtccagcctctccatcccgcacgagcccaaggaggtgcgcttcgtggtgcgcagcgtgagcgcgcgcagtcgctccccctcgccgtcgccgctgccctcgcccgcgtccggccccggccccggcgcccccggcccacgccgacccttccagcagaagccgctgcagctctggagcaagttcgacgtgggcgactggctggagagcatccacctaggcgagcaccgcgaccgcttcgaggaccatgagatagaaggcgcgcacctacccgcgcttaccaaggacgacttcgtggagctgggcgtcacgcgcgtgggccaccgcatgaacatcgagcgcgcgctcaggcagctggacggcagctga

SEQ ID NO: 181017 - DNA, 11245 bp, Homo sapiens
  Payload ID: 15648
  Gene Symbol: SH3PXD2A
  Gene Name: SH3 and PX domains 2A
  Uniprot ID: Q5TCZ1
  ENST ID: ENST00000355946
  CDS Start-End: 141-3458
ccgggagtccgggcagcgttcggcgcgccgggccggggtggcgggcggccccgggaccccggcagctggagaaggagccggagcccggccgggatgagaaggtgacgccgccgggggcgccactcgctttgtgggggaagatgctcgcctactgcgtgcaggatgccaccgtggtggacgtggagaagcggaggaacccctccaagcactacgtatacataatcaatgtgacctggtctgactccacctcccagactatctaccggaggtacagcaagttctttgacctgcagatgcagcttttggataagtttcccattgaaggtggccagaaggaccccaagcaaaggatcatccccttcctcccaggcaagatcctcttccgcagaagccacatccgggacgtagctgtgaagagactgaagcccatcgatgaatactgccgggcacttgtccggctgcccccccacatctcacagtgtgacgaagtcttccggttcttcgaggctcgacccgaggatgtcaaccctccaaaagaggactatggcagttccaagaggaaatcagtgtggctgtccagctgggctgagtcgcccaagaaggacgtgacaggtgccgacgccaccgccgagcccatgatcctggaacagtacgtggtggtgtccaactataagaagcaggagaactcggagctgagcctccaggccggggaggtggtggatgtcatcgagaagaacgagagcggctggtggttcgtgagcacttctgaggagcagggctgggtccctgccacctacctggaggcccagaatggtactcgggatgactccgacatcaacacctctaagactggagaagaggagaagtatgtcaccgtgcagccttacaccagccaaagcaaggacgagattggctttgagaagggcgtcacagtggaggtgatccggaagaatctggaaggctggtggtatatcagatacctgggcaaagagggctgggcgccagcatcctacctgaagaaggccaaggatgacctgccaacccggaagaagaacctggccggcccagtggagatcattgggaacatcatggagatcagcaacctgctgaacaagaaggcgtctggggacaaggaaactccaccagccgaaggcgagggccatgaggcccccattgccaagaaggagatcagcctgcccatcctctgcaatgcctccaatggcagtgccgtgggcgttcctgacaggactgtctccaggctggcccagggctctccagctgtggccaggattgcccctcagcgggcccagatcagctccccgaacctacggacaagacctccaccacgcagagaatccagcctggggttccaactgccaaagccaccagagcccccttctgttgaggtggagtactacaccattgccgaattccagtcgtgcatttccgatggcatcagctttcggggtggacagaaggcagaggtcattgataagaactcaggtggctggtggtacgtgcagatcggtgagaaggagggctgggcccccgcatcatacatcgataagcgcaagaagcccaacctgagccgccgcacaagcacgctgacccggcccaaggtgcccccgccagcaccccccagcaagcccaaggaggccgaggagggccctacgggggccagtgagagccaggactccccgcggaagctcaagtatgaggagcctgagtatgacatccctgcattcggctttgactcagagcctgagctgagcgaggagcccgtggaggacagagcctcaggggagaggcggcctgcccagccccaccggccctcgccggcctcttctctgcagcgggcccgcttcaaggtgggtgagtcttcagaggatgtggccctggaagaggagaccatctatgagaatgagggcttccggccatatgcagaggacaccctgtcagccagaggctcctccggggacagcgactccccaggcagctcctcgctgtccctgaccaggaaaaactcccccaaatcaggctcccccaagtcatcatcactcctaaagctcaaggcagagaagaatgcccaggcagaaatggggaagaaccactcctcagcctccttttcctcatccatcaccatcaacaccacttgctgctcctcctcttcctcctcctcctcttccttgtccaaaaccagtggcgacctgaagccccgctctgcttcggacgcaggcatccgcggcactcccaaggtcagggcaaagaaggatgctgatgcgaacgctgggctgacctcctgtccccgggccaagccatcggtccggcccaagccattcctaaaccgagcagagtcgcagagccaagagaagatggacatcagcactttacggcgccagctgagacccacaggccagctccgtggagggctcaagggctccaagagtgaggattcggagctgcccccgcagacggcctccgaggctcccagtgaggggtctaggagaagctcatccgacctcatcaccctcccagccaccactcccccatgtcccaccaagaaggaatgggaagggccagccacctcgtacatgacatgcagcgcctaccagaaggtccaggactcggagatcagcttccccgcgggcgtggaggtgcaggtgctggagaagcaggagagcgggtggtggtatgtgaggtttggggagctggagggctgggccccttcccactatttggtgctggatgagaacgagcaacctgacccctctggcaaagagctggacacagtgcccgccaagggcaggcagaacgaaggcaaatcagacagcctggagaagatcgagaggcgcgtccaagcactgaacaccgtcaaccagagcaagaaggccacgccccccatcccctccaaacctcccgggggcttcggcaagacctcaggcactccagcggtgaagatgaggaacggagtgcggcaggtggcggtcaggccccagtcggtgtttgtgtccccgccacccaaggacaacaacctgtcctgcgccctgcggaggaatgagtcactcacggccactgatggcctccgaggcgtccgacggaactcctcctttagcactgctcgctccgctgccgccgaggccaagggccgcctggccgaacgggctgccagccagggttcagactcacccctactgcccgcccagcgcaacagcatacccgtgtcccctgtgcgccccaagcccatcgagaagtctcagttcatccacaataacctcaaagatgtgtacgtctctatcgcagactacgagggggatgaggagacagcaggcttccaggagggggtgtccatggaggttctggagaggaaccctaatggctggtggtactgccagatcctggatggtgtgaagcccttcaaaggctgggtgccttccaactaccttgagaaaaagaactagcagagggcctgggctcttccagcctcagtgtgcctctctggccgcccactggatgagcggtgagacgaacaaaagggaaaggaaaaaatgggggtggggggtggggggtggacaacattcaacactgcagaatgggtgacctcaaagatgccccctgtccaagccatcccacagctggaaggtaggggatgggggtgcccacactgagtgaggaagggaatggaccagggagtcccaggcctgggacccagagccaagaaagctgagatatcctgtgcaccatagggacttcaccaatggattacatgccatctgggacaggccatgtgggagaccccagttgtgcctttgctacagatctggaaaagacaaggtcatgggggcctccagtgtcctgcccctgcttggcccagttttgattgctggcatcttgccaccccaggtatccctggtattgtcctaagctgtatttgtgaattgtgctggtttcctgggcattgccacgcctaccacaggtgggtacattagaagccaccactggctttcaggcttgggggtgtcttctgagctcaagcctgcttctgggccaggccattgtcactgttagttgaagaaaaagcagttcccaggtgccagcaaagaccatctttcataactgtcactgtcttggccttgagaagagagcccgctctccgtggggcaccccatggaggacacagtaccagagtttacagagagggtgggcgaagccaccggtctcttcctaatctgcacagactattttgggtatttctgggcgggcagttcctttgcatgtttcgggagaggtttgttgatttggggcttatatgtcaggcctttggtttgcgtcttattttaggggttgtttgggggcctgggtggtcggcctcacatgggaaggggatgggtagtggatggggtttctgttgtatcttgtgggcgggtgattttgcttttgtttttgtttcacattcttccccctccacaagccaaagtcgtttcatttggtttccactgtgtggactgtgctggagcttggcgcctgccagaaaaatttggggctaggcaagccccaggttgcagacatggtgaagcagagaaactgttcttctggttcctgcacaacctcagaggggcaaaaaccctccccaggaaggaggagggtgttcaggagccagacttttggagagaaggcagctcccagcctgctgggtgaccgccattctgcgtgtgttccccagctgggcagggctggaagccttacgtatgaagcatggagaagcagccattgtccccactatgggcagaggggggacccggctggccccttgggtcagactggagccaacaccgccagccaccccctctggcctgctggcaatgccacaggtgcccaagaagatggaggatccctgtgccaggagccaacctggtcttcccgagggtcagtgccccagtgaagacagaagcgagagaataaagttccctgtaggtcctctgtcacctttgggttgtgtttttcaattgttgacatttcagaggggaccctccagaagcccagccggcttcccccaaggactcccccttcgctgggagtggatttccacacgtgcctttgatttcggacagattgggcctcacagccaccgattcagctgccagggtccctggactgggggttggtgttttctatagaggaggaaaggccctccctcaccctgctccccacccaggcagggcagcatgggacccagtgtctcagtgccttcaaaacccacccccacccctaccctaccccaccacaccccatcccagaggccttgcctgggcaaccctaagcccctgtccctcgccatacactgatgcctggcagctagagcaaatggctcgtgttctttgtcgaaggcctgtggtgagattgttttgtttccttttgttttgtgagtttgtttaaaattgaaattagttattttcttctgctggacagtattaaatagagcaggatgttgagttaatctgctagattgcagtactaatggtagtggtttagtgtcttcatgttaatattatttgtacttatttgaacaataatgataaagaagtggttcattattttttaattaatgcactttaaataaggtagaatggaaaaaacccagagagcaaagtgcattacttaaagatgcagtatatacttttctcatttttaaacagcacatatttattaagagaaaaaaagtaatttatgactatttaaaataaaatttaaaagtagagtgactgtcaggtaaagaaccttcaatgtagctatcttccagggggagggccctgcagcctcgctcctcagatgtctgcactgagccagttcagtcactagtgcgccagccaggccaggagggagtgcagagcatgtctgccaagcacagagcatctcagttggactggaccacagtgctcccgagagcctgcctttcctgcccttccccaccacctgcactgccccccacattctcccagccccccccaaggaccccctctccttgacccccagtgctgtaagtaatagagtcattaaaatgcaggactgaaagagacctcagaggtctctatcccatcccttcctgttactgcggcccaaggacaggaaacaacttttccaaaatcccacagctagttaatgacagatctccccactacattaatcccgtgctcctcctcactgccattatagtttattgtgtggtcatgtttacattgtgacatccagccccaaggatggctgggagttgctcaggcatccaggaaaagtggggaatgctgccatctggtgacagcatgtagatttgggcagtgaacagggattgccatgccccagtcttcgcacctcgccccctcaccccctaactcacagcacaaaccctgcaaacccaaagagaatattaatacttgaagcaagaagggtgcatgccagtccttctccgacatggccagggggtaccaggccttgtgcgcctggcctcctagccctagccagggcgagagggcctttcccttgagctactgagctgctttgtgatgctgaaggatactgccggcagcaggcagaggagggagggggcctagggctctgacccatctggaggaaaaccagatcggactaaaaaaggaaaaagaaaaacaaaatctccgcagtgtccaaacctagtttcccatgagttgcgactgaaaatgtgaaacgacactgtattgctgtatactgcaactttaaccataatgagcccttctgaggtcattattgaggttcatataatgcccgaagatgcagcatttggtgctttgttttcctttccgtttcaagacctttttcttttattgcaaggggaaaaaaatgtcatctccccccacctcatccctctttgtgacagcagacctggctgtgttgcccctctcctcctcactattctcaccaggccatgggactttgggggcagtgagagagagctggaaaggggcaaccctgagcagcaggtgtgccccatgccctgtgggtttcccctatgtccaatgactgtagacgggctgtcttgccaggcctcagccccgtctaccctaagcctggccccaaaggtttctctttcttcctccttgattttccatcttgacgaaggcattatatagaatcattttaatcactttcagatgttagagcagcgtattttacaggcatttatatccattgctttcctcagcaaggcatgttactacttttatcatctaaggaaaaaagacaagggaattccagtcaggcattattttcctattactagtgtttgcagaataggtgtaggactatttaagtttagaccttggtttggtagttcttgtttttaataaggggaaaaagataaaataacccctatttttcctgttattgtatttaactaatatattatttctttaaggttactcacttcccctacccctccaaataccttgcattctcaatcaaaaatggaaacaatctgagagacaggaaaagtgcaatattaccaagatggatgccagggctcattggggacaatggagggaataccagtggcgctcagagagcaagaggcagggagcggggtgctgaaggaatcctagctgtggaacaggtgggtgggttggtggagtttgatcttgtggcgttctcctctcccccttctttgggaagatgataggggtccctgccagatccacccagaagaaagggattcaggcatggggcccttgacctctaggccccagtccctggagcagaggcaggccctcgggagctgttccttgttttgatttctgttgtggtgcagccagctgctcagagagacctggcctaaaaatgactcccagcagccctctctcaccccagtgtcctgatatttgggctgtgatccttctggtgtatgtttgaatctttctaaaactgggtgccctcagttcagtttctaggcaggaagcctagaagtcaccagatctttttgggggatgtgagaaccttgagccgcgcacaccctggtgagacaccaattcccacaagcctgcagcagggcctggggctgagcctgggctgcccattcatctcagcgacttcagcctgagaagtgagccctgcctgggctccacacccagagagtccatacaaattctgctccgggaagagtcggggggtctattcaagtttctctgcagacaaaacttcccacaacaggtaccaatctggcctccttcctcagcaccggtagagaaagcaacagaatgggaagtttcctctgggttggagcctcagagctctgcccctcaaggtgacagggacgtccctgtggcttgttccctccacctccagtactgtatgcttgctacttcaaccccctatttggtgaatttctgcacagacacagatctctgtgcctggaatgggactgtgccctgtgcgggtctctcccttggcgtatatccatctagatatttagtctttgagaatctcaaagcagagctctctgggaagagaactgtccacattgctaaataattaagattccctcacttttttgagggccatgtgttgtgagagagagagagagagagagagtgtgtgtgtgtgtgtgtgtgtgtgtgtgtctgtgtatgcaagtgttggtaacttcccacttgaactaaataacatggggttagagaaaaaaaaataccaggcaagctgtctccattgaacaagtccttggcaatgggcaggtcccaagggactcacagcttctggcagcaagtgtgtcattcacacacatcattctggctggagagtgcaatgtgtcatttttttttctttttgtaattattttattaagtatttagttggaaatttcacactggcattaacaggtctagcataagtggcctaggcagtcatcccaggctccaaaatgaagatgtgcaaaagagatgccactgggaatagaaacactgagttggttcagttaggtcatcccctgcagacgtgtcatcgagcaggctgactcccacccctcagccatgccatgggtatgagaagccccttataatgaaagctgccagccctttcgtccttgtttcagagggtgggtcaggtggttggggtgagaacttgctcacggtgcacccaacaagacctgcaggtgcatataagtttagtcccaactgcagggccagaccaaacacttcctgggaagtgtgtggagggctgtgctagaccttcctgagtttctggctaaatcatcagccctgtttggtgcagtctcatgtctctgtggttcccaagctgcatgatcagagccagtgagaagacaggatcagtgacccacagctttggggaaaaacagccccactgttaacttccctcctgcaaacctgggtccccaggccataaggtgggcacactggtgcttacagactgggtggagagccctaccttccaaggtcttgatcccagcctgcctataaggttgggattagcatgcaatcccccttccccaatcctgtctttttaaaatctcaagtttgcacttaaccttgacaacagcaccctctcctactccagtcctagaactcagtggccttagagaatggggtcccctgcactgaaggtccccgccttgctcccagttccatcctggccaataggctgcgcctcaagaggtgaaagagaaaaaagggagggagggaggaagaattatttagaacaaaaggatggctcgagcacgttagaggcaagtgagaggcacgttggtgagaagagcatgtgcatgtttggggtagctggggcctactgtcccttcattagggaaggaggcttccagaagcggatgtcttctagaaagaaaaattgtgtgaaggctgaaaaggggcttggagttttgtctttgttgattagaaagaaggaagaagtcagctctgagtgtttcaggaagaagagagcaggtagaaagggaatttagtgatttaacacccaagggtccagccatagcaggttggaaaatcctccaaatttggccacagaaactggctaggaaaaaactgccactcattgggccacacgctgggtccccatcagttctcaatgaatggtcattgatttacttagcagagagaagtcaccagccacaaaccaatctttgagtttgcaggccctgattccagaatatatgcatccagctcccgggttctcagctggttttgcccacttccctttgactgtccaatccaaagccagtctctcaagttgtatggctcaaagagcagtgaccacaatgggtcatacagtagggacccacctccacaaattagaaccagagttcagactccattgggcacatctgggaggaaggcaacctcctttgtcgtcttgttggtaccagtcattctcaagtatctctgacacctgtggtggttcagtttgctgagcctgccacctggtatgaattagactgggtgtgatgaacattcatccatggatataccctaccattttgcgttgccttataaccaaggcacactccccataagagtttactgcagagaaagaacagcaaaacagccaccctccttgaatttacaactcattatctgcaacaggttttctttaaatccaagacacaggatgggaaatgggtttccccaccaggtactcagaggtctgcaggaagtgactcccgggcaaggcagacttcagtaatccctgaagcgtgagcatgtggactgcatggctgggtggggactggtggatgtctctggagctccagaaccttggagaattcctcatggaattcccctcccagctcttagtgggctctgtggggtcaggaggagcccttcctccaggttttccttctttcctcctcagcagagaaactggagaaaggacattaaactcagtgcagtcgatttgagtgctgaaatatttccagaatcaatggtggtgctaaactatctccatgtttctagcatttttaatagtggagttggtttgtttttaatctcatcacaaaaatgcagtgcccttggggaagggaccagccccttggcctgccactttccaggtgtcctttatcactttgacgggactctttggtctgcagaaaatgctctgtcttggcatgcttctagactgtaagatttgggttttgttttgtattttatgtttacatgcatcttatatttccctgaaaactaaataaagttttgggcctttttaaccg

SEQ ID NO: 181018 - DNA, 11468 bp, Homo sapiens
  Payload ID: 15648
  Gene Symbol: SH3PXD2A
  Gene Name: SH3 and PX domains 2A
  Uniprot ID: Q5TCZ1
  ENST ID: ENST00000369774
  CDS Start-End: 278-3679
gcgagcgggcgagcgcagcgcggcggccgcgcgggagtgaaggggcgcgcggcaggccggcggggagtcccccggggcgcacggagcccgcgcgccctccgggaccctcccccgtccctgggccggacctgtgggcgccgggagtccgggcagcgttcggcgcgccgggccggggtggcgggcggccccgggaccccggcagctggagaaggagccggagcccggccgggatgagaaggtgacgccgccgggggcgccactcgctttgtgggggaagatgctcgcctactgcgtgcaggatgccaccgtggtggacgtggagaagcggaggaacccctccaagcactacgtatacataatcaatgtgacctggtctgactccacctcccagactatctaccggaggtacagcaagttctttgacctgcagatgcagcttttggataagtttcccattgaaggtggccagaaggaccccaagcaaaggatcatccccttcctcccaggcaagatcctcttccgcagaagccacatccgggacgtagctgtgaagagactgaagcccatcgatgaatactgccgggcacttgtccggctgcccccccacatctcacagtgtgacgaagtcttccggttcttcgaggctcgacccgaggatgtcaaccctccaaaagaggactatggcagttccaagaggaaatcagtgtggctgtccagctgggctgagtcgcccaagaaggacgtgacaggtgccgacgccaccgccgagcccatgatcctggaacagtacgtggtggtgtccaactataagaagcaggagaactcggagctgagcctccaggccggggaggtggtggatgtcatcgagaagaacgagagcggctggtggttcgtgagcacttctgaggagcagggctgggtccctgccacctacctggaggcccagaatggtactcgggatgactccgacatcaacacctctaagactggagaagtgtccaagagacgcaaggcccatctgcggcgcctggatcgccggtggaccctgggcgggatggtcaacaggcagcacagccgagaggagaagtatgtcaccgtgcagccttacaccagccaaagcaaggacgagattggctttgagaagggcgtcacagtggaggtgatccggaagaatctggaaggctggtggtatatcagatacctgggcaaagagggctgggcgccagcatcctacctgaagaaggccaaggatgacctgccaacccggaagaagaacctggccggcccagtggagatcattgggaacatcatggagatcagcaacctgctgaacaagaaggcgtctggggacaaggaaactccaccagccgaaggcgagggccatgaggcccccattgccaagaaggagatcagcctgcccatcctctgcaatgcctccaatggcagtgccgtgggcgttcctgacaggactgtctccaggctggcccagggctctccagctgtggccaggattgcccctcagcgggcccagatcagctccccgaacctacggacaagacctccaccacgcagagaatccagcctggggttccaactgccaaagccaccagagcccccttctgttgaggtggagtactacaccattgccgaattccagtcgtgcatttccgatggcatcagctttcggggtggacagaaggcagaggtcattgataagaactcaggtggctggtggtacgtgcagatcggtgagaaggagggctgggcccccgcatcatacatcgataagcgcaagaagcccaacctgagccgccgcacaagcacgctgacccggcccaaggtgcccccgccagcaccccccagcaagcccaaggaggccgaggagggccctacgggggccagtgagagccaggactccccgcggaagctcaagtatgaggagcctgagtatgacatccctgcattcggctttgactcagagcctgagctgagcgaggagcccgtggaggacagagcctcaggggagaggcggcctgcccagccccaccggccctcgccggcctcttctctgcagcgggcccgcttcaaggtgggtgagtcttcagaggatgtggccctggaagaggagaccatctatgagaatgagggcttccggccatatgcagaggacaccctgtcagccagaggctcctccggggacagcgactccccaggcagctcctcgctgtccctgaccaggaaaaactcccccaaatcaggctcccccaagtcatcatcactcctaaagctcaaggcagagaagaatgcccaggcagaaatggggaagaaccactcctcagcctccttttcctcatccatcaccatcaacaccacttgctgctcctcctcttcctcctcctcctcttccttgtccaaaaccagtggcgacctgaagccccgctctgcttcggacgcaggcatccgcggcactcccaaggtcagggcaaagaaggatgctgatgcgaacgctgggctgacctcctgtccccgggccaagccatcggtccggcccaagccattcctaaaccgagcagagtcgcagagccaagagaagatggacatcagcactttacggcgccagctgagacccacaggccagctccgtggagggctcaagggctccaagagtgaggattcggagctgcccccgcagacggcctccgaggctcccagtgaggggtctaggagaagctcatccgacctcatcaccctcccagccaccactcccccatgtcccaccaagaaggaatgggaagggccagccacctcgtacatgacatgcagcgcctaccagaaggtccaggactcggagatcagcttccccgcgggcgtggaggtgcaggtgctggagaagcaggagagcgggtggtggtatgtgaggtttggggagctggagggctgggccccttcccactatttggtgctggatgagaacgagcaacctgacccctctggcaaagagctggacacagtgcccgccaagggcaggcagaacgaaggcaaatcagacagcctggagaagatcgagaggcgcgtccaagcactgaacaccgtcaaccagagcaagaaggccacgccccccatcccctccaaacctcccgggggcttcggcaagacctcaggcactccagcggtgaagatgaggaacggagtgcggcaggtggcggtcaggccccagtcggtgtttgtgtccccgccacccaaggacaacaacctgtcctgcgccctgcggaggaatgagtcactcacggccactgatggcctccgaggcgtccgacggaactcctcctttagcactgctcgctccgctgccgccgaggccaagggccgcctggccgaacgggctgccagccagggttcagactcacccctactgcccgcccagcgcaacagcatacccgtgtcccctgtgcgccccaagcccatcgagaagtctcagttcatccacaataacctcaaagatgtgtacgtctctatcgcagactacgagggggatgaggagacagcaggcttccaggagggggtgtccatggaggttctggagaggaaccctaatggctggtggtactgccagatcctggatggtgtgaagcccttcaaaggctgggtgccttccaactaccttgagaaaaagaactagcagagggcctgggctcttccagcctcagtgtgcctctctggccgcccactggatgagcggtgagacgaacaaaagggaaaggaaaaaatgggggtggggggtggggggtggacaacattcaacactgcagaatgggtgacctcaaagatgccccctgtccaagccatcccacagctggaaggtaggggatgggggtgcccacactgagtgaggaagggaatggaccagggagtcccaggcctgggacccagagccaagaaagctgagatatcctgtgcaccatagggacttcaccaatggattacatgccatctgggacaggccatgtgggagaccccagttgtgcctttgctacagatctggaaaagacaaggtcatgggggcctccagtgtcctgcccctgcttggcccagttttgattgctggcatcttgccaccccaggtatccctggtattgtcctaagctgtatttgtgaattgtgctggtttcctgggcattgccacgcctaccacaggtgggtacattagaagccaccactggctttcaggcttgggggtgtcttctgagctcaagcctgcttctgggccaggccattgtcactgttagttgaagaaaaagcagttcccaggtgccagcaaagaccatctttcataactgtcactgtcttggccttgagaagagagcccgctctccgtggggcaccccatggaggacacagtaccagagtttacagagagggtgggcgaagccaccggtctcttcctaatctgcacagactattttgggtatttctgggcgggcagttcctttgcatgtttcgggagaggtttgttgatttggggcttatatgtcaggcctttggtttgcgtcttattttaggggttgtttgggggcctgggtggtcggcctcacatgggaaggggatgggtagtggatggggtttctgttgtatcttgtgggcgggtgattttgcttttgtttttgtttcacattcttccccctccacaagccaaagtcgtttcatttggtttccactgtgtggactgtgctggagcttggcgcctgccagaaaaatttggggctaggcaagccccaggttgcagacatggtgaagcagagaaactgttcttctggttcctgcacaacctcagaggggcaaaaaccctccccaggaaggaggagggtgttcaggagccagacttttggagagaaggcagctcccagcctgctgggtgaccgccattctgcgtgtgttccccagctgggcagggctggaagccttacgtatgaagcatggagaagcagccattgtccccactatgggcagaggggggacccggctggccccttgggtcagactggagccaacaccgccagccaccccctctggcctgctggcaatgccacaggtgcccaagaagatggaggatccctgtgccaggagccaacctggtcttcccgagggtcagtgccccagtgaagacagaagcgagagaataaagttccctgtaggtcctctgtcacctttgggttgtgtttttcaattgttgacatttcagaggggaccctccagaagcccagccggcttcccccaaggactcccccttcgctgggagtggatttccacacgtgcctttgatttcggacagattgggcctcacagccaccgattcagctgccagggtccctggactgggggttggtgttttctatagaggaggaaaggccctccctcaccctgctccccacccaggcagggcagcatgggacccagtgtctcagtgccttcaaaacccacccccacccctaccctaccccaccacaccccatcccagaggccttgcctgggcaaccctaagcccctgtccctcgccatacactgatgcctggcagctagagcaaatggctcgtgttctttgtcgaaggcctgtggtgagattgttttgtttccttttgttttgtgagtttgtttaaaattgaaattagttattttcttctgctggacagtattaaatagagcaggatgttgagttaatctgctagattgcagtactaatggtagtggtttagtgtcttcatgttaatattatttgtacttatttgaacaataatgataaagaagtggttcattattttttaattaatgcactttaaataaggtagaatggaaaaaacccagagagcaaagtgcattacttaaagatgcagtatatacttttctcatttttaaacagcacatatttattaagagaaaaaaagtaatttatgactatttaaaataaaatttaaaagtagagtgactgtcaggtaaagaaccttcaatgtagctatcttccagggggagggccctgcagcctcgctcctcagatgtctgcactgagccagttcagtcactagtgcgccagccaggccaggagggagtgcagagcatgtctgccaagcacagagcatctcagttggactggaccacagtgctcccgagagcctgcctttcctgcccttccccaccacctgcactgccccccacattctcccagccccccccaaggaccccctctccttgacccccagtgctgtaagtaatagagtcattaaaatgcaggactgaaagagacctcagaggtctctatcccatcccttcctgttactgcggcccaaggacaggaaacaacttttccaaaatcccacagctagttaatgacagatctccccactacattaatcccgtgctcctcctcactgccattatagtttattgtgtggtcatgtttacattgtgacatccagccccaaggatggctgggagttgctcaggcatccaggaaaagtggggaatgctgccatctggtgacagcatgtagatttgggcagtgaacagggattgccatgccccagtcttcgcacctcgccccctcaccccctaactcacagcacaaaccctgcaaacccaaagagaatattaatacttgaagcaagaagggtgcatgccagtccttctccgacatggccagggggtaccaggccttgtgcgcctggcctcctagccctagccagggcgagagggcctttcccttgagctactgagctgctttgtgatgctgaaggatactgccggcagcaggcagaggagggagggggcctagggctctgacccatctggaggaaaaccagatcggactaaaaaaggaaaaagaaaaacaaaatctccgcagtgtccaaacctagtttcccatgagttgcgactgaaaatgtgaaacgacactgtattgctgtatactgcaactttaaccataatgagcccttctgaggtcattattgaggttcatataatgcccgaagatgcagcatttggtgctttgttttcctttccgtttcaagacctttttcttttattgcaaggggaaaaaaatgtcatctccccccacctcatccctctttgtgacagcagacctggctgtgttgcccctctcctcctcactattctcaccaggccatgggactttgggggcagtgagagagagctggaaaggggcaaccctgagcagcaggtgtgccccatgccctgtgggtttcccctatgtccaatgactgtagacgggctgtcttgccaggcctcagccccgtctaccctaagcctggccccaaaggtttctctttcttcctccttgattttccatcttgacgaaggcattatatagaatcattttaatcactttcagatgttagagcagcgtattttacaggcatttatatccattgctttcctcagcaaggcatgttactacttttatcatctaaggaaaaaagacaagggaattccagtcaggcattattttcctattactagtgtttgcagaataggtgtaggactatttaagtttagaccttggtttggtagttcttgtttttaataaggggaaaaagataaaataacccctatttttcctgttattgtatttaactaatatattatttctttaaggttactcacttcccctacccctccaaataccttgcattctcaatcaaaaatggaaacaatctgagagacaggaaaagtgcaatattaccaagatggatgccagggctcattggggacaatggagggaataccagtggcgctcagagagcaagaggcagggagcggggtgctgaaggaatcctagctgtggaacaggtgggtgggttggtggagtttgatcttgtggcgttctcctctcccccttctttgggaagatgataggggtccctgccagatccacccagaagaaagggattcaggcatggggcccttgacctctaggccccagtccctggagcagaggcaggccctcgggagctgttccttgttttgatttctgttgtggtgcagccagctgctcagagagacctggcctaaaaatgactcccagcagccctctctcaccccagtgtcctgatatttgggctgtgatccttctggtgtatgtttgaatctttctaaaactgggtgccctcagttcagtttctaggcaggaagcctagaagtcaccagatctttttgggggatgtgagaaccttgagccgcgcacaccctggtgagacaccaattcccacaagcctgcagcagggcctggggctgagcctgggctgcccattcatctcagcgacttcagcctgagaagtgagccctgcctgggctccacacccagagagtccatacaaattctgctccgggaagagtcggggggtctattcaagtttctctgcagacaaaacttcccacaacaggtaccaatctggcctccttcctcagcaccggtagagaaagcaacagaatgggaagtttcctctgggttggagcctcagagctctgcccctcaaggtgacagggacgtccctgtggcttgttccctccacctccagtactgtatgcttgctacttcaaccccctatttggtgaatttctgcacagacacagatctctgtgcctggaatgggactgtgccctgtgcgggtctctcccttggcgtatatccatctagatatttagtctttgagaatctcaaagcagagctctctgggaagagaactgtccacattgctaaataattaagattccctcacttttttgagggccatgtgttgtgagagagagagagagagagagagtgtgtgtgtgtgtgtgtgtgtgtgtgtgtctgtgtatgcaagtgttggtaacttcccacttgaactaaataacatggggttagagaaaaaaaaataccaggcaagctgtctccattgaacaagtccttggcaatgggcaggtcccaagggactcacagcttctggcagcaagtgtgtcattcacacacatcattctggctggagagtgcaatgtgtcatttttttttctttttgtaattattttattaagtatttagttggaaatttcacactggcattaacaggtctagcataagtggcctaggcagtcatcccaggctccaaaatgaagatgtgcaaaagagatgccactgggaatagaaacactgagttggttcagttaggtcatcccctgcagacgtgtcatcgagcaggctgactcccacccctcagccatgccatgggtatgagaagccccttataatgaaagctgccagccctttcgtccttgtttcagagggtgggtcaggtggttggggtgagaacttgctcacggtgcacccaacaagacctgcaggtgcatataagtttagtcccaactgcagggccagaccaaacacttcctgggaagtgtgtggagggctgtgctagaccttcctgagtttctggctaaatcatcagccctgtttggtgcagtctcatgtctctgtggttcccaagctgcatgatcagagccagtgagaagacaggatcagtgacccacagctttggggaaaaacagccccactgttaacttccctcctgcaaacctgggtccccaggccataaggtgggcacactggtgcttacagactgggtggagagccctaccttccaaggtcttgatcccagcctgcctataaggttgggattagcatgcaatcccccttccccaatcctgtctttttaaaatctcaagtttgcacttaaccttgacaacagcaccctctcctactccagtcctagaactcagtggccttagagaatggggtcccctgcactgaaggtccccgccttgctcccagttccatcctggccaataggctgcgcctcaagaggtgaaagagaaaaaagggagggagggaggaagaattatttagaacaaaaggatggctcgagcacgttagaggcaagtgagaggcacgttggtgagaagagcatgtgcatgtttggggtagctggggcctactgtcccttcattagggaaggaggcttccagaagcggatgtcttctagaaagaaaaattgtgtgaaggctgaaaaggggcttggagttttgtctttgttgattagaaagaaggaagaagtcagctctgagtgtttcaggaagaagagagcaggtagaaagggaatttagtgatttaacacccaagggtccagccatagcaggttggaaaatcctccaaatttggccacagaaactggctaggaaaaaactgccactcattgggccacacgctgggtccccatcagttctcaatgaatggtcattgatttacttagcagagagaagtcaccagccacaaaccaatctttgagtttgcaggccctgattccagaatatatgcatccagctcccgggttctcagctggttttgcccacttccctttgactgtccaatccaaagccagtctctcaagttgtatggctcaaagagcagtgaccacaatgggtcatacagtagggacccacctccacaaattagaaccagagttcagactccattgggcacatctgggaggaaggcaacctcctttgtcgtcttgttggtaccagtcattctcaagtatctctgacacctgtggtggttcagtttgctgagcctgccacctggtatgaattagactgggtgtgatgaacattcatccatggatataccctaccattttgcgttgccttataaccaaggcacactccccataagagtttactgcagagaaagaacagcaaaacagccaccctccttgaatttacaactcattatctgcaacaggttttctttaaatccaagacacaggatgggaaatgggtttccccaccaggtactcagaggtctgcaggaagtgactcccgggcaaggcagacttcagtaatccctgaagcgtgagcatgtggactgcatggctgggtggggactggtggatgtctctggagctccagaaccttggagaattcctcatggaattcccctcccagctcttagtgggctctgtggggtcaggaggagcccttcctccaggttttccttctttcctcctcagcagagaaactggagaaaggacattaaactcagtgcagtcgatttgagtgctgaaatatttccagaatcaatggtggtgctaaactatctccatgtttctagcatttttaatagtggagttggtttgtttttaatctcatcacaaaaatgcagtgcccttggggaagggaccagccccttggcctgccactttccaggtgtcctttatcactttgacgggactctttggtctgcagaaaatgctctgtcttggcatgcttctagactgtaagatttgggttttgttttgtattttatgtttacatgcatcttatatttccctgaaaactaaataaagttttgggcctttttaaccgaa

SEQ ID NO: 181019 - DNA, 3251 bp, Homo sapiens
  Payload ID: 15648
  Gene Symbol: SH3PXD2A
  Gene Name: SH3 and PX domains 2A
  ENST ID: ENST00000420222
  CDS Start-End: 1-3181
gttctttgacctgcagatgcagcttttggataagtttcccattgaaggtggccagaaggaccccaagcaaaggatcatccccttcctcccaggcaagatcctcttccgcagaagccacatccgggacgtagctgtgaagagactgaagcccatcgatgaatactgccgggcacttgtccggctgcccccccacatctcacagtgtgacgaagtcttccggttcttcgaggctcgacccgaggatgtcaaccctccaaaagaggactatggcagttccaagaggaaatcagtgtggctgtccagctgggctgagtcgcccaagaaggacgtgacaggtgccgacgccaccgccgagcccatgatcctggaacagtacgtggtggtgtccaactataagaagcaggagaactcggagctgagcctccaggccggggaggtggtggatgtcatcgagaagaacgagagcggctggtggttcgtgagcacttctgaggagcagggctgggtccctgccacctacctggaggcccagaatggtactcgggatgactccgacatcaacacctctaagactggagaagaggagaagtatgtcaccgtgcagccttacaccagccaaagcaaggacgagattggctttgagaagggcgtcacagtggaggtgatccggaagaatctggaaggctggtggtatatcagatacctgggcaaagagggctgggcgccagcatcctacctgaagaaggccaaggatgacctgccaacccggaagaagaacctggccggcccagtggagatcattgggaacatcatggagatcagcaacctgctgaacaagaaggcgtctggggacaaggaaactccaccagccgaaggcgagggccatgaggcccccattgccaagaaggagatcagcctgcccatcctctgcaatgcctccaatggcagtgccgtgggcgttcctgacaggactgtctccaggctggcccagggctctccagctgtggccaggattgcccctcagcgggcccagatcagctccccgaacctacggacaagacctccaccacgcagagaatccagcctggggttccaactgccaaagccaccagagcccccttctgttgaggtggagtactacaccattgccgaattccagtcgtgcatttccgatggcatcagctttcggggtggacagaaggcagaggtcattgataagaactcaggtggctggtggtacgtgcagatcggtgagaaggagggctgggcccccgcatcatacatcgataagcgcaagaagcccaacctgagccgccgcacaagcacgctgacccggcccaaggtgcccccgccagcaccccccagcaagcccaaggaggccgaggagggccctacgggggccagtgagagccaggactccccgcggaagctcaagtatgaggagcctgagtatgacatccctgcattcggctttgactcagagcctgagctgagcgaggagcccgtggaggacagagcctcaggggagaggcggcctgcccagccccaccggccctcgccggcctcttctctgcagcgggcccgcttcaaggtgggtgagtcttcagaggatgtggccctggaagaggagaccatctatgagaatgagggcttccggccatatgcagaggacaccctgtcagccagaggctcctccggggacagcgactccccaggcagctcctcgctgtccctgaccaggaaaaactcccccaaatcaggctcccccaagtcatcatcactcctaaagctcaaggcagagaagaatgcccaggcagaaatggggaagaaccactcctcagcctccttttcctcatccatcaccatcaacaccacttgctgctcctcctcttcctcctcctcctcttccttgtccaaaaccagtggcgacctgaagccccgctctgcttcggacgcaggcatccgcggcactcccaaggtcagggcaaagaaggatgctgatgcgaacgctgggctgacctcctgtccccgggccaagccatcggtccggcccaagccattcctaaaccgagcagagtcgcagagccaagagaagatggacatcagcactttacggcgccagctgagacccacaggccagctccgtggagggctcaagggctccaagagtgaggattcggagctgcccccgcagacggcctccgaggctcccagtgaggggtctaggagaagctcatccgacctcatcaccctcccagccaccactcccccatgtcccaccaagaaggaatgggaagggccagccacctcgtacatgacatgcagcgcctaccagaaggtccaggactcggagatcagcttccccgcgggcgtggaggtgcaggtgctggagaagcaggagagcgggtggtggtatgtgaggtttggggagctggagggctgggccccttcccactatttggtgctggatgagaacgagcaacctgacccctctggcaaagagctggacacagtgcccgccaagggcaggcagaacgaaggcaaatcagacagcctggagaagatcgagaggcgcgtccaagcactgaacaccgtcaaccagagcaagaaggccacgccccccatcccctccaaacctcccgggggcttcggcaagacctcaggcactccagcggtgaagatgaggaacggagtgcggcaggtggcggtcaggccccagtcggtgtttgtgtccccgccacccaaggacaacaacctgtcctgcgccctgcggaggaatgagtcactcacggccactgatggcctccgaggcgtccgacggaactcctcctttagcactgctcgctccgctgccgccgaggccaagggccgcctggccgaacgggctgccagccagggttcagactcacccctactgcccgcccagcgcaacagcatacccgtgtcccctgtgcgccccaagcccatcgagaagtctcagttcatccacaataacctcaaagatgtgtacgtctctatcgcagactacgagggggatgaggagacagcaggcttccaggagggggtgtccatggaggttctggagaggaaccctaatggctggtggtactgccagatcctggatggtgtgaagcccttcaaaggctgggtgccttccaactaccttgagaaaaagaactagcagagggcctgggctcttccagcctcagtgtgcctctctggccgcccactggatgagcggtgagacgaac

SEQ ID NO: 181020 - DNA, 7777 bp, Homo sapiens
  Payload ID: 15649
  Gene Symbol: SH3PXD2B
  Gene Name: SH3 and PX domains 2B
  Uniprot ID: A1X283
  ENST ID: ENST00000311601
  CDS Start-End: 172-2907
agtgcgcgccgagcgaagggcggcggcggtggcggcggcggctcgtgctcggccccggctgcgattgcgctcagctccaggttccctgcccgcggcggcgcgcccccagcgctccctgcaccccgcgccacccgcacccgcgctcggcccgctgcgggcggaggagcggccatgccgccgcggcgcagcatcgtggaggtgaaggtgctagacgtgcagaagcggcgggtgcccaacaagcattatgtctacatcatccgggtcacgtggtccagcggctccaccgaggccatttaccggcgctacagcaagttttttgacctccagatgcagatgttggacaaatttcccatggaaggaggacagaaggaccccaagcagcggatcatcccctttctgccaggtaagattctcttcagacgaagccacatccgggacgtggctgtcaaacgcctgataccaattgatgaatactgtaaggccctcatccagctgcccccctacatctctcagtgtgatgaggtgctgcagttctttgagacaagacctgaggacctgaatccccccaaagaggagcacattgggaaaaagaaatctgggggtgaccaaacctcagtggaccccatggtcctggagcagtatgtggtggtagccaactaccagaagcaggagagttcggagatcagcctcagcgtggggcaggtggtggacatcatcgagaagaatgagtcaggttggtggttcgtcagcactgccgaggagcaaggctgggtccctgcaacgtgcctcgaaggccaggatggggtgcaggatgagttttctctgcagcctgaagaagaggagaagtacacagtcatctacccgtacacagctcgggaccaggatgaaatgaacctggagagaggggctgtggtggaggtcatccagaaaaacctggaaggctggtggaagatcaggtaccagggcaaagaaggctgggcccccgcctcctacctaaagaagaacagtggggagcccttgcccccgaagccaggccctggctcaccctcccacccgggtgcccttgacttggatggtgtttcccggcagcagaacgcggtgggcagggagaaggagctgctcagcagccagagggacgggcggtttgaaggccgcccggtgcccgacggtgacgccaagcagagatcaccaaagatgaggcagagaccccctcctcgccgggacatgaccattcctcgaggcctcaacctgccgaagccgcccatcccgccccaagtggaggaagagtattacaccatcgccgaattccagacaaccatcccagacggcatcagcttccaggcaggcctgaaggtcgaggtgatcgagaaaaacttgagtggctggtggtacattcagattgaagataaggaagggtgggccccggccaccttcattgacaagtacaagaagacgagcaacgcgtcgagacccaactttctggctcccctgccccacgaggtgacccagctccggctgggggaagcagcagcgctggagaacaacacgggcagcgaagccacgggcccctcccggcccctgcctgacgcaccgcatggtgtcatggactcggggttgccatggtctaaagactggaagggcagtaaggatgtcctgaggaaggcatcttcagacatgtctgcgtcagcaggctacgaggagatctcagaccccgacatggaggagaagcccagcctccctccgcggaaagaatccatcatcaagtcggagggggagctgctggagcgggagcgggagcggcagaggacggagcagctccggggccccactcccaagcctccgggcgtgattttgccgatgatgccagccaaacacatccctccagcccgggacagcaggaggccagagcccaaacctgacaaaagcagactgttccagctgaaaaatgacatggggctggagtgtggccacaaggtcttggccaaggaagtgaagaagcccaacctccggcccatctccaaatccaaaactgacctgccagaggagaagccagatgccactccccagaatcccttcttgaagtccagacctcaggttaggccaaaaccagctccttcccccaaaacggagccacctcagggcgaagaccaagtcgacatctgcaacctcaggagtaagctcaggcctgccaagtcccaagacaagtccttgttggatggggagggcccccaggcagtagggggccaagacgtggccttcagccgaagcttcctcccaggagaggggcctggccgcgcccaggacaggacgggcaaacaggatggtctcagcccaaaagagatttcctgcagagcccctccgaggccagccaagaccacagatcctgtgtctaagagcgtgcctgttcctctccaagaggctccccagcagagacctgtggtcccaccccgcagaccacctcccccaaagaaaacctcttcgtcatccaggccgctcccagaggtcagaggtccacagtgtgaaggccacgaaagcagggcagctcccaccccaggccgtgctctcctcgtccctccaaaagccaaaccttttctctccaactctttggggggccaggatgacacgcgaggcaaaggcagcctggggccatgggggaccggcaagattggagaaaacagggagaaagcagctgcagcctctgtccccaatgccgacggcctgaaggactctttgtatgtggccgtggccgactttgaaggagacaaagacaccagcagcttccaggaagggacagtgtttgaagtccgggagaagaacagcagtggctggtggttctgccaggtcctgagcggagccccttcctgggaagggtggattccttccaactatctcagaaagaagccgtagccgactccctttctgcctagagggcccgctggtccttgctggctttacccacgtatttaatacgcctcttaatttatcattctccacgcagcttccaaggcagacagactctggggtactgtgacttcttgcctcccatgggtggagagtgagtttcggacacctcgggcgcccctgggcctgatccctcctatcacagcatcactggaggctcagaacccacagcctttgctttctgtccatgtcagcatccctgccttaagagaactcctcctggccaatggcattgccacccagcagtgggaccaagactctccaagacctccaggactggatcccattgcctggagaaactccagcaagggtctctcatggcttggacatggcacagtaaggggcagccaacccagtccatgatgacttttgctccaacttcttcatgtttctaaaagcccagtggctttattcactcctcctaaattgcctgctaccagaaggaacttcatcctgaagaaatgcattccattaccagttccagggaaagtgtccccttccccaaagcctcaggcccgtgggcctctgaggttccactggatgcggctcccccaggagtgggcctggagatccgctcagccgccctgcctcccaccttctatcttgggaccgtggtcagccctgaagggtggttccagccccgcgtatgctgcgctttgctgctgcaggctccggtccctccagggcttttcaatgagagttcccaccccaacttggagcatttcatttttgcctacctaaagcaagaatctcaaagtttgtttgaataagaggcccattcacaagtcgtgcccttgtgagcacccctttgctgagtgcctcgtgggtgccaaacactgtacttggcgctttgcattcatgctttgaccctcacaacctccctttatagatgaggaaattcacgctccatgtgcccaaggacacaccagccaggaggaagagggaagaggatttgagtccaggcctgcctgacttcagtgcctgtgccctcccctctgtaaaagacaaaccaggcagggaagagatagaagctggctaagtggtggccaagtggcttcattgtgaggggggtgagggggcattcgtggctgctcccacacccaccatccctccagcccacagcagcctataccaaaggctgccctggactcaacagctgcatctccatgacaggagaatgccagggtcctggtggttgacacagagccctgttccctcttctaagctgttgccccctggggaatagagcttatggagcaacgggagctgaggtggcctcgagggccagcctggagggctctgagcatagcatgcagcggtcccatagggaggcaggtaaccaagggccaggcagagctgcttcctgtgcctctccggcatttgtaatgtttttttcttttttcacgcactgccaaatctgttttctcccttgaagaaacccagggcagatgtggtcatctgtcaaactgaggtctggagaggcatgactaaatcactgcagaagcaaaatcaggacccagcatttctagctcccagcccagagtaagagagcagagcagaaccccttcccattctacccgaccgaggcagccctgccctgccctgccccgcccctccccaccctgccctgccccagagatctccagttcacagtgttcatcaggcgagatacttttggacccacaaagccagttttttggggggatgctcagtgtctacctgcagtgccaaagttttgcttgaacagccctcttctgccgcgcctcccagctccaccccctatcacgtgggtgctggctgcttctgcgtgaggagcttcctctgatcacctgtagcatctttagtgccttcgtccagtcggcctgcaaatcccatttcccagagaggcttgggcagggcccacttgccacttggccctgtgcccagagcgttgggggcagatggcagccaggggaagaagggaggtggggaagggccgccaccgcttgagggtcccctcccttgagaggaggccccatggcagttttcctgagttcttgatccactttggtttaaacaacttttgtgaagctatgtgagatttgactgcatttcaaaagacaaaacacatgtttttttctgatttgctctttgcctttcagcgacgctttcagatactttgtgagtgtctactctgtgctaggtgctgagtagactgggatgtgtgtggctccatccctggctggaagagctttgagtcctgtctgctgacttcactgaaggagtttctctcttgcttcattccttcctcccgggggtcagctgggtaggagcagacttgccctgccttcctctaggcagaaagttttcctgcaaatgaaagaatctgccattctcttttgctatgatgatgatgattattctgacatgacccgcgggtactgaagccacagtcctctctgttcactgttctctccttgagtcatatctatggcctgaggacgtctgtatccagctccttttcctacaatggtagacacttccccaggcagtgggtgggtcagggtggccagtcactctcctagctgtccttgcctggggacttagatttaccccatccaggactgtggtcgctattctgtgagcgattgatggcgcatatgcagaactcccctggagtcatggctctagaaagtgtccaggcccatcgtgacaatggtgccaagcaccgggctggtgaccagtgcctaaacacacacgctcctttaatccttacggcaagcctgtgaggcggataggaccagccctgatctatagtgagaaaattaaggttcagagggagaaggtccaaatagtggccaagctgggactgagatctcgagtttgggtttgtttggttttgttgttgttgttctttccctcgtgtccatgacttttctctgccattagcagggaagtgtgcggagggcttccagggaatcaagtgaccctccctctgaatttcggtgcctcttccccccgccccttgctcacacatttcagtaggtcacaggccaaatggcagcccaaaaggtgggcagagatttttttttcttcccctcacccctgcttattaacacaattgtgacaactactttaccttacatcccagggcaaacggacagcttgcggtacctccaaaaatttggaaaaccctgagtctaagaccacctcttgataaaagaggcctttgctcacatgttctgctcggaatctttctttgccattggtgggtgtatgtcgtcccagctgagactgcgggagagctgagctccagcttaaaccgcttttaatggcccttccctactgggggatcgctggagcccatgccaggttacggtagtcattttaaacctctgccacaaggccacgccatagaatcaatttccaagtcaatgttcttggccctaaaatgtttgcgcccactgaggatttcattaccaggtggaagatgggggaacatatgccacgttaaagagcaagtgctgagtgtgccaggacttgagaaggaccttaggctgaggagtggacagtctggtatttatttcgcctctcccaagtacccagcacagagtgggaaaaagaagaaactgctcctgccttccagtagctggcaacttgacatcaagaacaaaaacattcgtagctggacccccgtcctttcatcgtgcccaagtcttacatgttggcttaagctgcccccttggaggccgtacctttctctttggactgtgacagtggacacctaacagcctgagccatgtgtggctgtcttatcccccaagggttgtccaggcccgttctgcagggctgttgtgtagactgcagacatccatacctcaccacagaccaaagatgacctcgtgtcagactgtgggctgatgagaggtagagcagcatgcatcgaggcctgagggtgcagggcgccctctcttggcctggaggaattgctcctaactagagtaagtttccacgagggtcccaggcagagctgcagagctggaaccggaggctccacagtccttgcctgctcatggacctccttcagagcacctttctacagactggactgcccagctccgtggggtggcatctggtttctggtgctattctgccaagttatcgagctcctcctcatgtttcaacattccatcttcccgtttctatcctcgactccaaagtaagccttcttagctccaatcagggatgaggggctcaacctcttctgtcctcaaagaggccaaacgcagtgccacagtcggtagccttcacttttagatgtcctattcatgtaaaaaagaaggtgcccccaccaggcttacatcagcaataagcaattctaatgcaacgatggtgtccacattttaccccagtgtgtgcccatgtatgcctttgtgcccgtgtaattattgttagcgcccctttcacttagaggggtgatgataaactgtggccaccttgattacaacccacatttcctgctttggggagcttccaagtaacaggccatttcttacctccctccaggaacagtgggcactgcccaccacctcgtgtctgctcataggatgacgctggagatccccacacttactctaccctcttggcaaattggcattccggtggtggtttttgtttcctttaacacattaaataaatgagtatataggatgtgaggggaggggtgagaacaactagctgtagcatgtgtaggctatatactttaccatttgacttctttcctttttttttttttaaataaaaaaagtgcttgactggtttcaagcttcatcatgaa

SEQ ID NO: 181021 - DNA, 471 bp, Homo sapiens
  Payload ID: 15649
  Gene Symbol: SH3PXD2B
  Gene Name: SH3 and PX domains 2B
  ENST ID: ENST00000518522
  CDS Start-End: 1-245
tgcccgacggtgacgccaagcagagatcaccaaagatgaggcagagaccccctcctcgccgggacatgaccattcctcgaggcctcaacctgccgaagccgcccatcccgccccaagtggaggaagagtattacaccatcgccgaattccagacaaccatcccagacggcatcagcttccaggcaggcctgaaggtcgaggaacagtgggcactgcccaccacctcgtgtctgctcataggatgacgctggagatccccacacttactctaccctcttggcaaattggcattccggtggtggtttttgtttcctttaacacattaaataaatgagtatataggatgtgaggggaggggtgagaacaactagctgtagcatgtgtaggctatatactttaccatttgacttctttcctttttttttttttaaataaaaaaagtgcttgactggtttcaagcttcatcatgaa

SEQ ID NO: 181022 - DNA, 1394 bp, Homo sapiens
  Payload ID: 15649
  Gene Symbol: SH3PXD2B
  Gene Name: SH3 and PX domains 2B
  ENST ID: ENST00000519643
  CDS Start-End: 7-1299
gcggccatgccgccgcggcgcagcatcgtggaggtgaaggtgctagacgtgcagaagcggcgggtgcccaacaagcattatgtctacatcatccgggtcacgtggtccagcggctccaccgaggccatttaccggcgctacagcaagttttttgacctccagatgcagatgttggacaaatttcccatggaaggaggacagaaggaccccaagcagcggatcatcccctttctgccaggtaagattctcttcagacgaagccacatccgggacgtggctgtcaaacgcctgataccaattgatgaatactgtaaggccctcatccagctgcccccctacatctctcagtgtgatgaggtgctgcagttctttgagacaagacctgaggacctgaatccccccaaagaggagcacattgggaaaaagaaatctgggggtgaccaaacctcagtggaccccatggtcctggagcagtatgtggtggtagccaactaccagaagcaggagagttcggagatcagcctcagcgtggggcaggtggtggacatcatcgagaagaatgagtcaggttggtggttcgtcagcactgccgaggagcaaggctgggtccctgcaacgtgcctcgaaggccaggatggggtgcaggatgagttttctctgcagcctgaagaagaggagaagtacacagtcatctacccgtacacagctcgggaccaggatgaaatgaacctggagagaggggctgtggtggaggtcatccagaaaaacctggaaggctggtggaagatcaggtaccagggcaaagaaggctgggcccccgcctcctacctaaagaagaacagtggggagcccttgcccccgaagccaggccctggctcaccctcccacccgggtgcccttgacttggatggtgtttcccggcagcagaacgcggtgggcagggagaaggagctgctcagcagccagagggacgggcggtttgaaggccgcccggtgcccgacggtgacgccaagcagagatcaccaaagatgaggcagagaccccctcctcgccgggacatgaccattcctcgaggcctcaacctgccgaagccgcccatcccgccccaagtggaggaagagtattacaccatcgccgaattccagacaaccatcccagacggcatcagcttccaggcaggcctgaaggtcgaggatcataagaatgttcacttggagagccctgtggaagtccctcttagaagaatcaagatgcggacagcacttgggaagcacgtggcagcttccatggagatgtgagaaccacgtcatgtccttgctgctgtgaacatgaatttgctaaactgcttttactgtatttttttttgtcgtggtaaaatatgcgtaatacaaaa

SEQ ID NO: 181023 - DNA, 1763 bp, Homo sapiens
  Payload ID: 15650
  Gene Symbol: SH3YL1
  Gene Name: SH3 and SYLF domain containing 1
  Uniprot ID: Q96HL8
  ENST ID: ENST00000356150
  CDS Start-End: 82-1110
ctccttgtccgcggggcggggcagcgcgccttcctcttcctgggcagcctcgggacggggcgccgcggccgggcgggcagcatgaataaccctataccttccaatttgaaatcagaagcaaaaaaggctgccaaaatattaagagaattcacagaaataacttccagaaatggacctgataagatcattcctgctcacgtaattgcgaaggctaaaggccttgcaattctgtctgtgatcaaagccgggttcctggtgactgccagaggaggcagcgggattgtagtggcgcgccttccagatggaaaatggtctgcaccctcagccattgggatagctggccttggtggaggatttgaaataggaattgaggtatcagacttggtgataattctgaattatgaccgtgctgtagaagcttttgcaaaaggcggaaatctgaccctcggagggaacttgactgtggcggttgggcccttgggaaggaacttggaaggaaacgtggccctgagaagctccgctgccgtcttcacgtactgcaagtcaaggggactctttgcaggcgtgtctttagaagggagctgtttgattgaaaggaaagaaactaatagaaaattttattgtcaagatatccgagcttatgacattttatttggagatacaccgcggcctgctcaagccgaagatctttatgaaattcttgattcctttactgaaaagtatgaaaatgaaggacaacgaatcaatgcaagaaaagcagcaagggagcagaggaagtcttctgctaaagaattacctccaaagccattgtcaagaccacagcagtcatctgcaccagtccagctgaactctggctctcaaagtaacagaaatgaatataagctctatcctggactttccagctatcatgagagagttggcaatttgaatcaacccatagaagtgacagcgctgtattcatttgaaggacagcagcctggggatttgaattttcaagctggagacagaatcacagttatatcaaaaacagattcacattttgattggtgggaaggaaaacttcgaggtcaaactggcatttttccagccaactacgtaaccatgaattaaagcgtatactattttcttctttgagaattacaaaaaaattatttctacactgacaggatttactagttaagcaatgtttaatataaattttaaaaaacttctgttctacaaaatttccattccgtatgtaaaagattttgtttttctatataaaaagagctgactgacatatctttaaatactttgtactaactttatcacacttactgtgtcatagaatatcatacagtttatacgctcatagttctcttgtgaacacttcaaacatcgctaagcatttgatctggccatgtatatggtagctgtgttttaatttgagaatcttgagggtagagccacaaatttcaattcttacatttccatttgcaaagtgactagagaaaaagaaatcagcttaaatgaggtattaagtaatgtttagagtcgtaggtattaactagaatataaatccttagaaattgtctttataccttcaaaaattatactatgcatttatcatagaaatgtgattacaaagaagtctgactaccatgtctttaaacatatggcatctctcaacttttcttccttatggggctacatttgttcatttccagcagtagcataaacttacggtgacatggtagacttgtctctaaataaaatttttaaat

SEQ ID NO: 181024 - DNA, 1279 bp, Homo sapiens
  Payload ID: 15650
  Gene Symbol: SH3YL1
  Gene Name: SH3 and SYLF domain containing 1
  Uniprot ID: Q96HL8
  ENST ID: ENST00000403658
  CDS Start-End: 451-1134
agtgcgcctgcggaggcggtcctatgacgtgaataaccctataccttccaatttgaaatcagaagcaaaaaaggctgccaaaatattaagagaattcacagaaataacttccagaaatggacctgataagatcattcctgctcacgtaattgcgaaggctaaaggccttgcaattctgtctgtgatcaaagccgggttcctggtgactgccagaggaggcagcgggattgtagtggcgcgccttccagatggaaaatggtctgcaccctcagccattgggatagctggccttggtggaggatttgaaataggaattgagacacatttacagctacatattccctctgagcattgccctggctgccttccataagtgtggagtgccactccagctttcttaggttgccatctgcatgacacatctttctccatccttttactgtcaatctaatggtatcagacttggtgataattctgaattatgaccgtgctgtagaagcttttgcaaaaggcggaaatctgaccctcggagggaacttgactgtggcggttgggcccttgggaaggaacttggaaggaaacgtggccctgagaagctccgctgccgtcttcacgtactgcaagtcaaggggactctttgcaggcgtgtctttagaagggagctgtttgattgaaaggaaagaaactaatagaaaattttattgtcaagatatccgagcttatgacattttatttggagatacaccgcggcctgctcaagccgaagatctttatgaaattcttgattcctttactgaaaagtatgaaaatgaaggacaacgaatcaatgcaagaaaagcagcaagggagcagaggaagtcttctgctaaagaattacctccaaagccattgtcaagaccacagcagtcatctgcaccagtccagctgaactctggctctcaaagcaatttgaatcaacccatagaagtgacagcgctgtattcatttgaaggacagcagcctggggatttgaattttcaagctggagacagaatcacagttatatcaaaaacagattcacattttgattggtgggaaggaaaacttcgaggtcaaactggcatttttccagccaactacgtaaccatgaattaaagcgtatactattttcttctttgagaattacaaaaaaattatttctacactgacaggatttactagttaagcaatgtttaatataaattttaaaaaacttctgttctacaaaatttccattccgtatgtaaaagattttgttttt

SEQ ID NO: 181025 - DNA, 2064 bp, Homo sapiens
  Payload ID: 15650
  Gene Symbol: SH3YL1
  Gene Name: SH3 and SYLF domain containing 1
  Uniprot ID: Q96HL8
  ENST ID: ENST00000405430
  CDS Start-End: 378-1406
cgaaggcctgagcgcggcccggcgggcgcgtggtttttgtcccgcgaaacgtacacggcgggtgttttgcgccgcctccttcgtcacctgccgcaggaagtgtggaactggtctcaatcggttgaccaccttaaggaaataggatttacactgtggacagagatgtgtcctttacacttcatttgaaccaatatgcccatgctcctgtggaggctgagttggaaagtgacacgaagctgcccccccgcaagagagcagaaataaggatctggcatgtcaacacaaacataggaagttgaggcagtcaaagggaaataactgctaccctgactctgctgagagcctcacaagtccctgtgcacgccagcttgtttgccatgaataaccctataccttccaatttgaaatcagaagcaaaaaaggctgccaaaatattaagagaattcacagaaataacttccagaaatggacctgataagatcattcctgctcacgtaattgcgaaggctaaaggccttgcaattctgtctgtgatcaaagccgggttcctggtgactgccagaggaggcagcgggattgtagtggcgcgccttccagatggaaaatggtctgcaccctcagccattgggatagctggccttggtggaggatttgaaataggaattgaggtatcagacttggtgataattctgaattatgaccgtgctgtagaagcttttgcaaaaggcggaaatctgaccctcggagggaacttgactgtggcggttgggcccttgggaaggaacttggaaggaaacgtggccctgagaagctccgctgccgtcttcacgtactgcaagtcaaggggactctttgcaggcgtgtctttagaagggagctgtttgattgaaaggaaagaaactaatagaaaattttattgtcaagatatccgagcttatgacattttatttggagatacaccgcggcctgctcaagccgaagatctttatgaaattcttgattcctttactgaaaagtatgaaaatgaaggacaacgaatcaatgcaagaaaagcagcaagggagcagaggaagtcttctgctaaagaattacctccaaagccattgtcaagaccacagcagtcatctgcaccagtccagctgaactctggctctcaaagtaacagaaatgaatataagctctatcctggactttccagctatcatgagagagttggcaatttgaatcaacccatagaagtgacagcgctgtattcatttgaaggacagcagcctggggatttgaattttcaagctggagacagaatcacagttatatcaaaaacagattcacattttgattggtgggaaggaaaacttcgaggtcaaactggcatttttccagccaactacgtaaccatgaattaaagcgtatactattttcttctttgagaattacaaaaaaattatttctacactgacaggatttactagttaagcaatgtttaatataaattttaaaaaacttctgttctacaaaatttccattccgtatgtaaaagattttgtttttctatataaaaagagctgactgacatatctttaaatactttgtactaactttatcacacttactgtgtcatagaatatcatacagtttatacgctcatagttctcttgtgaacacttcaaacatcgctaagcatttgatctggccatgtatatggtagctgtgttttaatttgagaatcttgagggtagagccacaaatttcaattcttacatttccatttgcaaagtgactagagaaaaagaaatcagcttaaatgaggtattaagtaatgtttagagtcgtaggtattaactagaatataaatccttagaaattgtctttataccttcaaaaattatactatgcatttatcatagaaatgtgattacaaagaagtctgactaccatgtctttaaacatatggcatctctcaacttttcttccttatggggctacatttgttcatttccagcagtagcataaacttacggtgacatggtagacttgtctctaaataaaatttttaaatgttta

SEQ ID NO: 181026 - DNA, 1695 bp, Homo sapiens
  Payload ID: 15650
  Gene Symbol: SH3YL1
  Gene Name: SH3 and SYLF domain containing 1
  Uniprot ID: Q96HL8
  ENST ID: ENST00000403712
  CDS Start-End: 49-1020
ctcttcctgggcagcctcgggacggggcgccgcggccgggcgggcagcatgaataaccctataccttccaatttgaaatcagaagcaaaaaaggctgccaaaatattaagagaattcacagaaataacttccagaaatggacctgataagatcattcctgctcacgtaattgcgaaggctaaaggccttgcaattctgtctgtgatcaaagccgggttcctggtgactgccagaggaggcagcgggattgtagtggcgcgccttccagatggaaaatggtctgcaccctcagccattgggatagctggccttggtggaggatttgaaataggaattgaggtatcagacttggtgataattctgaattatgaccgtgctgtagaagcttttgcaaaaggcggaaatctgaccctcggagggaacttgactgtggcggttgggcccttgggaaggaacttggaaggaaacgtggccctgagaagctccgctgccgtcttcacgtactgcaagtcaaggggactctttgcaggcgtgtctttagaagggagctgtttgattgaaaggaaagaaactaatagaaaattttattgtcaagatatccgagcttatgacattttatttggagatacaccgcggcctgctcaagccgaagatctttatgaaattcttgattcctttactgaaaagtatgaaaatgaaggacaacgaatcaatgcaagaaaagcagcaagggagcagaggaagtcttctgctaaagaattacctccaaagccattgtcaagaccacagcagtcatctgcaccagtccagctgaactctggctctcaaagcaatttgaatcaacccatagaagtgacagcgctgtattcatttgaaggacagcagcctggggatttgaattttcaagctggagacagaatcacagttatatcaaaaacagattcacattttgattggtgggaaggaaaacttcgaggtcaaactggcatttttccagccaactacgtaaccatgaattaaagcgtatactattttcttctttgagaattacaaaaaaattatttctacactgacaggatttactagttaagcaatgtttaatataaattttaaaaaacttctgttctacaaaatttccattccgtatgtaaaagattttgtttttctatataaaaagagctgactgacatatctttaaatactttgtactaactttatcacacttactgtgtcatagaatatcatacagtttatacgctcatagttctcttgtgaacacttcaaacatcgctaagcatttgatctggccatgtatatggtagctgtgttttaatttgagaatcttgagggtagagccacaaatttcaattcttacatttccatttgcaaagtgactagagaaaaagaaatcagcttaaatgaggtattaagtaatgtttagagtcgtaggtattaactagaatataaatccttagaaattgtctttataccttcaaaaattatactatgcatttatcatagaaatgtgattacaaagaagtctgactaccatgtctttaaacatatggcatctctcaacttttcttccttatggggctacatttgttcatttccagcagtagcataaacttacggtgacatggtagacttgtctctaaataaaatttttaaatgtttactaagttaatatttcaa

SEQ ID NO: 181027 - DNA, 3151 bp, Homo sapiens
  Payload ID: 15650
  Gene Symbol: SH3YL1
  Gene Name: SH3 and SYLF domain containing 1
  Uniprot ID: Q96HL8
  ENST ID: ENST00000402632
  CDS Start-End: 185-529
agtgcgcctgcggaggcggtcctatgacggaaaactttattctcaagagatttctcattccgcagaaataaggatctggcatgtcaacacaaacataggaagttgaggcagtcaaagggaaataactgctaccctgactctgctgagagcctcacaagtccctgtgcacgccagcttgtttgccatgaataaccctataccttccaatttgaaatcagaagcaaaaaaggctgccaaaatattaagagaattcacagaaataacttccagaaatggacctgataagatcattcctgctcacgtaattgcgaaggctaaaggccttgcaattctgtctgtgatcaaagccgggttcctggtgactgccagaggaggcagcgggattgtagtggcgcgccttccagatggaaaatggtctgcaccctcagccattgggatagctggccttggtggaggatttgaaataggaattgagacacatttacagctacatattccctctgagcattgccctggctgccttccataagtgtgggttaccatctggtgtcatttccttactccaagacaactttgctcccacctgactcttttgtacggttattgtctagtatataatatttctatagttacagacttaaaatatagaaaaaatttatttttaaaccaattaagagaaaagagaagaactatgcatttatactattatttatggttagataattatctttactggtgattttttaaagtgtggatttaaattactctctagagtcacttgctttcagcctgaaggactttgtttagaatttataatatttcttgtaaaatggttctactagcaacaaattctctcaacttaaaaaaaaatttttaatctgggaatgtcttcatatccccttcatttttgaaatatacttttgctgattataagattctaagttgaccagttctttctttcagcattttgtcatcctactgttttctgaagtctactgtttttgaagagaaatctatctattattctaattggggttccttttatgtgatgagtcatttttctcttgctcctttccagattttctcttgcattttaagattttttacaattatctatccagagtgttatctttttacatttattctactcagaatttgttgagcttcttgagtgtagatccatgtttttcatcagattgagaattttcagccattatttctttgagaaaattttctgcttctttctctttttccttgccttctagtacttacatcacacatatgttggtgcacctaatggtgtcccaggtttcttgtgtttctgtcaatttttcttcattctctttctcttagtttttaagactttctattattcaaatttaccagttctttattttgcgtgctcagatctaccgttaaacttctctagtaaattgttcatgttgcttaatgtactttttacctccagaatttccatttggttcttttatataattttatgtttttatcaatattctctattcaataagatattctcattgtacgtttttctacttcttaaccatagttttctttaattctttgaacatatttatgacagctgttttaaagtctttgtctgctaaatctgatagctggaccatctgaacagcagtcattctcgtctgcttcctttttaaattttttttctatgtatgggtcacactctcccacttctttgtcttattatttttggttgagaatcagaaattttagatattatattgtatcaactctgggtgctcaacctctccccctaggagcctcttattgtttgcttgctgtttgtttagagatatggctggactgtttgaatgaattctgtgccccactactgtgaagcctccaatgttgtctatgggcatgcatatagttttcctgagatgacaggtgttctgactgtccctgtccgtgacctgtctgttaagctgtttgtctccattggtattacacactgttgttagcctccactaattgcctgctgattgctccattgtttccaacaatgccctggggacataaattgctccacagtttgatccagttaaaattgtgctcctgtgcacaggtagtctttgaggctcatttctatttcaggagggctcttcttagctatctctgtccctggttctccctgataattttctagaccaccaatggtttagcttgttgctgtcatggagctaaatacctcatcttacctgtttatcaccaaaagcatcatttttgacagcacctttgaacttccccaccctgtgttccaaaagctttcacttcccttggggagagctttggagctctctgctcttgcagcctgtctctctgtctgcccaagatctctgtgccgttgctccagagctggaggctggggcagtggctcccttctcttggagtgacatccctgcagccttgggtggtgtagtagcttggcttgcctctgtcagggtggagcttttgccccacaggtgaactggggcaagagtgagtggggtcctggtgctcctggactgttgtgctaggctggagccttcacttacacatgggttctgggtggaggaaggaagctccagacctctcagctgctcttgcctggaatggagcttctgtacaaggagctgtgggaagagaaatgctggcagaagcctctcctgtggatatactgcagccctgaccaggggctgggggaaggaagtctgtgttcttgcaaacccccttccccaagaggagcttccatcaggctgacctgcagcggggcacaggttatagctcaaatgtcaccaactctctcttccttaccaatatttaatagtgttcattgaatcaatgtgtcttcattttcttcacttgccatatgcccttaggacaatttccagaagtgttaatttttaaaataatttttaccagttacggttattttgctgtggagagggtctgtggcctctttatgccaccactgcagtgtcattctgatttgtagatacattctacagtgggatggagattcaactgtaattgttaagttttagctcttcttttgttagttatagaacagtgaacaaagtacttaatcttcctgaatcaaatctgtaaaataaaaaatttttaagttgaa

SEQ ID NO: 181028 - DNA, 3540 bp, Homo sapiens
  Payload ID: 15650
  Gene Symbol: SH3YL1
  Gene Name: SH3 and SYLF domain containing 1
  Uniprot ID: Q96HL8
  ENST ID: ENST00000403657
  CDS Start-End: 2197-2880
aagaggcttcattagtaatgacctgtgtcttcatcagtatgatagaatgggacatcagcactctgatcaggtcatgctctatatgccttatggtacagcagaggaaaaatgggtgagccatcatttgatgctgaggatgggatttgaggcttatgtctaaatttttatttgcatattctttttgttctgacagagaaattcactgcatgtaactatgaccacgcatgattttatcagaagttgattagaatctgtaacattttctgtagttcagctgacacactgaagatgtcctcactgtgaccagccttgtcaacagctggatcacagtgacataagctgtgtctaggatgagtcttgcggtctgcagccgtgtgaggctgcatctgattcccaagtccaatggctctcttcccgtgtttacagatcaggccatgacctttccctacagcaggatgtttgcaagattaactctcaactgaggaatttgcttatttgctctaatactgcttggttgagagagttcaaagtagaaagtcttctgaggggataagattcatgtattatttacagtgcttcagttgcatgtatcagaaaatctagtctaaattgctttaacagaaaaagatgttgctggtccatttgacgaagaagtccagagcggcttgtgacttcagtctggctttgcagagcccaggtgctctctccaccttctgccaggttcccctatgaaggctttgctctcagactctccccttgtggagacaaaaatcccacagcaagtggaaacagaagtgccttggaaaaagttattctggcagctcctatacaagtcccccatcagatgctggtattggaccagctttggttataaagccctgctgtggcaccaaaaggaatgtcgtcctgatacagcagcctcgggtcacccaatccactccagatactatggctgcagcatcaatgtaagcagacaagttgtgctgcctctgaaataaagtagatgaaatattcagcagcagaaagaacaagtttccactccagtgaactaattcaaatgtatccagcatctagatatatgtataaatgtaattaaaacatattgagcatctagagcatctctcccaagataattaccacctgatagtaatggctataaaagctaaaagtggaatcagtctacatgtttcgcaataggaatcaattgaagcatacatcaaaatgcagacagtagtattgatggagtttcgttcttgctgcccaagctggagtgcaatggcgccatctcggctcactgcaacctccaccttccaggttcaagtgattctcctgcctcaggctcctgagtagctgggattacaggcgcacgtcaccacatctggctaattttttgtatttttagtagaaatggggtttcaccatgttagccaggctggtcttgaactcctgacctcaggtgatccccccacctcggcctcccaaattgctgggattacaggtgtgagccaccgtgtccggccataaaacatttttttacaaaaggcttacaaaggaatatttatagcagttttatttgtaatagccaaaagctggaaacaacccaattgtctatcaacagtgactggaaggacaaattgtgctatgtccacacattagaataccagttggcagtcaaaaaggaagagctgatctgtgcagcaatttgagtctcagtaatttcatgtgaataaccctataccttccaatttgaaatcagaagcaaaaaaggctgccaaaatattaagagaattcacagaaataacttccagaaatggacctgataagatcattcctgctcacgtaattgcgaaggctaaaggccttgcaattctgtctgtgatcaaagccgggttcctggtgactgccagaggaggcagcgggattgtagtggcgcgccttccagatggaaaatggtctgcaccctcagccattgggatagctggccttggtggaggatttgaaataggaattgagagactgacgagacacccatgaatgcttccttttctgtaaaatgggacaatgacaggacctgtaaccacacagggttttcctttcaagcacatagatggcacacacgtaatcgagtgccactccagctttcttaggttgccatctgcatgacacatctttctccatccttttactgtcaatctaatggtatcagacttggtgataattctgaattatgaccgtgctgtagaagcttttgcaaaaggcggaaatctgaccctcggagggaacttgactgtggcggttgggcccttgggaaggaacttggaaggaaacgtggccctgagaagctccgctgccgtcttcacgtactgcaagtcaaggggactctttgcaggcgtgtctttagaagggagctgtttgattgaaaggaaagaaactaatagaaaattttattgtcaagatatccgagcttatgacattttatttggagatacaccgcggcctgctcaagccgaagatctttatgaaattcttgattcctttactgaaaagtatgaaaatgaaggacaacgaatcaatgcaagaaaagcagcaagggagcagaggaagtcttctgctaaagaattacctccaaagccattgtcaagaccacagcagtcatctgcaccagtccagctgaactctggctctcaaagcaatttgaatcaacccatagaagtgacagcgctgtattcatttgaaggacagcagcctggggatttgaattttcaagctggagacagaatcacagttatatcaaaaacagattcacattttgattggtgggaaggaaaacttcgaggtcaaactggcatttttccagccaactacgtaaccatgaattaaagcgtatactattttcttctttgagaattacaaaaaaattatttctacactgacaggatttactagttaagcaatgtttaatataaattttaaaaaacttctgttctacaaaatttccattccgtatgtaaaagattttgtttttctatataaaaagagctgactgacatatctttaaatactttgtactaactttatcacacttactgtgtcatagaatatcatacagtttatacgctcatagttctcttgtgaacacttcaaacatcgctaagcatttgatctggccatgtatatggtagctgtgttttaatttgagaatcttgagggtagagccacaaatttcaattcttacatttccatttgcaaagtgactagagaaaaagaaatcagcttaaatgaggtattaagtaatgtttagagtcgtaggtattaactagaatataaatccttagaaattgtctttataccttcaaaaattatactatgcatttatcatagaaatgtgattacaaagaagtctgactaccatgtctttaaacatatggcatctctcaacttttcttccttatggggctacatttgttcatttccagcagtagcataaacttacggtgacatggtagacttgtctctaaataaaatttttaaatgtttact

SEQ ID NO: 181029 - DNA, 721 bp, Homo sapiens
  Payload ID: 15650
  Gene Symbol: SH3YL1
  Gene Name: SH3 and SYLF domain containing 1
  ENST ID: ENST00000431160
  CDS Start-End: 1-693
aataaccctataccttccaatttgaaatcagaagcaaaaaaggctgccaaaatattaagagaattcacagaaataacttccagaaatggacctgataagatcattcctgctcacgtaattgcgaaggctaaaggccttgcaattctgtctgtgatcaaagccgggttcctggtgactgccagaggaggcagcgggattgtagtggcgcgccttccagatggaaaatggtctgcaccctcagccattgggatagctggccttggtggaggatttgaaataggaattgaggtatcagacttggtgataattctgaattatgaccgtgctgtagaagcttttgcaaaaggcggaaatctgaccctcggagggaacttgactgtggcggttgggcccttgggaagattttattgtcaagatatccgagcttatgacattttatttggagatacaccgcggcctgctcaagccgaagatctttatgaaattcttgattcctttactgaaaagtatgaaaatgaaggacaacgaatcaatgcaagaaaagcagcaagggagcagaggaagtcttctgctaaagaattacctccaaagccattgtcaagaccacagcagtcatctgcaccagtccagctgaactctggctctcaaagtaaatatttttgttgcaattcaaatacagttgtaattaagtaattattaaatgttatcattaagaaatcaa

SEQ ID NO: 181030 - DNA, 494 bp, Homo sapiens
  Payload ID: 15650
  Gene Symbol: SH3YL1
  Gene Name: SH3 and SYLF domain containing 1
  ENST ID: ENST00000415368
  CDS Start-End: 343-494
agtgcgcctgcggaggcggtcctatgacgtgtggaactggtctcaatcggttgaccaccttaaggaaataggatttacactgtggacagagatgtgtcctttacacttcatttgaaccaatatgcccatgctcctgtggaggctgagttggaaagtgacacgaagctgcccccccgcaagagagcaggaaaactttattctcaagagatttctcattccgcagaaataaggatctggcatgtcaacacaaacataggaagttgaggcagtcaaagggaaataactgctaccctgactctgctgagagcctcacaagtccctgtgcacgccagcttgtttgccatgaataaccctataccttccaatttgaaatcagaagcaaaaaaggctgccaaaatattaagagaattcacagaaataacttccagaaatggacctgataagatcattcctgctcacgtaattgcgaaggctaaaggccttgcaattctgtc

SEQ ID NO: 181031 - DNA, 581 bp, Homo sapiens
  Payload ID: 15650
  Gene Symbol: SH3YL1
  Gene Name: SH3 and SYLF domain containing 1
  ENST ID: ENST00000454318
  CDS Start-End: 405-581
gcgcaatcggctccagtgcgcctgcggaggcggtcctatgacgtgaataaccctataccttccaatttgaaatcagaagcaaaaaaggctgccaaaatattaagagaattcacagaaataacttccagaaatggacctgataagatcattcctgctcacgtaattgcgaaggctaaaggccttgcaattctgtctgtgatcaaagccgggttcctggtgactgccagaggaggcagcgggattgtagtggcgcgccttccagatggaaaatggtctgcaccctcagccattgggatagctggccttggtggaggatttgaaataggaattgagagtgccactccagctttcttaggttgccatctgcatgacacatctttctccatccttttactgtcaatctaatggtatcagacttggtgataattctgaattatgaccgtgctgtagaagcttttgcaaaaggcggaaatctgaccctcggagggaacttgactgtggcggttgggcccttgggaaggaacttggaaggaaacgtggccctgagaagctccgctgccgtcttcacgtactgcaagtca

SEQ ID NO: 181032 - DNA, 782 bp, Homo sapiens
  Payload ID: 15650
  Gene Symbol: SH3YL1
  Gene Name: SH3 and SYLF domain containing 1
  ENST ID: ENST00000451005
  CDS Start-End: 1-768
ataacttccagaaatggacctgataagatcattcctgctcacgtaattgcgaaggctaaaggccttgcaattctgtctgtgatcaaagccgggttcctggtgactgccagaggaggcagcgggattgtagtggcgcgccttccagatggaaaatggtctgcaccctcagccattgggatagctggccttggtggaggatttgaaataggaattgaggtatcagacttggtgataattctgaattatgaccgtgctgtagaagcttttgcaaaaggcggaaatctgaccctcggagggaacttgactgtggcggttgggcccttgggaagattttattgtcaagatatccgagcttatgacattttatttggagatacaccgcggcctgctcaagccgaagatctttatgaaattcttgattcctttactgaaaagtatgaaaatgaaggacaacgaatcaatgcaagaaaagcagcaagggagcagaggaagtcttctgctaaagaattacctccaaagccattgtcaagaccacagcagtcatctgcaccagtccagctgaactctggctctcaaagcaatttgaatcaacccatagaagtgacagcgctgtattcatttgaaggacagcagcctggggatttgaattttcaagctggagacagaatcacagttatatcaaaaacagattcacattttgattggtgggaaggaaaacttcgaggtcaaactggcatttttccagccaactacgtaaccatgaattaaagcgtatactattt

SEQ ID NO: 181033 - DNA, 2236 bp, Homo sapiens
  Payload ID: 15650
  Gene Symbol: SH3YL1
  Gene Name: SH3 and SYLF domain containing 1
  ENST ID: ENST00000479739
  CDS Start-End: 1046-1513
taacagaaaaagatgttgctggtccatttgacgaagaagtccagagcggcttgtgacttcagtctggctttgcagagcccaggtgctctctccaccttctgccaggttcccctatgaaggctttgctctcagactctccccttgtggagacaaaaatcccacagcaagtggaaacagaagtgccttggaaaaagttattctggcagctcctatacaagtcccccatcagatgctggtattggaccagctttggttataaagccctgctgtggcaccaaaaggaatgtcgtcctgatacagcagcctcgggtcacccaatccactccagatactatggctgcagcatcaatgtaagcagacaagttgtgctgcctctgaaataaagtagatgaaatattcagcagcagaaagaacaagtttccactccagtgaactaattcaaatgtatccagcatctagatatatgtataaatgtaattaaaacatattgagcatctagagcatctctcccaagataattaccacctgatagtaatggctataaaagctaaaagtggaatcagtctacatgtttcgcaataggaatcaattgaagcatacatcaaaatgcagacagtagtattgtgaataaccctataccttccaatttgaaatcagaagcaaaaaaggctgccaaaatattaagagaattcacagaaataacttccagaaatggacctgataagatcattcctgctcacgtaattgcgaaggctaaaggccttgcaattctgtctgtgatcaaagccgggttcctggtgactgccagaggaggcagcgggattgtagtggcgcgccttccagatggaaaatggtctgcaccctcagccattgggatagctggccttggtggaggatttgaaataggaattgagacacatttacagctacatattccctctgagcattgccctggctgccttccataagtgtggagtgccactccagctttcttaggttgccatctgcatgacacatctttctccatccttttactgtcaatctaatggtatcagacttggtgataattctgaattatgaccgtgctgtagaagcttttgcaaaaggcggaaatctgaccctcggagggaacttgactgtggcggttgggcccttgggaaggaacttggaaggaaacgtggccctgagaagctccgctgccgtcttcacgtactgcaagtcaaggggactctttgcaggcgtgtctttagaagggagctgtttgattgaaaggaaagaaactaatagaaaattttattgtcaagatatccgagcttatgacattttatttggagatacaccgcggcctgctcaagccgaagatctttatgaaattcttgattcctttactgaaaagtatgaaaatgaaggacaacgaatcaatgcaagaaaagcagcaagggagcagaggaagtcttctgtaccgtttggttttatgtttcactcagtattctcagaaaatctctttctgtagaacattctgtccctgatatcaggttcctaagaacctactaagcctccttcgtagtttcactgacttcacattcttgtgaaaaggtcatgctaccttgacatttcctctgtacagatttcagggaaaaacataatttgtcctctgtgattgcatttctccaaggatggaactttgttgtatcaataatacaaataatatgtgggaggctgaggcaggtggagcacttgagatcaggagtttcagaccagcctggccaacatggcaaaaccccctctctaccataaaaatagaaacattagctgggcatggtggcgtgtgcccataatctcagctactcaggaggctgaaacaggaggatcgcttgagcccatgaggttgcactgagccaagatcatgccattgcactcagcctaggcaacagagctaaagaattacctccaaagccattgtcaagaccacagcagtcatctgcaccagtccagctgaactctggctctcaaagcaatttgaatcaacccatagaagtgacagcgctgtattcatttgaaggacagcagcctggggatttgaattttcaagctggagacagaatcacagttatatcaaaaacagattcacattttgattggtgggaaggaaaacttcgaggtcaaactggcatttttccagccaactacgtaaccatgaattaaagcgtatactattttcttctttgagaattac

SEQ ID NO: 181034 - DNA, 885 bp, Homo sapiens
  Payload ID: 15650
  Gene Symbol: SH3YL1
  Gene Name: SH3 and SYLF domain containing 1
  ENST ID: ENST00000481932
  CDS Start-End: 1-295
agaagcttttgcaaaaggcggaaatctgaccctcggagggaacttgactgtggcggttgggcccttgggaagattttattgtcaagatatccgagcttatgacattttatttggagatacaccgcggcctgctcaagccgaagatctttatgaaattcttgattcctttactgaaaagtatgaaaatgaaggacaacgaatcaatgcaagaaaagcagcaagggagcagaggaagtcttctgtaccgtttggttttatgtttcactcagtattctcagaaaatctctttctgtagaacattctgtccctgatatcaggttcctaagaacctactaagcctccttcgtagtttcactgacttcacattcttgtgaaaaggtcatgctaccttgacatttcctctgtacagatttcagggaaaaacataatttgtcctctgtgattgcatttctccaaggatggaactttgttgtatcaataatacaaataatatgtgggaggctgaggcaggtggagcacttgagatcaggagtttcagaccagcctggccaacatggcaaaaccccctctctaccataaaaatagaaacattagctgggcatggtggcgtgtgcccataatctcagctactcaggaggctgaaacaggaggatcgcttgagcccatgaggttgcactgagccaagatcatgccattgcactcagcctaggcaacagagtaagaccttatctcaataataatatatgaataatagttgcagatactgacgcctttgtatgtcaggccttggggcaccgagggatttgtgtgcattgttcatgatgttccacagcacctttcagagttggtatgatgcctgtttcatggaataaaaactgaagccta

SEQ ID NO: 181035 - DNA, 1973 bp, Homo sapiens
  Payload ID: 15650
  Gene Symbol: SH3YL1
  Gene Name: SH3 and SYLF domain containing 1
  Uniprot ID: Q96HL8
  ENST ID: ENST00000626873
  CDS Start-End: 571-1311
gcgggcgcgtggtttctggaaacaacccaattgtctatcaacagtgactggaaggacaaattgtgctatgtccacacattagaataccagttggcagtcaaaaaggaagagctgatctgtgcagcaatttgagtctcagtaatttcatgtgaataaccctataccttccaatttgaaatcagaagcaaaaaaggctgccaaaatattaagagaattcacagaaataacttccagaaatggacctgataagatcattcctgctcacgtaattgcgaaggctaaaggccttgcaattctgtctgtgatcaaagccgggttcctggtgactgccagaggaggcagcgggattgtagtggcgcgccttccagatggaaaatggtctgcaccctcagccattgggatagctggccttggtggaggatttgaaataggaattgagacacatttacagctacatattccctctgagcattgccctggctgccttccataagtgtggagtgccactccagctttcttaggttgccatctgcatgacacatctttctccatccttttactgtcaatctaatggtatcagacttggtgataattctgaattatgaccgtgctgtagaagcttttgcaaaaggcggaaatctgaccctcggagggaacttgactgtggcggttgggcccttgggaaggaacttggaaggaaacgtggccctgagaagctccgctgccgtcttcacgtactgcaagtcaaggggactctttgcaggcgtgtctttagaagggagctgtttgattgaaaggaaagaaactaatagaaaattttattgtcaagatatccgagcttatgacattttatttggagatacaccgcggcctgctcaagccgaagatctttatgaaattcttgattcctttactgaaaagtatgaaaatgaaggacaacgaatcaatgcaagaaaagcagcaagggagcagaggaagtcttctgctaaagaattacctccaaagccattgtcaagaccacagcagtcatctgcaccagtccagctgaactctggctctcaaagtaacagaaatgaatataagctctatcctggactttccagctatcatgagagagttggcaatttgaatcaacccatagaagtgacagcgctgtattcatttgaaggacagcagcctggggatttgaattttcaagctggagacagaatcacagttatatcaaaaacagattcacattttgattggtgggaaggaaaacttcgaggtcaaactggcatttttccagccaactacgtaaccatgaattaaagcgtatactattttcttctttgagaattacaaaaaaattatttctacactgacaggatttactagttaagcaatgtttaatataaattttaaaaaacttctgttctacaaaatttccattccgtatgtaaaagattttgtttttctatataaaaagagctgactgacatatctttaaatactttgtactaactttatcacacttactgtgtcatagaatatcatacagtttatacgctcatagttctcttgtgaacacttcaaacatcgctaagcatttgatctggccatgtatatggtagctgtgttttaatttgagaatcttgagggtagagccacaaatttcaattcttacatttccatttgcaaagtgactagagaaaaagaaatcagcttaaatgaggtattaagtaatgtttagagtcgtaggtattaactagaatataaatccttagaaattgtctttataccttcaaaaattatactatgcatttatcatagaaatgtgattacaaagaagtctgactaccatgtctttaaacatatggcatctctcaacttttcttccttatggggctacatttgttcatttccagcagtagcataaacttacggtgacatggtagacttgtctctaaataaaatttttaaatgtttactaa

SEQ ID NO: 181036 - DNA, 4226 bp, Homo sapiens
  Payload ID: 15651
  Gene Symbol: SH3TC1
  Gene Name: SH3 domain and tetratricopeptide repeats 1
  Uniprot ID: Q8TE82
  ENST ID: ENST00000245105
  CDS Start-End: 68-4078
ctgtgggcctgggagctgcctctgaggaacacgccgcagggccaggcatgtgaggtctctgcgggtcatggagaacctccctgccgtgaccactgaggagccgacccccatggggaggggtcctgtgggaccctcaggaggtggcagcacccgggaccaggtccggactgtggtcatgaggccctctgtgagctgggagaaagcggggcccgaggaggccaaggcgccagtgagaggcgacgaggctcctcctgcccgcgtggctgggcctgctgctgggacccctccctgccagatgggggtttatcccacagacctgaccctgcagctgctggctgtgcggaggaagagcagactgcgggaccccggcctacagcagaccctccggggccagctccgcctgctggagaatgatagccgggagatggcccgcgtgcttggggaattatcagccaggctgctgtccatccacagtgaccaggaccggatcgtggtgacgtttaagacttttgaagaaatctggaagttttccacctaccatgctctcggcttcactcatcactgcctggcaaacctgctcatggaccaggccttctggctgctcttgcccagtgaggaggaggagacggccatccaagtccatgtggatgagaacgccttaaggctgacccacgagagcctcctcatccaagaagggcccttctttgtcctgtgtcctgaccaccatgtgagagtgatgacgggtccccgggatgcaggaaatggcccccaggccctcaggcaggcttcgggggcaccccagggagaggcggccccggaaacagactcttcaccgccgagccccagcgtgtcctccgaggaggtggcagtggcggccgccccggagcctttgattccatttcatcagtgggctcttaggatcccccaggaccccatcgacgatgccatgggtggccctgtgatgcccggcaacccgctgatggctgtgggcctggcctcggcattggcagacttccagggctcggggcccgaagagatgaccttccgaggtggcgacctcatcgagatccttggggcgcaggtgcccagcctgccctggtgcgtgggccgacacgcagcctcgggccgggtggggtttgtgcggagcagcctcatcagcatgcagggccccgtgtccgagttggaaagtgcgatttttctcaatgaggaagaaaagtcattcttcagcgagggctgcttttctgaggaggatgccaggcagttgctgaggcggatgtcgggcaccgatgtctgcagcgtgtacagcctggactcagtagaggaagctgagaccgagcagccgcaggaaaaagaaatacctccaccttgcctgagcctggagccacaggagaccttgcagaaggtgaagaatgttctggaacaatgcaagacctgcccaggctgcccccaggagccagcgtcctggggtctctgtgcggcatccagcgacgtgagcttgcaggaccccgaggagccctccttctgcttggaagccgaggacgactgggaggacccagaggccctgagctcactgctgctgttcctgaacgcccctgggtacaaggccagcttccgtggcctgtacgatgtggcgctgccgtggctgagcagcgtgttccgcagcttcagcgacgaggaggagctgactgggcgcctggcacaggcccggggggcggccaagaaagctggcctcctcatggccctggccaggctctgcttcctcctggggcggctgtgcagcaggaggctcaagctgtcccaggcccgggtgtactttgaggaagcgctgggggccctggagggcagcttcggggacctgttcctagtggtggctgtgtacgccaacctggccagcatttaccggaagcagaagaaccgggagaagtgtgcacaggtggtgcccaaagccatggccctgctcctggggacgcctgaccacatctgcagcaccgaggcggagggggagctcctgcagctggcgctgcggcgggcggtgggtggccagagcctgcaggccgaggcccgggcctgcttcctgctggccaggcaccacgtgcacctcaagcagcccgaggaggccctgcccttcctagagcggctgctgcttttgcacagggactcgggagccccagaggccgcgtggctctcagactgctacctactcctggctgacatctacagccgcaagtgcctgccccacctggtgctgagctgtgtcaaggtggcctcattgcggacacggggctcgctggccggctcgctgaggagtgtgaacctggtgctccagaacgccccccagccccacagcctccctgcccaaacttcccactacctcaggcaagcgctggcctccctgaccccgggcacaggccaggcgctgcgcggccccctctacaccagcttggcccagctgtacagccaccatggctgccacggcccggccatcaccttcatgacgcaggcagtggaagccagtgctattgccggagtccgtgccatcgtggaccacctggtggccctggcctggctgcacgtgcttcatgggcagagcccggtggccctggacatcctgcagtctgtccgggatgcagtggtggccagcgaggaccaggagggcgtgattgccaacatggtggccgtggctctgaagaggacgggccggacgaggcaggcagctgagagctactaccgcgccctgcgggtggctcgggacctgggccagcaaaggaaccaggcagtggggctggccaacttcggggccctgtgcctgcatgcgggtgccagcaggctggcccagcactacctcctggaggccgtgcggctgttctcgaggctgccccttggggagtgtggccgggacttcacccacgtgctcctgcagctgggccatctctgcacccgccagggcccggcccagcagggcaagggctactacgagtgggcccttctggtcgccgtggagatgggccacgtggagagccagctgcgggccgtccagcggctgtgccacttctacagcgccgtcatgcccagcgaggcccagtgtgtcatctaccatgagctccagctctccctggcctgcaaggtggccgacaaggtgctggaggggcagctcctggagaccatcagccagctctacctgtccctgggcaccgagcgggcctacaaatccgcactggactacaccaaacgaagtctggggattttcattgacctccagaagaaagagaaggaggcgcatgcctggctgcaagcagggaagatctattacatcttgcggcagagcgagctggtggacctctacatccaggtggcacagaacgtggccctgtacacaggcgaccccaacctggggctggagctgtttgaggcggctggagacatcttcttcgacggggcctgggagcgggagaaagctgtgtccttctaccgggaccgggccctgcccctggcagtgactacgggcaaccgcaaggcggagctgcggctgtgcaacaagctggtggcactgctggccacgctggaggagccccaggagggcttggagtttgcccacatggccctagcactcagcatcaccctgggggaccggctgaacgagcgcgtggcctaccaccggctggccgccctgcaacaccgactgggccatggcgagctggcagagcacttctacctcaaggccctgtcgctctgcaactcgccgctggagtttgacgaggagaccctctactacgtgaaggtgtacctggtgctcggtgacatcatcttctacgacctgaaggacccgtttgatgcagccgggtactaccagctggcgctggcagccgccgtggacctgggcaacaagaaggcacagctgaagatctacacgcggctggccaccatctaccacaacttcctcctggaccgtgagaagtcgctcttcttctaccagaaggccaggaccttcgccacagagctcaacgtccgcagggtcaacctgcctcctctgccactctgcgggtgggccccctggttggcccccagccaccctcgctgaggacagcatccaagggagtgggttttgtgcaagggctgggggtctcctgcctctcctggtgtcgccggtggctcattttctggcaaatggaggcacgaacgcaggggccaaatagcaataaatgggttttgttttttttttgcaataa

SEQ ID NO: 181037 - DNA, 829 bp, Homo sapiens
  Payload ID: 15651
  Gene Symbol: SH3TC1
  Gene Name: SH3 domain and tetratricopeptide repeats 1
  ENST ID: ENST00000382521
  CDS Start-End: 71-412
gccctgtgggcctgggagctgcctctgaggaacacgccgcagggccaggcatgtgaggtctctgcgggtcatggagaacctccctgccgtgaccactgaggagccgacccccatggggaggggtcctgtgggaccctcaggaggtggcagcacccgggaccaggtccggactgtggtcatgaggccctctgtgagctgggagaaagcggggcccgaggaggccaaggcgccagtgagaggcggagccactgtgcccgctgagtcacttgagaggccagggcccagctcgtgtttttccagggacgcgtcagtgataacaaaactggcaaagaacgaggcaggggcctttgaacccccatgttcagagaccgttccagaaacagtccgatgggtttggccttggaacccctgagagtcctcaggatgaggcatcctcgttctccaggaggcacccaaggtgcagagagggaagggccgggccaggccaccctgtggtcaggggccgggccaggacgtgtgcccagtttcctgaattcccgggagacctgaagagtgacctaggtgatctccaggatcccctcttacccccatcctgagaccctgaaggggacgaggggagaggcaggggagaccaaggcctgcacggcccctcccggcaggagacagctgcggttgtgacccgtccctgggcctcgtcctcccagtgtccagcctcagcccagtctcctcttagctgcctatgtccctgtcttgggactccagggcttggcacatggtaggtgcttcgtcactgttcaagggattgatgaatgaaggatgtgtttggaca

SEQ ID NO: 181038 - DNA, 617 bp, Homo sapiens
  Payload ID: 15651
  Gene Symbol: SH3TC1
  Gene Name: SH3 domain and tetratricopeptide repeats 1
  ENST ID: ENST00000457650
  CDS Start-End: 335-617
gggcctgggagctgcctctgaggaacacgccgcaggcgacggagcactgttccgggagcacggtctgttgggtgtgacggcccagcaaagaggcagtgaccggctcctgaggaggggcacaaggcacccaggggttctgcctcgacagggaaggggactccaggcagaaaaccagcgagaggaggccccgtggaggaagggagcacagcaaacccgagatagggaggggaggcgcagcagcggtgcgggatcacgcccaccacaacacggtgcacggtgcggtgaggggctcgctggatctgaaagggccaggcatgtgaggtctctgcgggtcatggagaacctccctgccgtgaccactgaggagccgacccccatggggaggggtcctgtgggaccctcaggaggtggcagcacccgggaccaggtccggactgtggtcatgaggccctctgtgagctgggagaaagcggggcccgaggaggccaaggcgccagtgagaggcgacgaggctcctcctgcccgcgtggctgggcctgctgctgggacccctccctgccagatgggggtttatcccacagacctgaccctgcagctgctggctgtgcggaggaaga

SEQ ID NO: 181039 - DNA, 509 bp, Homo sapiens
  Payload ID: 15651
  Gene Symbol: SH3TC1
  Gene Name: SH3 domain and tetratricopeptide repeats 1
  ENST ID: ENST00000509119
  CDS Start-End: 193-509
aaaaatgtgcaccttcttgcctggacagggtgctgggctgtgtggctgtcctgaggaactgtgatagcaacagctgtggccctgcagcaggtggtgggcccgggatccagcctcccctcttcccttccctggcaggacgaggctcctcctgcccgcgtggctgggcctgctgctgggacccctccctgccagatgggggtttatcccacagacctgaccctgcagctgctggctgtgcggaggaagagcagactgcgggaccccggcctacagcagaccctccggggccagctccgcctgctggagaatgatagccgggagatggcccgcgtgcttggggaattatcagccaggctgctgtccatccacagtgaccaggaccggatcgtggtgacgtttaagacttttgaagaaatctggaagttttccacctaccatgctctcggcttcactcatcactgcctggcaaacctgctcatggaccaggccttctggctgctcttgcccag

SEQ ID NO: 181040 - DNA, 1124 bp, Homo sapiens
  Payload ID: 15651
  Gene Symbol: SH3TC1
  Gene Name: SH3 domain and tetratricopeptide repeats 1
  ENST ID: ENST00000511002
  CDS Start-End: 1-304
ccacgtgctcctgcagctgggccatctctgcacccgccagggcccggcccagcagggcaagggctactacgagtgggcccttctggtcgccgtggagatgggccacgtggagagccagctgcgggccgtccagcggctgtgccacttctacagcgccgtcatgcccagcgaggcccagtgtgtcatctaccatgagctccagctctccctggcctgcaaggtggccgacaaggtgctggaggggcagctcctggagaccatcagccagctctacctgtccctgggcaccgagcgggcccagtgacattgctgcactcacaccccttcgactcaccaagagagcagggaaggagccggattccacagggacccgggagatcggctccagccttggcctcaggttcacagcaggaaaatgggccagtgtgttagagccatgttctcaaagtgtggtccctggaccagcagagcagcatccatgtcacctaggagcttgtggcaagtgggagttctagggcccgccccaggcccgtggagccagaagctctgggggcaggccagcaagctatatggacaggcctctggatgactgtgatgcctgcgcaccttgagaaccatcggcctggatagcatctgaacactgatggctcctgggcctacaaatccgcactggactacaccaaacgaagtctggggattttcattgacctccagaagaaagagaaggaggcgcatgcctggctgcaagcagggaagatctattacatcttgcggcagagcgagctggtggacctctacatccaggtggcacagaacgtggccctgtacacaggcgaccccaacctggggctggagctgtttgaggcggctggagacatcttcttcgacggggcctgggagcgggagaaagctgtgtccttctaccgggaccgggccctgcccctggcagtgactacgggcaaccgcaaggcggagctgcggctgtgcaacaagctggtggcactgctggccacgctggaggagccccaggagggcttggagtttgcccacatggccctagcactcagcatcaccctgggggaccggctgaacgagcgcgtggcctaccaccggctggccgccct

SEQ ID NO: 181041 - DNA, 4293 bp, Homo sapiens
  Payload ID: 15651
  Gene Symbol: SH3TC1
  Gene Name: SH3 domain and tetratricopeptide repeats 1
  ENST ID: ENST00000515682
  CDS Start-End: 64-294
gggcctgggagctgcctctgaggaacacgccgcagggccaggcatgtgaggtctctgcgggtcatggagaacctccctgccgtgaccactgaggagccgacccccatggggaggggtcctgtgggaccctcaggaggtggcagcacccgggaccaggtccggactgtggtcatgaggccctctgtgagctgggagaaagcggggcccgaggaggccaaggcgccagtgagaggcgagagacctggagcgtttggcgccttcagaggagccaggcctttgcttggtctcccctaatcctgggaacctgctgtgttgcagacgaggctcctcctgcccgcgtggctgggcctgctgctgggacccctccctgccagatgggggtttatcccacagacctgaccctgcagctgctggctgtgcggaggaagagcagactgcgggaccccggcctacagcagaccctccggggccagctccgcctgctggagaatgatagccgggagatggcccgcgtgcttggggaattatcagccaggctgctgtccatccacagtgaccaggaccggatcgtggtgacgtttaagacttttgaagaaatctggaagttttccacctaccatgctctcggcttcactcatcactgcctggcaaacctgctcatggaccaggccttctggctgctcttgcccagtgaggaggaggagacggccatccaagtccatgtggatgagaacgccttaaggctgacccacgagagcctcctcatccaagaagggcccttctttgtcctgtgtcctgaccaccatgtgagagtgatgacgggtccccgggatgcaggaaatggcccccaggccctcaggcaggcttcgggggcaccccagggagaggcggccccggaaacagactcttcaccgccgagccccagcgtgtcctccgaggaggtggcagtggcggccgccccggagcctttgattccatttcatcagtgggctcttaggatcccccaggaccccatcgacgatgccatgggtggccctgtgatgcccggcaacccgctgatggctgtgggcctggcctcggcattggcagacttccagggctcggggcccgaagagatgaccttccgaggtggcgacctcatcgagatccttggggcgcaggtgcccagcctgccctggtgcgtgggccgacacgcagcctcgggccgggtggggtttgtgcggagcagcctcatcagcatgcagggccccgtgtccgagttggaaagtgcgatttttctcaatgaggaagaaaagtcattcttcagcgagggctgcttttctgaggaggatgccaggcagttgctgaggcggatgtcgggcaccgatgtctgcagcgtgtacagcctggactcagtagaggaagctgagaccgagcagccgcaggaaaaagaaatacctccaccttgcctgagcctggagccacaggagaccttgcagaaggtgaagaatgttctggaacaatgcaagacctgcccaggctgcccccaggagccagcgtcctggggtctctgtgcggcatccagcgacgtgagcttgcaggaccccgaggagccctccttctgcttggaagccgaggacgactgggaggacccagaggccctgagctcactgctgctgttcctgaacgcccctgggtacaaggccagcttccgtggcctgtacgatgtggcgctgccgtggctgagcagcgtgttccgcagcttcagcgacgaggaggagctgactgggcgcctggcacaggcccggggggcggccaagaaagctggcctcctcatggccctggccaggctctgcttcctcctggggcggctgtgcagcaggaggctcaagctgtcccaggcccgggtgtactttgaggaagcgctgggggccctggagggcagcttcggggacctgttcctagtggtggctgtgtacgccaacctggccagcatttaccggaagcagaagaaccgggagaagtgtgcacaggtggtgcccaaagccatggccctgctcctggggacgcctgaccacatctgcagcaccgaggcggagggggagctcctgcagctggcgctgcggcgggcggtgggtggccagagcctgcaggccgaggcccgggcctgcttcctgctggccaggcaccacgtgcacctcaagcagcccgaggaggccctgcccttcctagagcggctgctgcttttgcacagggactcgggagccccagaggccgcgtggctctcagactgctacctactcctggctgacatctacagccgcaagtgcctgccccacctggtgctgagctgtgtcaaggtggcctcattgcggacacggggctcgctggccggctcgctgaggagtgtgaacctggtgctccagaacgccccccagccccacagcctccctgcccaaacttcccactacctcaggcaagcgctggcctccctgaccccgggcacaggccaggcgctgcgcggccccctctacaccagcttggcccagctgtacagccaccatggctgccacggcccggccatcaccttcatgacgcaggcagtggaagccagtgctattgccggagtccgtgccatcgtggaccacctggtggccctggcctggctgcacgtgcttcatgggcagagcccggtggccctggacatcctgcagtctgtccgggatgcagtggtggccagcgaggaccaggagggcgtgattgccaacatggtggccgtggctctgaagaggacgggccggacgaggcaggcagctgagagctactaccgcgccctgcgggtggctcgggacctgggccagcaaaggaaccaggcagtggggctggccaacttcggggccctgtgcctgcatgcgggtgccagcaggctggcccagcactacctcctggaggccgtgcggctgttctcgaggctgccccttggggagtgtggccgggacttcacccacgtgctcctgcagctgggccatctctgcacccgccagggcccggcccagcagggcaagggctactacgagtgggcccttctggtcgccgtggagatgggccacgtggagagccagctgcgggccgtccagcggctgtgccacttctacagcgccgtcatgcccagcgaggcccagtgtgtcatctaccatgagctccagctctccctggcctgcaaggtggccgacaaggtgctggaggggcagctcctggagaccatcagccagctctacctgtccctgggcaccgagcgggcctacaaatccgcactggactacaccaaacgaagtctggggattttcattgacctccagaagaaagagaaggaggcgcatgcctggctgcaagcagggaagatctattacatcttgcggcagagcgagctggtggacctctacatccaggtggcacagaacgtggccctgtacacaggcgaccccaacctggggctggagctgtttgaggcggctggagacatcttcttcgacggggcctgggagcgggagaaagctgtgtccttctaccgggaccgggccctgcccctggcagtgactacgggcaaccgcaaggcggagctgcggctgtgcaacaagctggtggcactgctggccacgctggaggagccccaggagggcttggagtttgcccacatggccctagcactcagcatcaccctgggggaccggctgaacgagcgcgtggcctaccaccggctggccgccctgcaacaccgactgggccatggcgagctggcagagcacttctacctcaaggccctgtcgctctgcaactcgccgctggagtttgacgaggagaccctctactacgtgaaggtgtacctggtgctcggtgacatcatcttctacgacctgaaggacccgtttgatgcagccgggtactaccagctggcgctggcagccgccgtggacctgggcaacaagaaggcacagctgaagatctacacgcggctggccaccatctaccacaacttcctcctggaccgtgagaagtcgctcttcttctaccagaaggccaggaccttcgccacagagctcaacgtccgcagggtcaacctgcctcctctgccactctgcgggtgggccccctggttggcccccagccaccctcgctgaggacagcatccaagggagtgggttttgtgcaagggctgggggtctcctgcctctcctggtgtcgccggtggctcattttctggcaaatggaggcacgaacgcaggggccaaatagcaataaatgggttttgttttt

SEQ ID NO: 181042 - DNA, 3484 bp, Homo sapiens
  Payload ID: 15651
  Gene Symbol: SH3TC1
  Gene Name: SH3 domain and tetratricopeptide repeats 1
  ENST ID: ENST00000502669
  CDS Start-End: 131-739
agccccgtggggccagccagcgctgggccaggagcggccacctggttcctgcgtgctacggccctgtgggcctgggagctgcctctgaggaacacgccgcagggccaggcatgtgaggtctctgcgggtcatggagaacctccctgccgtgaccactgaggagccgacccccatggggaggggtcctgtgggaccctcaggaggtggcagcacccgggaccaggtccggactgtggtcatgaggccctctgtgagctgggagaaagcggggcccgaggaggccaaggcgccagtgagaggcgacctgaccctgcagctgctggctgtgcggaggaagagcagactgcgggaccccggcctacagcagaccctccggggccagctccgcctgctggagaatgatagccgggagatggcccgcgtgcttggggaattatcagccaggctgctgtccatccacagtgaccaggaccggatcgtggtgacgtttaagacttttgaagaaatctggaagttttccacctaccatgctctcggcttcactcatcactgcctggcaaacctgctcatggaccaggccttctggctgctcttgcccagtgaggaggaggagacggccatccaagtccatgtggatgagaacgccttaaggctgacccacgagagcctcctcatccaagaaggtgggctcttaggatcccccaggaccccatcgacgatgccatgggtggccctgtgatgcccggcaacccgctgatggctgtgggcctggcctcggcattggcagacttccagggctcggggcccgaagagatgaccttccgaggtggcgacctcatcgagatccttggggcgcaggtgcccagcctgccctggtgcgtgggccgacacgcagcctcgggccgggtggggtttgtgcggagcagcctcatcagcatgcagggccccgtgtccgagttggaaagtgcgatttttctcaatgaggaagaaaagtcattcttcagcgagggctgcttttctgaggaggatgccaggcagttgctgaggcggatgtcgggcaccgatgtctgcagcgtgtacagcctggactcagtagaggaagctgagaccgagcagccgcaggaaaaagaaatacctccaccttgcctgagcctggagccacaggagaccttgcagaaggtgaagaatgttctggaacaatgcaagacctgcccaggctgcccccaggagccagcgtcctggggtctctgtgcggcatccagcgacgtgagcttgcaggaccccgaggagccctccttctgcttggaagccgaggacgactgggaggacccagaggccctgagctcactgctgctgttcctgaacgcccctgggtacaaggccagcttccgtggcctgtacgatgtggcgctgccgtggctgagcagcgtgttccgcagcttcagcgacgaggaggagctgactgggcgcctggcacaggcccggggggcggccaagaaagctggcctcctcatggccctggccaggctctgcttcctcctggggcggctgtgcagcaggaggctcaagctgtcccaggcccgggtgtactttgaggaagcgctgggggccctggagggcagcttcggggacctgttcctagtggtggctgtgtacgccaacctggccagcatttaccggaagcagaagaaccgggagaagtgtgcacaggtggtgcccaaagccatggccctgctcctggggacgcctgaccacatctgcagcaccgaggcggagggggagctcctgcagctggcgctgcggcgggcggtgggtggccagagcctgcaggccgaggcccgggcctgcttcctgctggccaggcaccacgtgcacctcaagcagcccgaggaggccctgcccttcctagagcggctgctgcttttgcacagggactcgggagccccagaggccgcgtggctctcagactgctacctactcctggctgacatctacagccgcaagtgcctgccccacctggtgctgagctgtgtcaaggtggcctcattgcggacacggggctcgctggccggctcgctgaggagtgtgaacctggtgctccagaacgccccccagccccacagcctccctgcccaaacttcccactacctcaggcaagcgctggcctccctgaccccgggcacaggccaggcgctgcgcggccccctctacaccagcttggcccagctgtacagccaccatggctgccacggcccggccatcaccttcatgacgcaggcagtggaagccagtgctattgccggagtccgtgccatcgtggaccacctggtggccctggcctggctgcacgtgcttcatgggcagagcccggtggccctggacatcctgcagtctgtccgggatgcagtggtggccagcgaggaccaggagggcgtgattgccaacatggtggccgtggctctgaagaggacgggccggacgaggcaggcagctgagagctactaccgcgccctgcgggtggctcgggacctgggccagcaaaggaaccaggcagtggggctggccaacttcggggccctgtgcctgcatgcgggtgccagcaggctggcccagcactacctcctggaggccgtgcggctgttctcgaggctgccccttggggagtgtggccgggacttcacccacgtgctcctgcagctgggccatctctgcacccgccagggcccggcccagcagggcaagggctactacgagtgggcccttctggtcgccgtggagatgggccacgtggagagccagctgcgggccgtccagcggctgtgccacttctacagcgccgtcatgcccagcgaggcccagtgtgtcatctaccatgagctccagctctccctggcctgcaaggtggccgacaaggtgctggaggggcagctcctggagaccatcagccagctctacctgtccctgggcaccgagcgggcctacaaatccgcactggactacaccaaacgaagtctggggattttcattgacctccagaagaaagagaaggaggcgcatgcctggctgcaagcagggaagatctattacatcttgcggcagagcgagctggtggacctctacatccaggtggcacagaacgtggccctgtacacaggcgaccccaacctggggctggagctgtttgaggcggctggagacatcttcttcgacggggcctgggagcgggagaaagctgtgtccttctaccgggggaccggctgaacgagcgcgtggcctaccaccggctggccgccctgcaacaccgactgggccatggcgagctggcagagcacttctacctcaaggccctgtcgctctgcaactcgccgctggagtttgacgaggagaccctctactacgtgaaggtgtacctggtgctcggtgacatcatcttctacgacctgaaggacccgtttgatgcagccgggtactaccagctggcgct

SEQ ID NO: 181043 - DNA, 551 bp, Homo sapiens
  Payload ID: 15651
  Gene Symbol: SH3TC1
  Gene Name: SH3 domain and tetratricopeptide repeats 1
  ENST ID: ENST00000508641
  CDS Start-End: 1-551
catgtggatgagaacgccttaaggctgacccacgagagcctcctcatccaagaagggcccttctttgtcctgtgtcctgaccaccatgtgagagtgatgacgggtccccgggatgcaggaaatggcccccaggccctcaggcaggcttcgggggcaccccagggagaggcggccccggaaacagactcttcaccgccgagccccagcgtgtcctccgaggaggtggcagtggcggccgccccggagcctttgattccatttcatcagtgggctcttaggatcccccaggaccccatcgacgatgccatgggtggccctgtgatgcccggcaacccgctgatggctgtgggcctggcctcggcattggcagacttccagggctcggggcccgaagagatgaccttccgaggtggcgacctcatcgagatccttggggcgcaggtgcccagcctgccctggttggaaagtgcgatttttctcaatgaggaagaaaagtcattcttcagcgagggctgcttttctgaggaggatgccaggcagttgctgaggcg

SEQ ID NO: 181044 - DNA, 558 bp, Homo sapiens
  Payload ID: 15651
  Gene Symbol: SH3TC1
  Gene Name: SH3 domain and tetratricopeptide repeats 1
  ENST ID: ENST00000507891
  CDS Start-End: 1-77
ccacctaccatgctctcgaacttgagggaagctgccgtccagtggcctcagtgctgaccgggaaagctgttatttgaaagctgacccacgcttcactcatcactgcctggcaaacctgctcatggaccaggccttctggctgctcttgcccagtgaggaggaggagacggccatccaagtccatgtggatgagaacgccttaaggctgacccacgagagcctcctcatccaagaagggcccttctttgtcctgtgtcctgaccaccatgtgagagtgatgacgggtccccgggatgcaggaaatggcccccaggccctcaggcaggcttcgggggcaccccagggagaggcggccccggaaacagactcttcaccgccgagccccagcgtgtcctccgaggaggtggcagtggcggccgccccggagcctttgattccatttcatcagtgggctcttaggatcccccaggaccccatcgacgatgccatgggtggccctgtgatgcccggcaacccgctgatggctgtgggcctggcctcggcattggcagacttcca

SEQ ID NO: 181045 - DNA, 514 bp, Homo sapiens
  Payload ID: 15651
  Gene Symbol: SH3TC1
  Gene Name: SH3 domain and tetratricopeptide repeats 1
  ENST ID: ENST00000512966
  CDS Start-End: 1-124
ctaccagaaggccaggaccttcgccacagagctcaacgtccgcagggtcaacctgcctcctctgccactctgcgggccactgtgcgcggaggtgggggctgctagtgcccccattcgccagtgaagaaatagagacacagagaggttaactgtctggcccaccatcacacagacgcagagcccagtgcgctgaccacaccaccctgccggcctgctgccaggaaggtgcccccattaggacccaaggtcagttcctgcacctctcttgtggtgtcaggagagccacagggcggtgagggtggcccaggggatcccccactaagtgtcctctggtcccagacttggctgggctgagcctgaccagtcccacctccagccactggtcagtcctgtgggaagtgagatgcagggatctctgcctgtgtagacgctgctgcccagtgttgaaagccttttctgggctgcccctcagccctccccatgtacccctccccttccggcccccggccctcat

SEQ ID NO: 181046 - DNA, 7324 bp, Homo sapiens
  Payload ID: 15652
  Gene Symbol: SH3TC2
  Gene Name: SH3 domain and tetratricopeptide repeats 2
  ENST ID: ENST00000323829
  CDS Start-End: 23-706
gccagggtaggatggtacacacatgggtggctgcttctgcatccccagggagcggagtctgacccggggcccaggtaaagaaactccttccaaggatccaactgtatcgagtgagtgtatagcctcatctgaatacaaggaaaaatgttttctgccacagaacattaatccagacctgacactctccttctgtgtaaagagccgctccaggaggtgtgtaaatggacccctacaggaagctgctcggaggcggctctgggcactggagaatgaggaccaggaggtgcgcatgctgtttaaggacctctcagcaaggttggtcagtatccagtctcagagggcccagtttctcatcaccttcaagaccatggaggaaatctggaagttctccacctaccttaatttaggctacgtatccatgtgtctagaacatctcctctttgaccacaagtactggctcaactgcatattggtggaggatacagagatccaagtgtctgtagatgataaacacctggaaacaatatacctgggactcctgatacaggaaggccacttcttctgcagagccctgtgctccgtgactccaccagccgagaaggaaggggaatgcttgacactttgcaagaatgagttaatctcagtgaagatggcagaagctggctccgagttggaaggcgtgtctttggtgacaggtggttcctaaagaattatccaggaagctgtggcctttccaggaagagggattggacaggctcctatcagattggcagaggacgctgtaaggccttgacgggttatgagccaggagaaaaggatgaactgaatttctaccagggagaaagcattgagatcatcggctttgtcatacctgggcttcagtggttcattggaaagtcgacaagttcaggacaagtgggctttgtccccaccaggaacatagatcctgattcttattccccaatgacttggtgtgtttcttcaatatgaagattcatgtctttcttcaattctggaaaattttcagtccttcttcctttgaatattgcctctctctcgttctttttagtctctcttctggaattcctattagaggagcaggaactctgcctttctcagtgatgaggagagatgctccctgttggccctgggaagtgataagcagactgagtgttccagcttcctccacactcttgctcgcactgacatcacatctgtctaccggctcagtgggtttgaatccatccagaatcctccaaatgatctgagtgcatcccagcctgaaggtttcaaggaggtcaggcctggcagagcctgggaggagcatcaggccgtggggtccagacagtccagcagctctgaggactccagcctggaggaggagctcctctcggccacctcagacagctatcgcctgccggagcctgatgaccttgatgacccggaactgctcatggacctaagcactggtcaggaggaggaggctgagaacttcgcccccatattggcttttctggatcatgagggttatgctgaccactttaagagtctctatgacttctccttctctttcctcacttcttccttttatagcttctctgaggaggatgagtttgtggcctacctggaggcatcaagaaagtgggccaagaagagccacatgacctgggcccatgcccgtctctgcttcctcctgggccggctgagcatcaggaaggtcaaactctctcaggccagggtgtacttcgaggaggccatccacattctcaatggagcatttgaggacctatccttggtggccactctgtacatcaatttggctgccatctacctgaaacagaggctgagacataaaggctccgccctgttggaaaaggcaggtgccctgctggcctgcctgcctgaccgtgagtctagtgccaagcatgaactcgacgtggtggcctacgtgctgcgccaggggattgtggtgggcagcagcccgctggaggccagggcctgctttctggccatccgcttgctcctgagcctaggccggcacgaggaggtcctgccctttgccgagcgcctgcagctcctctctggacaccctcctgcctctgaggctgtggccagtgttttgagttttctgtatgacaagaaatatcttccacaccttgcagtggcctctgtccagcaacatggtatccagagtgcccaagggatgtctcttcctatttggcaggtccaccttgtcctccagaacacaaccaagctccttggctttccttccccaggctggggtgaagtttctgccttggcctgcccaatgctcagacaggccctggctgcctgtgaggaactagcagaccggagcacccagagggccctgtgtctcatcctttccaaagtgtacctcgagcacaggtctcctgacggtgccatccactacctgagccaggccttggtgctagggcagctgctgggtgagcaggaatcctttgagtcttctctctgcctggcatgggcctatctcttagccagccaggccaagaaggctttggatgtgcttgagccactgctatgctccctgaaggagacagagagtctcactcaaaggggagtcatctataacctcctgggacttgcactccaaggtgaaggccgggtgaacagggcagccaagagctatcttcgggccttgaacagagcccaggaggtgggagatgtgcataaccaggcagtggctatggccaatcttggccacctgagccttaagtcctgggctcagcatccagccagaaactatctcctgcaggctgtacgactctattgtgaacttcaggccagtaaggagacagacatggaattagtacaggtgtttctctggttggcccaagttctggtgtctggacaccagctgacccatggccttctttgttatgaaatggcattgctgtttggcttaaggcatcgacatctaaagagtcagcttcaggccaccaaatccctctgccatttctacagctctgtgtccccaaaccctgaggcatgcatcacctaccatgagcactggctggccctggctcagcaactcagggaccgggagatggaagggaggctgctggagtccctggggcagctttatcggaacctaaataccgccaggtccctcaggaggtcactcacatgcatcaaggagagcctgcgtatcttcattgacctgggggagacagacaaggctgctgaggcctggcttggggcggggcgactccactacctcatgcaggaagacgagctggtggagctgtgcctgcaggcagccatccagacagccctgaagtcagaggagcctttgctggctctcaaactttatgaagaagcaggtgatgtgttcttcaatgggacccgccacaggcatcatgcagtggagtactaccgagctggagctgttcctttagcaaggaggttgaaggcggtgagaactgagctccggattttcaataagctgacagagctgcagattagcctcgaaggctatgagaaggctttggaatttgccaccctggccgccaggctcagcacagtcacaggagatcagaggcaagagctggtggcctttcaccgcctggctacagtgtactactccctgcacatgtatgagatggctgaggactgctacctgaagaccctgtccctctgtccaccatggctgcagagtcccaaggaggccctgtactatgccaaggtgtattatcgcctgggcagactcaccttctgccagctgaaggatgcccatgatgccactgagtacttccttctggccctggcagcagcggtcctgctgggtgatgaggagcttcaggacaccattaggagcaggctggacaacatctgccagagccccctgtggcacagcaggccctccgggtgctcctcagagagggcgcggtggctgagtggtggtggcctggccctctgaggaaagctgtcctgtctctggacatttggcatggccagactctgaccccactgccctaggctcttaaatactcattgggagggtccgagtccttacctggcctagccccctcatttcacaagaagaagaatgaagtccaggaggagaagggctcattgcaggccacagaaagatttgatggtgcagcgatgagaattcctggttccaggctttgcatctggagcctttaccggttgactgttgccttccacacaaacagcctctgaaaagcactttctccatacataattctggagaagatgagggatcttgccctccaggagccttccttcctcccccaatgaggaaatcagtcactgcactggtgcaaaggcaagcagattggaatttgtgctcttcaccgattttctcagggaaagaccccttccccttgccagcagaggaacctgtagttttttccatttctttcttcagaaccaaagtatgtatcactcctcatgctcacagggattgacaggagagaattcaccaggatcttagctcaaaagacacagcctcagaatggccagatggattgcacgaaacctgacttggattcaccatcttcctcctgccataaggctgtgctcccacataacctcccagaagctccagggaagctttccaagagcaaaggcttggaaattgaatgttaagaaaattatgacataaattacatgtaaatagtgtatatgattaaatattgtccagttacatttacacacacattttgtctcatccacaatgggggcagatgagatggaggacttgatggatgggagagaataccaatacatgtcttttttttttttttttttttttgagacagtttctcctctgttgcccaggctggagttcagtggtacagtcagggcttcctgcgacctcagactccggggctcaagtgatcctccagtgtcaacctcctgagtagctggaactacaggcatgtgccatacccaactacaaggcatcttattgatttcagggcagctgctttacaaagcatctctattaataacatcactgcatagcacactgagtggcctaaaacacttataatctcatggtttctgaagggcaggaatccaagcatgacttagctgagcccaccagcttagggtggttcacaggctgcaatcagctggggctgcagttatctcaacttcaactagagaaggatgggcttccaagctcacccacacagctgttgttaggagtcagttttttgctagctgttggccagaggcttcctgcagccacttgccacgtgggcctctccacagggcagtcacaacatggcaccatgcttcactagagggagcaaacaagaggagcaagaaccagagtgagcaggagaaaagggagtgactctttctataacctgatcacagaagtgacatctccttagtcttgcctattcaattcataataaatgagtcactaggtctagctcccacaagaggggagtgtttaccaacagcttgaataccagatggtgaggaatcattggggatcatttcagaagtgacctaccacagtatctgagttctttgataatgaaattgggaattctctaatttcagcaaactgaaaatatggtccactaaccagcagcatcagcatcacctgtgagattgtttgaaatgaaaatctgtggccccacctatgatctctgaatcagaatctctggatcccagaacgctgactcgtccaagctttcctggtgattttaatgcaccctaaagtatgggaagcaccactgcagggcaagagccctcagatagtgtgcataactattacctggtgaggttgtggaacatgaacttcttggtttctatctctaataattctgattcagtagatctgggatgtatcccaggaacatgcatttttagaaagcaactcaagcaagcctgatgcaggtggttcacccttgctccttttctgtgaaccacaaggataccagccataattccctgcatctgatgcccatcagcttagcttttattatcagaccatctgcccttaatttctagcttcttgggctgaccagatgattggttgtatgaaagggtgagatgggagtggtgagttgagccgccattgcatcttctagtcatcaaggttgtctactaattggcacacattttctcttagagatgtggttggttgtcaaaaggctgtctactctagagagtattctccaggaaggagaagcttccagttgtctaattagtaaagttatctaatctactaccatggagaatagatgtggttttgcccccaccacaagctgtaaaagccccaagctgggagggacgttgcggttgaggctattcagtctaatctcccgtgcatagtcctttcaacaacattcctgggagacagtcaggggcacacacattccagaacagttacatatcgtgtatttgaagaaggctcacacagccctggaaaccatgccactggccattccccatctgactcaggttacagatcccctcccttttcccactgaccactcactctcctctggccagatttgtttctgtttctctgaaagagcagttcccacaactgcatgaggcttttgatattggccggtgggtgaagagtacagagggatgttactatacttaatttgattcttcctctccccagcagccacatctgtccttggcttccattgagctttataatcagttgaaacttctgtgtcttctgacttgaacttctgtttggacagatctttctcaattgctgcaaatatgcacatgcatttgcatatgcatacacatacacacacatacgtgaagagcgttgtttctatccatgttacatctccttggaaattttagctaaaatttcccaattctgtgcactttgatttacctataaatctgatgaatttacccataaccaggtcagttataaaaatgtttagcatgtttccaaagacaagggtaagactatttttttaaaataagaaaaacattgtgctatataattgcaattactacattctatatgtaaaccgcttgctaaaactcttttaaaaagtgtttaaaattttcatttttgaaatgtgggccagctattccctttggaaacatgttgatgctgtctttttttcatgatccacagagagtaaagtggtgattggatttggtctctacttaaacatttaaaaaaataagtgtatcatagccaaacatgatctagttaccctctttattctaattgttccctcaaatcttatatgggctgtgtgactgctggctccttacatctaatctaaataaagaacaagaagggcattgc

SEQ ID NO: 181047 - DNA, 2681 bp, Homo sapiens
  Payload ID: 15652
  Gene Symbol: SH3TC2
  Gene Name: SH3 domain and tetratricopeptide repeats 2
  Uniprot ID: Q8TF17
  ENST ID: ENST00000502274
  CDS Start-End: 1471-1923
attatccatgtaacagccatagcacaatcctgggtacatggtaagtccttggtaagtgttgcctgtgccacactattattatattacaggtgctgttgttccccaagtgtaaagtaaatgatattttattctcttcataagctatgttcccattgcaaaaggactgtgccctgaattttaaattagttaatttttagttaaaagtgcattttcccatgaagctaaaatgtaaatgaaggtcaggttcccattaccctaactcagaacatagctgaatatcttgtgtttatgtcaaaagctagtgggaaacaataatagtcatcagaacagataaatggcagaataaaaaagatttaaaaacccctcatcttgaatgttggtgtttgaagaaaagcaggtttgatagagaagccttgattagatgtaagggtaaatgtaatattctgtgatgattccaggagggtcttctgggcattttcaagggcatcgggtgtggatgataccggactttattttgtctaattgcattcttgagagagccttccctcttttccctacctttttccttattgcataggatctcatctgagtgactgtgtgctaatctcaggaaaggccttggaggccccaggcagttcctctgagcactctttatccctcactggatgggagctgaagggaggttgtatgcatcctttatataagtacttcccctgtggctgatttttccatatcagagaattttctctctcttagattttcttttttaattttggcttttggctctttgaagcttaaaagtgatgtttttagatggtatcccacagccaccttgcaaatattccaaagacatgattgtaagcctttgttccctgtaaaagattgctctgtattaaaacaaatccaccaaacaacaagtcatagacccgttagaaaccagcattctaaagcatggtttaagtgtgaacaggtgtttgtagcttatctgagactgacagtaggtaaaggggccaaggagagactgctacatggtggtacccaagataattctctgaagagagagacttttgtgtgaggaagacatttattatacagagtgatttattgcaattcttagctactccatcaagctagacttgtcaccatgtcccattaaaagggtttaagaagaattctttctcagaatcctgcattacagtagcatctgcaataaggagaaaattttcttctgggaatcactccaggaaaccttgacccatcctctacttagtcactcttatagagccctgcattttcttttgtagcatttatgacatgtgtaatgttacatttgtttgtgggattatttaaggaatgtctgtcatgtgagacaataagctttatgagtacaggcacctcttctgtcttatttcctatgccccagcacagtccctgacatctagtagaccttcaaaaagttttatggaatgaatgagtgaacaaatgatgcaaagtgttggttgcaggatatctctctcagtcttccaattcttaggagatcagaggcaagagctggtggcctttcaccgcctggctacagtgtactactccctgcacatgtatgagatggctgaggactgctacctgaagaccctgtccctctgtccaccatggctgcagagtcccaaggaggccctgtactatgccaaggtgtattatcgcctgggcagactcaccttctgccagctgaaggatgcccatgatgccactgagtacttccttctggccctggcagcagcggtcctgctgggtgatgaggagcttcaggacaccattaggagcaggctggacaacatctgccagagccccctgtggcacagcaggccctccgggtgctcctcagagagggcgcggtggctgagtggtggtggcctggccctctgaggaaagctgtcctgtctctggacatttggcatggccagactctgaccccactgccctaggctcttaaatactcattgggagggtccgagtccttacctggcctagccccctcatttcacaagaagaagaatgaagtccaggaggagaagggctcattgcaggccacagaaagatttgatggtgcagcgatgagaattcctggttccaggctttgcatctggagcctttaccggttgactgttgccttccacacaaacagcctctgaaaagcactttctccatacataattctggagaagatgagggatcttgccctccaggagccttccttcctcccccaatgaggaaatcagtcactgcactggtgcaaaggcaagcagattggaatttgtgctcttcaccgattttctcagggaaagaccccttccccttgccagcagaggaacctgtagttttttccatttctttcttcagaaccaaagtatgtatcactcctcatgctcacagggattgacaggagagaattcaccaggatcttagctcaaaagacacagcctcagaatggccagatggattgcacgaaacctgacttggattcaccatcttcctcctgccataaggctgtgctcccacataacctcccagaagctccagggaagctttccaagagcaaaggcttggaaattgaatgttaagaaaattatgacataaattacatgtaaatagtgtatatgattaaatattgtccagttacattt

SEQ ID NO: 181048 - DNA, 3276 bp, Homo sapiens
  Payload ID: 15652
  Gene Symbol: SH3TC2
  Gene Name: SH3 domain and tetratricopeptide repeats 2
  ENST ID: ENST00000511307
  CDS Start-End: 41-328
gtgttcccaagggcctcggccagggtaggatggtacacacatgggtggctgcttctgcatccccagggagcggagtctgacccggggcccaggtaaagaaactccttccaaggatccaactgtatcgagtgagtgtatagcctcatctgaatacaaggaaaaatgttttctgccacagaacattaatccagacctgacactctccttctgtgtaaagagccgctccaggaggtgtgtaaatggacccctacaggaagctgctcggaggcggctctgggcactggagaatgaggaccaggaggtgcgcatgctgtttaaggtattataaaaaaaccaggccgggtgcggtggctcacgcctgtaatcccagcactttgggaggccaaggacctctcagcaaggttggtcagtatccagtctcagagggcccagtttctcatcaccttcaagaccatggaggaaatctggaagttctccacctaccttaatttaggctacgtatccatgtgtctagaacatctcctctttgaccacaagtactggctcaactgcatattggtggaggatacagagatccaagtgtctgtagatgataaacacctggaaacaatatacctgggactcctgatacaggaaggccacttcttctgcagagccctgtgctccgtgactccaccagccgagaaggaaggggaatgcttgacactttgcaagaatgagttaatctcagtgaagatggcagaagctggctccgagttggaaggcgtgtctttggtgacaggtcagcggggcctggtactggtgtcagccttggagcctctgcctctccctttccaccagtggttcctaaagaattatccaggaagctgtggcctttccaggaagagggattggacaggctcctatcagattggcagaggacgctgtaaggccttgacgggttatgagccaggagaaaaggatgaactgaatttctaccagggagaaagcattgagatcatcggctttgtcatacctgggcttcagtggttcattggaaagtcgacaagttcaggacaagtgggctttgtccccaccaggaacatagatcctgattcttattccccaatgagcaggaactctgcctttctcagtgatgaggagagatgctccctgttggccctgggaagtgataagcagactgagtgttccagcttcctccacactcttgctcgcactgacatcacatctgtctaccggctcagtgggtttgaatccatccagaatcctccaaatgatctgagtgcatcccagcctgaaggtttcaaggaggtcaggcctggcagagcctgggaggagcatcaggccgtggggtccagacagtccagcagctctgaggactccagcctggaggaggagctcctctcggccacctcagacagctatcgcctgccggagcctgatgaccttgatgacccggaactgctcatggacctaagcactggtcaggaggaggaggctgagaacttcgcccccatattggcttttctggatcatgagggttatgctgaccactttaagagtctctatgacttctccttctctttcctcacttcttccttttatagcttctctgaggaggatgagtttgtggcctacctggaggcatcaagaaagtgggccaagaagagccacatgacctgggcccatgcccgtctctgcttcctcctgggccggctgagcatcaggaaggtcaaactctctcaggccagggtgtacttcgaggaggccatccacattctcaatggagcatttgaggacctatccttggtggccactctgtacatcaatttggctgccatctacctgaaacagaggctgagacataaaggctccgccctgttggaaaaggcaggtgccctgctggcctgcctgcctgaccgtgagtctagtgccaagcatgaactcgacgtggtggcctacgtgctgcgccaggggattgtggtgggcagcagcccgctggaggccagggcctgctttctggccatccgcttgctcctgagcctaggccggcacgaggaggtcctgccctttgccgagcgcctgcagctcctctctggacaccctcctgcctctgaggctgtggccagtgttttgagttttctgtatgacaagaaatatcttccacaccttgcagtggcctctgtccagcaacatggtatccagagtgcccaagggatgtctcttcctatttggcaggtccaccttgtcctccagaacacaaccaagctccttggctttccttccccaggctggggtgaagtttctgccttggcctgcccaatgctcagacaggccctggctgcctgtgaggaactagcagaccggagcacccagagggccctgtgtctcatcctttccaaagtgtacctcgagcacaggtctcctgacggtgccatccactacctgagccaggccttggtgctagggcagctgctgggtgagcaggaatcctttgagtcttctctctgcctggcatgggcctatctcttagccagccaggccaagaaggctttggatgtgcttgagccactgctatgctccctgaaggagacagagagtctcactcaaaggggagtcatctataacctcctgggacttgcactccaaggtgaaggccgggtgaacagggcagccaagagctatcttcgggccttgaacagagcccaggaggtgggagatgtgcataaccaggcagtggctatggccaatcttggccacctgagccttaagtcctgggctcagcatccagccagaaactatctcctgcaggctgtacgactctattgtgaacttcaggccagtaaggagacagacatggaattagtacaggtgtttctctggttggcccaagttctggtgtctggacaccagctgacccatggccttctttgttatgaaatggcattgctgtttggcttaaggcatcgacatctaaagagtaagtatgtcccatgctgctgggaagctatagagaaaagtgttggatcaagttttatccatttcctatctcaagtcatctcattcatgtccctgctttgtgttcaggtcagcttcaggccaccaaatccctctgccatttctacagctctgtgtccccaaaccctgaggcatgcatcacctaccatgagcactggctggccctggctcagcaactcagggaccgggagatggaagggaggctgctggagtccctggggcagctttatcggaacctaaataccgccaggtgagtca

SEQ ID NO: 181049 - DNA, 4153 bp, Homo sapiens
  Payload ID: 15652
  Gene Symbol: SH3TC2
  Gene Name: SH3 domain and tetratricopeptide repeats 2
  ENST ID: ENST00000504517
  CDS Start-End: 1-426
tgcaagaatgagttaatctcagtgaagatggcagaagctggctccgagttggaaggcgtgtctttggtgacaggtcagcggggcctggtactggtgtcagccttggagcctctgcctctccctttccaccagtggttcctaaagaattatccaggaagctgtggcctttccaggaagagggattggacaggctcctatcagattggcagaggacgctgtaaggccttgacgggttatgagccaggagaaaaggatgaactgaatttctaccagggagaaagcattgagatcatcggctttgtcatacctgggcttcagtggttcattggaaagtcgacaagttcaggacaagtgggctttgtccccaccaggaacatagatcctgattcttattccccaatgacttggtgtgtttcttcaatatgaagattcatgtctttcttcaattctggaaaattttcagtccttcttcctttgaatattgcctctctctcgttctttttagtctctcttctggaattcctattagaggagcaggaactctgcctttctcagtgatgaggagagatgctccctgttggccctgggaagtgataagcagactgagtgttccagcttcctccacactcttgctcgcactgacatcacatctgtctaccggctcagtgggtttgaatccatccagaatcctccaaatgatctgagtgcatcccagcctgaaggtttcaaggaggtcaggcctggcagagcctgggaggagcatcaggccgtggggtccagacagtccagcagctctgaggactccagcctggaggaggagctcctctcggccacctcagacagctatcgcctgccggagcctgatgaccttgatgacccggaactgctcatggacctaagcactggtcaggaggaggaggctgagaacttcgcccccatattggcttttctggatcatgagggttatgctgaccactttaagagtctctatgacttctccttctctttcctcacttcttccttttatagcttctctgaggaggatgagtttgtggcctacctggaggcatcaagaaagtgggccaagaagagccacatgacctgggcccatgcccgtctctgcttcctcctgggccggctgagcatcaggaaggtcaaactctctcaggccagggtgtacttcgaggaggccatccacattctcaatggagcatttgaggacctatccttggtggccactctgtacatcaatttggctgccatctacctgaaacagaggctgagacataaaggctccgccctgttggaaaaggcaggtgccctgctggcctgcctgcctgaccgtgagtctagtgccaagcatgaactcgacgtggtggcctacgtgctgcgccaggggattgtggtgggcagcagcccgctggaggccagggcctgctttctggccatccgcttgctcctgagcctaggccggcacgaggaggtcctgccctttgccgagcgcctgcagctcctctctggacaccctcctgcctctgaggctgtggccagtgttttgagttttctgtatgacaagaaatatcttccacaccttgcagtggcctctgtccagcaacatggtatccagagtgcccaagggatgtctcttcctatttggcaggtccaccttgtcctccagaacacaaccaagctccttggctttccttccccaggctggggtgaagtttctgccttggcctgcccaatgctcagacaggccctggctgcctgtgaggaactagcagaccggagcacccagagggccctgtgtctcatcctttccaaagtgtacctcgagcacaggtctcctgacggtgccatccactacctgagccaggccttggtgctagggcagctgctgggtgagcaggaatcctttgagtcttctctctgcctggcatgggcctatctcttagccagccaggccaagaaggctttggatgtgcttgagccactgctatgctccctgaaggagacagagagtctcactcaaaggggagtcatctataacctcctgggacttgcactccaaggtgaaggccgggtgaacagggcagccaagagctatcttcgggccttgaacagagcccaggaggtgggagatgtgcataaccaggcagtggctatggccaatcttggccacctgagccttaagtcctgggctcagcatccagccagaaactatctcctgcaggctgtacgactctattgtgaacttcaggccagtaaggagacagacatggaattagtacaggtgtttctctggttggcccaagttctggtgtctggacaccagctgacccatggccttctttgttatgaaatggcattgctgtttggcttaaggcatcgacatctaaagagtcagcttcaggccaccaaatccctctgccatttctacagctctgtgtccccaaaccctgaggcatgcatcacctaccatgagcactggctggccctggctcagcaactcagggaccgggagatggaagggaggctgctggagtccctggggcagctttatcggaacctaaataccgccaggtccctcaggaggtcactcacatgcatcaaggagagcctgcgtatcttcattgacctgggggagacagacaaggctgctgaggcctggcttggggcggggcgactccactacctcatgcaggaagacgagctggtggagctgtgcctgcaggcagccatccagacagccctgaagtcagaggagcctttgctggctctcaaactttatgaagaagcaggtgatgtgttcttcaatgggacccgccacaggcatcatgcagtggagtactaccgagctggagctgttcctttagcaaggaggttgaaggcggtgagaactgagctccggattttcaataagctgacagagctgcagattagcctcgaaggctatgagaaggctttggaatttgccaccctggccgccaggctcagcacagtcacagaggcaagagctggtggcctttcaccgcctggctacagtgtactactccctgcacatgtatgagatggctgaggactgctacctgaagaccctgtccctctgtccaccatggctgcagagtcccaaggaggccctgtactatgccaaggtgtattatcgcctgggcagactcaccttctgccagctgaaggatgcccatgatgccactgagtacttccttctggccctggcagcagcggtcctgctgggtgatgaggagcttcaggacaccattaggagcaggctggacaacatctgccagagccccctgtggcacagcaggccctccgggtgctcctcagagagggcgcggtggctgagtggtggtggcctggccctctgaggaaagctgtcctgtctctggacatttggcatggccagactctgaccccactgccctaggctcttaaatactcattgggagggtccgagtccttacctggcctagccccctcatttcacaagaagaagaatgaagtccaggaggagaagggctcattgcaggccacagaaagatttgatggtgcagcgatgagaattcctggttccaggctttgcatctggagcctttaccggttgactgttgccttccacacaaacagcctctgaaaagcactttctccatacataattctggagaagatgagggatcttgccctccaggagccttccttcctcccccaatgaggaaatcagtcactgcactggtgcaaaggcaagcagattggaatttgtgctcttcaccgattttctcagggaaagaccccttccccttgccagcagaggaacctgtagttttttccatttctttcttcagaaccaaagtatgtatcactcctcatgctcacagggattgacaggagagaattcaccaggatcttagctcaaaagacacagcctcagaatggccagatggattgcacgaaacctgacttggattcaccatcttcctcctgccataaggctgtgctcccacataacctcccagaagctccagggaagctttccaagagcaaaggcttggaaattgaatgttaagaaaattatgacataaattacatgtaaatagtgtatatgattaaatattgtccagttacatttacacac

SEQ ID NO: 181050 - DNA, 4002 bp, Homo sapiens
  Payload ID: 15652
  Gene Symbol: SH3TC2
  Gene Name: SH3 domain and tetratricopeptide repeats 2
  Uniprot ID: Q8TF17
  ENST ID: ENST00000512049
  CDS Start-End: 68-3913
ctgtcccttgcagcactcttctggcctgtgttcccaagggcctcggccagggtaggatggtacacacatgggtggctgcttctgcatccccagggagcggagtctgacccggggcccaggtaaagaaactccttccaaggatccaactgtatcgagtgagtgtatagcctcatctgaatacaaggaaaaatgttttctgccacagaacattaatccagacctgacactctccttctgtgtaaagagccgctccaggaggtgtgtaaatggacccctacaggaagctgctcggaggcggctctgggcactggagaatgaggaccaggaggtgcgcatgctgtttaaggacctctcagcaaggttggtcagtatccagtctcagagggcccagtttctcatcaccttcaagaccatggaggaaatctggaagttctccacctaccttaatttagaacatctcctctttgaccacaagtactggctcaactgcatattggtggaggatacagagatccaagtgtctgtagatgataaacacctggaaacaatatacctgggactcctgatacaggaaggccacttcttctgcagagccctgtgctccgtgactccaccagccgagaaggaaggggaatgcttgacactttgcaagaatgagttaatctcagtgaagatggcagaagctggctccgagttggaaggcgtgtctttggtgacaggtcagcggggcctggtactggtgtcagccttggagcctctgcctctccctttccaccagtggttcctaaagaattatccaggaagctgtggcctttccaggaagagggattggacaggctcctatcagattggcagaggacgctgtaaggccttgacgggttatgagccaggagaaaaggatgaactgaatttctaccagggagaaagcattgagatcatcggctttgtcatacctgggcttcagtggttcattggaaagtcgacaagttcaggacaagtgggctttgtccccaccaggaacatagatcctgattcttattccccaatgagcaggaactctgcctttctcagtgatgaggagagatgctccctgttggccctgggaagtgataagcagactgagtgttccagcttcctccacactcttgctcgcactgacatcacatctgtctaccggctcagtgggtttgaatccatccagaatcctccaaatgatctgagtgcatcccagcctgaaggtttcaaggaggtcaggcctggcagagcctgggaggagcatcaggccgtggggtccagacagtccagcagctctgaggactccagcctggaggaggagctcctctcggccacctcagacagctatcgcctgccggagcctgatgaccttgatgacccggaactgctcatggacctaagcactggtcaggaggaggaggctgagaacttcgcccccatattggcttttctggatcatgagggttatgctgaccactttaagagtctctatgacttctccttctctttcctcacttcttccttttatagcttctctgaggaggatgagtttgtggcctacctggaggcatcaagaaagtgggccaagaagagccacatgacctgggcccatgcccgtctctgcttcctcctgggccggctgagcatcaggaaggtcaaactctctcaggccagggtgtacttcgaggaggccatccacattctcaatggagcatttgaggacctatccttggtggccactctgtacatcaatttggctgccatctacctgaaacagaggctgagacataaaggctccgccctgttggaaaaggcaggtgccctgctggcctgcctgcctgaccgtgagtctagtgccaagcatgaactcgacgtggtggcctacgtgctgcgccaggggattgtggtgggcagcagcccgctggaggccagggcctgctttctggccatccgcttgctcctgagcctaggccggcacgaggaggtcctgccctttgccgagcgcctgcagctcctctctggacaccctcctgcctctgaggctgtggccagtgttttgagttttctgtatgacaagaaatatcttccacaccttgcagtggcctctgtccagcaacatggtatccagagtgcccaagggatgtctcttcctatttggcaggtccaccttgtcctccagaacacaaccaagctccttggctttccttccccaggctggggtgaagtttctgccttggcctgcccaatgctcagacaggccctggctgcctgtgaggaactagcagaccggagcacccagagggccctgtgtctcatcctttccaaagtgtacctcgagcacaggtctcctgacggtgccatccactacctgagccaggccttggtgctagggcagctgctgggtgagcaggaatcctttgagtcttctctctgcctggcatgggcctatctcttagccagccaggccaagaaggctttggatgtgcttgagccactgctatgctccctgaaggagacagagagtctcactcaaaggggagtcatctataacctcctgggacttgcactccaaggtgaaggccgggtgaacagggcagccaagagctatcttcgggccttgaacagagcccaggaggtgggagatgtgcataaccaggcagtggctatggccaatcttggccacctgagccttaagtcctgggctcagcatccagccagaaactatctcctgcaggctgtacgactctattgtgaacttcaggccagtaaggagacagacatggaattagtacaggtgtttctctggttggcccaagttctggtgtctggacaccagctgacccatggccttctttgttatgaaatggcattgctgtttggcttaaggcatcgacatctaaagagtcagcttcaggccaccaaatccctctgccatttctacagctctgtgtccccaaaccctgaggcatgcatcacctaccatgagcactggctggccctggctcagcaactcagggaccgggagatggaagggaggctgctggagtccctggggcagctttatcggaacctaaataccgccaggtccctcaggaggtcactcacatgcatcaaggagagcctgcgtatcttcattgacctgggggagacagacaaggctgctgaggcctggcttggggcggggcgactccactacctcatgcaggaagacgagctggtggagctgtgcctgcaggcagccatccagacagccctgaagtcagaggagcctttgctggctctcaaactttatgaagaagcaggtgatgtgttcttcaatgggacccgccacaggcatcatgcagtggagtactaccgagctggagctgttcctttagcaaggaggttgaaggcggtgagaactgagctccggattttcaataagctgacagagctgcagattagcctcgaaggctatgagaaggctttggaatttgccaccctggccgccaggctcagcacagtcacaggagatcagaggcaagagctggtggcctttcaccgcctggctacagtgtactactccctgcacatgtatgagatggctgaggactgctacctgaagaccctgtccctctgtccaccatggctgcagagtcccaaggaggccctgtactatgccaaggtgtattatcgcctgggcagactcaccttctgccagctgaaggatgcccatgatgccactgagtacttccttctggccctggcagcagcggtcctgctgggtgatgaggagcttcaggacaccattaggagcaggctggacaacatctgccagagccccctgtggcacagcaggccctccgggtgctcctcagagagggcgcggtggctgagtggtggtggcctggccctctgaggaaagctgtcctgtctctggacatttggcatggccagactctgaccccactgccctaggctcttaaatactcattgggagggtccgag

SEQ ID NO: 181051 - DNA, 4051 bp, Homo sapiens
  Payload ID: 15652
  Gene Symbol: SH3TC2
  Gene Name: SH3 domain and tetratricopeptide repeats 2
  ENST ID: ENST00000513604
  CDS Start-End: 26-709
tcggccagggtaggatggtacacacatgggtggctgcttctgcatccccagggagcggagtctgacccggggcccaggtaaagaaactccttccaaggatccaactgtatcgagtgagtgtatagcctcatctgaatacaaggaaaaatgttttctgccacagaacattaatccagacctgacactctccttctgtgtaaagagccgctccaggaggtgtgtaaatggacccctacaggaagctgctcggaggcggctctgggcactggagaatgaggaccaggaggtgcgcatgctgtttaaggacctctcagcaaggttggtcagtatccagtctcagagggcccagtttctcatcaccttcaagaccatggaggaaatctggaagttctccacctaccttaatttaggctacgtatccatgtgtctagaacatctcctctttgaccacaagtactggctcaactgcatattggtggaggatacagagatccaagtgtctgtagatgataaacacctggaaacaatatacctgggactcctgatacaggaaggccacttcttctgcagagccctgtgctccgtgactccaccagccgagaaggaaggggaatgcttgacactttgcaagaatgagttaatctcagtgaagatggcagaagctggctccgagttggaaggcgtgtctttggtgacaggtggttcctaaagaattatccaggaagctgtggcctttccaggaagagggattggacaggctcctatcagattggcagaggacgctgtaaggccttgacgggttatgagccaggagaaaaggatgaactgaatttctaccagggagaaagcattgagatcatcggctttgtcatacctgggcttcagtggttcattggaaagtcgacaagttcaggacaagtgggctttgtccccaccaggaacatagatcctgattcttattccccaatgacttggtgtgtttcttcaatatgaagattcatgtctttcttcaattctggaaaattttcagtccttcttcctttgaatattgcctctctctcgttctttttagtctctcttctggaattcctattagaggagcaggaactctgcctttctcagtgatgaggagagatgctccctgttggccctgggaagtgataagcagactgagtgttccagcttcctccacactcttgctcgcactgacatcacatctgtctaccggctcagtgggtttgaatccatccagaatcctccaaatgatctgagtgcatcccagcctgaaggtttcaaggaggtcaggcctggcagagcctgggaggagcatcaggccgtggggtccagacagtccagcagctctgaggactccagcctggaggaggagctcctctcggccacctcagacagctatcgcctgccggagcctgatgaccttgatgacccggaactgctcatggacctaagcactggtcaggaggaggaggctgagaacttcgcccccatattggcttttctggatcatgagggttatgctgaccactttaagagtctctatgacttctccttctctttcctcacttcttccttttatagcttctctgaggaggatgagtttgtggcctacctggaggcatcaagaaagtgggccaagaagagccacatgacctgggcccatgcccgtctctgcttcctcctgggccggctgagcatcaggaaggtcaaactctctcaggccagggtgtacttcgaggaggccatccacattctcaatggagcatttgaggacctatccttggtggccactctgtacatcaatttggctgccatctacctgaaacagaggctgagacataaaggctccgccctgttggaaaaggcaggtgccctgctggcctgcctgcctgaccgtgagtctagtgccaagcatgaactcgacgtggtggcctacgtgctgcgccaggggattgtggtgggcagcagcccgctggaggccagggcctgctttctggccatccgcttgctcctgagcctaggccggcacgaggaggtcctgccctttgccgagcgcctgcagctcctctctggacaccctcctgcctctgaggctgtggccagtgttttgagttttctgtatgacaagaaatatcttccacaccttgcagtggcctctgtccagcaacatggtatccagagtgcccaagggatgtctcttcctatttggcaggtccaccttgtcctccagaacacaaccaagctccttggctttccttccccaggctggggtgaagtttctgccttggcctgcccaatgctcagacaggccctggctgcctgtgaggaactagcagaccggagcacccagagggccctgtgtctcatcctttccaaagtgtacctcgagcacaggtctcctgacggtgccatccactacctgagccaggccttggtgctagggcagctgctgggtgagcaggaatcctttgagtcttctctctgcctggcatgggcctatctcttagccagccaggccaagaaggctttggatgtgcttgagccactgctatgctccctgaaggagacagagagtctcactcaaaggggagtcatctataacctcctgggacttgcactccaaggtgaaggccgggtgaacagggcagccaagagctatcttcgggccttgaacagagcccaggaggtgggagatgtgcataaccaggcagtggctatggccaatcttggccacctgagccttaagtcctgggctcagcatccagccagaaactatctcctgcaggctgtacgactctattgtgaacttcaggccagtaaggagacagacatggaattagtacaggtgtttctctggttggcccaagttctggtgtctggacaccagctgacccatggccttctttgttatgaaatggcattgctgtttggcttaaggcatcgacatctaaagagtaagtatgtcccatgctgctgggaagctatagagaaaagtgttggatcaagttttatccatttcctatctcaagtcatctcattcatgtccctgctttgtgttcaggtcagcttcaggccaccaaatccctctgccatttctacagctctgtgtccccaaaccctgaggcatgcatcacctaccatgagcactggctggccctggctcagcaactcagggaccgggagatggaagggaggctgctggagtccctggggcagctttatcggaacctaaataccgccaggtgagtcagggtcaggaactgtcctagaagcagctttccttccttaaggagaaacagtgttctttcccacaggaagcaagtccaaatgtacatggtataggcggggctttgtgcaaaagagcaagggctctgcagccaccacaatgcatccatcacttattagtggtgtagccttgggcaagctatttaatttctccatgtctcagtttcctcatcagccaaaggaagataataatggcatctatcttatagtgttattgtgaaggataaatgagttaatgctcataaaacactcataactgtgcctgatacatagataggtctcagtaatgccactgttacttgtgtgtttctataaccacctgtcacaggatcatgactgaggctgcataattcagagaagtggcagttataccaaggacagaagaaccttcaggaggtcttcattgccaagggcaactggttttaaagaaaggtcacccccactgaaagcaggggtgtaaaatgtcatggtaaaaaaaagttttatcgggaacttacctttaaaatgaaattgtagattatgaaatgaagtgtgttttcaccttttagttaagaatatttagattacaatttcaactttgcattaagtcttagaataaacatggaataaaaggagtgttgactttttggcttaattgtgctgacaaaatgatgtaacagcacaatggagcattctttgttttgtgattgattttttaggactaccttaaaaatcctcatttttgtaaaaataaatcaaaacttaacagttt

SEQ ID NO: 181052 - DNA, 4059 bp, Homo sapiens
  Payload ID: 15652
  Gene Symbol: SH3TC2
  Gene Name: SH3 domain and tetratricopeptide repeats 2
  Uniprot ID: Q8TF17
  ENST ID: ENST00000515425
  CDS Start-End: 103-3969
agggaggaggcgggaggagggacaccgttgggaggctgtcccttgcagcactcttctggcctgtgttcccaagggcctcggccagggtaggatggtacacacatgggtggctgcttctgcatccccagggagcggagtctgacccggggcccaggtaaagaaactccttccaaggatccaactgtatcgagtgagtgtatagcctcatctgaatacaaggaaaaatgttttctgccacagaacattaatccagacctgacactctccttctgtgtaaagagccgctccaggaggtgtgtaaatggacccctacaggaagctgctcggaggcggctctgggcactggagaatgaggaccaggaggtgcgcatgctgtttaaggacctctcagcaaggttggtcagtatccagtctcagagggcccagtttctcatcaccttcaagaccatggaggaaatctggaagttctccacctaccttaatttaggctacgtatccatgtgtctagaacatctcctctttgaccacaagtactggctcaactgcatattggtggaggatacagagatccaagtgtctgtagatgataaacacctggaaacaatatacctgggactcctgatacaggaaggccacttcttctgcagagccctgtgctccgtgactccaccagccgagaaggaaggggaatgcttgacactttgcaagaatgagttaatctcagtgaagatggcagaagctggctccgagttggaaggcgtgtctttggtgacaggtcagcggggcctggtactggtgtcagccttggagcctctgcctctccctttccaccagtggttcctaaagaattatccaggaagctgtggcctttccaggaagagggattggacaggctcctatcagattggcagaggacgctgtaaggccttgacgggttatgagccaggagaaaaggatgaactgaatttctaccagggagaaagcattgagatcatcggctttgtcatacctgggcttcagtggttcattggaaagtcgacaagttcaggacaagtgggctttgtccccaccaggaacatagatcctgattcttattccccaatgagcaggaactctgcctttctcagtgatgaggagagatgctccctgttggccctgggaagtgataagcagactgagtgttccagcttcctccacactcttgctcgcactgacatcacatctgtctaccggctcagtgggtttgaatccatccagaatcctccaaatgatctgagtgcatcccagcctgaaggtttcaaggaggtcaggcctggcagagcctgggaggagcatcaggccgtggggtccagacagtccagcagctctgaggactccagcctggaggaggagctcctctcggccacctcagacagctatcgcctgccggagcctgatgaccttgatgacccggaactgctcatggacctaagcactggtcaggaggaggaggctgagaacttcgcccccatattggcttttctggatcatgagggttatgctgaccactttaagagtctctatgacttctccttctctttcctcacttcttccttttatagcttctctgaggaggatgagtttgtggcctacctggaggcatcaagaaagtgggccaagaagagccacatgacctgggcccatgcccgtctctgcttcctcctgggccggctgagcatcaggaaggtcaaactctctcaggccagggtgtacttcgaggaggccatccacattctcaatggagcatttgaggacctatccttggtggccactctgtacatcaatttggctgccatctacctgaaacagaggctgagacataaaggctccgccctgttggaaaaggcaggtgccctgctggcctgcctgcctgaccgtgagtctagtgccaagcatgaactcgacgtggtggcctacgtgctgcgccaggggattgtggtgggcagcagcccgctggaggccagggcctgctttctggccatccgcttgctcctgagcctaggccggcacgaggaggtcctgccctttgccgagcgcctgcagctcctctctggacaccctcctgcctctgaggctgtggccagtgttttgagttttctgtatgacaagaaatatcttccacaccttgcagtggcctctgtccagcaacatggtatccagagtgcccaagggatgtctcttcctatttggcaggtccaccttgtcctccagaacacaaccaagctccttggctttccttccccaggctggggtgaagtttctgccttggcctgcccaatgctcagacaggccctggctgcctgtgaggaactagcagaccggagcacccagagggccctgtgtctcatcctttccaaagtgtacctcgagcacaggtctcctgacggtgccatccactacctgagccaggccttggtgctagggcagctgctgggtgagcaggaatcctttgagtcttctctctgcctggcatgggcctatctcttagccagccaggccaagaaggctttggatgtgcttgagccactgctatgctccctgaaggagacagagagtctcactcaaaggggagtcatctataacctcctgggacttgcactccaaggtgaaggccgggtgaacagggcagccaagagctatcttcgggccttgaacagagcccaggaggtgggagatgtgcataaccaggcagtggctatggccaatcttggccacctgagccttaagtcctgggctcagcatccagccagaaactatctcctgcaggctgtacgactctattgtgaacttcaggccagtaaggagacagacatggaattagtacaggtgtttctctggttggcccaagttctggtgtctggacaccagctgacccatggccttctttgttatgaaatggcattgctgtttggcttaaggcatcgacatctaaagagtcagcttcaggccaccaaatccctctgccatttctacagctctgtgtccccaaaccctgaggcatgcatcacctaccatgagcactggctggccctggctcagcaactcagggaccgggagatggaagggaggctgctggagtccctggggcagctttatcggaacctaaataccgccaggtccctcaggaggtcactcacatgcatcaaggagagcctgcgtatcttcattgacctgggggagacagacaaggctgctgaggcctggcttggggcggggcgactccactacctcatgcaggaagacgagctggtggagctgtgcctgcaggcagccatccagacagccctgaagtcagaggagcctttgctggctctcaaactttatgaagaagcaggtgatgtgttcttcaatgggacccgccacaggcatcatgcagtggagtactaccgagctggagctgttcctttagcaaggaggttgaaggcggtgagaactgagctccggattttcaataagctgacagagctgcagattagcctcgaaggctatgagaaggctttggaatttgccaccctggccgccaggctcagcacagtcacaggagatcagaggcaagagctggtggcctttcaccgcctggctacagtgtactactccctgcacatgtatgagatggctgaggactgctacctgaagaccctgtccctctgtccaccatggctgcagagtcccaaggaggccctgtactatgccaaggtgtattatcgcctgggcagactcaccttctgccagctgaaggatgcccatgatgccactgagtacttccttctggccctggcagcagcggtcctgctgggtgatgaggagcttcaggacaccattaggagcaggctggacaacatctgccagagccccctgtggcacagcaggccctccgggtgctcctcagagagggcgcggtggctgagtggtggtggcctggccctctgaggaaagctgtcctgtctctggacatttggcatggccagactctgaccccactgccctaggctcttaaatactcattgggagggtccgagt

SEQ ID NO: 181053 - DNA, 3077 bp, Homo sapiens
  Payload ID: 15652
  Gene Symbol: SH3TC2
  Gene Name: SH3 domain and tetratricopeptide repeats 2
  ENST ID: ENST00000510779
  CDS Start-End: 1-113
ctgagtgttccagcttcctccacactcttgctcgcactgacatcacatctgtctaccggctcagtgggtttgaatccatccagaatcctccaaatgatctgagtggtgagtagcgatcatgctgaacctgacattcatccttgaggacagcacttctgtcctcttgccaagagcggccaccttaggtgcaggtgcccaaggttgctcaactttgcctgtccttacagcatcccagcctgaaggtttcaaggaggtcaggcctggcagagcctgggaggagcatcaggccgtggggtccagacagtccagcagctctgaggactccagcctggaggaggagctcctctcggccacctcagacagctatcgcctgccggagcctgatgaccttgatgacccggaactgctcatggacctaagcactggtcaggaggaggaggctgagaacttcgcccccatattggcttttctggatcatgagggttatgctgaccactttaagagtctctatgacttctccttctctttcctcacttcttccttttatagcttctctgaggaggatgagtttgtggcctacctggaggcatcaagaaagtgggccaagaagagccacatgacctgggcccatgcccgtctctgcttcctcctgggccggctgagcatcaggaaggtcaaactctctcaggccagggtgtacttcgaggaggccatccacattctcaatggagcatttgaggacctatccttggtggccactctgtacatcaatttggctgccatctacctgaaacagaggctgagacataaaggctccgccctgttggaaaaggcaggtgccctgctggcctgcctgcctgaccgtgagtctagtgccaagcatgaactcgacgtggtggcctacgtgctgcgccaggggattgtggtgggcagcagcccgctggaggccagggcctgctttctggccatccgcttgctcctgagcctaggccggcacgaggaggtcctgccctttgccgagcgcctgcagctcctctctggacaccctcctgcctctgaggctgtggccagtgttttgagttttctgtatgacaagaaatatcttccacaccttgcagtggcctctgtccagcaacatggtatccagagtgcccaagggatgtctcttcctatttggcaggtccaccttgtcctccagaacacaaccaagctccttggctttccttccccaggctggggtgaagtttctgccttggcctgcccaatgctcagacaggccctggctgcctgtgaggaactagcagaccggagcacccagagggccctgtgtctcatcctttccaaagtgtacctcgagcacaggtctcctgacggtgccatccactacctgagccaggccttggtgctagggcagctgctgggtgagcaggaatcctttgagtcttctctctgcctggcatgggcctatctcttagccagccaggccaagaaggctttggatgtgcttgagccactgctatgctccctgaaggagacagagagtctcactcaaaggggagtcatctataacctcctgggacttgcactccaaggtgaaggccgggtgaacagggcagccaagagctatcttcgggccttgaacagagcccaggaggtgggagatgtgcataaccaggcagtggctatggccaatcttggccacctgagccttaagtcctgggctcagcatccagccagaaactatctcctgcaggctgtacgactctattgtgaacttcaggccagtaaggagacagacatggaattagtacaggtgtttctctggttggcccaagttctggtgtctggacaccagctgacccatggccttctttgttatgaaatggcattgctgtttggcttaaggcatcgacatctaaagagtcagcttcaggccaccaaatccctctgccatttctacagctctgtgtccccaaaccctgaggcatgcatcacctaccatgagcactggctggccctggctcagcaactcagggaccgggagatggaagggaggctgctggagtccctggggcagctttatcggaacctaaataccgccaggtccctcaggaggtcactcacatgcatcaaggagagcctgcgtatcttcattgacctgggggagacagacaaggctgctgaggcctggcttggggcggggcgactccactacctcatgcaggaagacgagctggtggagctgtgcctgcaggcagccatccagacagccctgaagtcagaggagcctttgctggctctcaaactttatgaagaagcaggtgatgtgttcttcaatgggacccgccacaggcatcatgcagtggagtactaccgagctggagctgttcctttagcaaggaggttgaaggcggtgagaactgagctccggattttcaataagctgacagagctgcagattagcctcgaaggctatgagaaggctttggaatttgccaccctggccgccaggctcagcacagtcacaggagatcagaggcaagagctggtggcctttcaccgcctggctacagtgtactactccctgcacatgtatgagatggctgaggactgctacctgaagaccctgtccctctgtccaccatggctgcagagtcccaaggaggccctgtactatgccaaggtgtattatcgcctgggcagactcaccttctgccagctgaaggatgcccatgatgccactgagtacttccttctggccctggcagcagcggtcctgctgggtgatgaggagcttcaggacaccattaggagcaggctggacaacatctgccagagccccctgtggcacagcaggccctccgggtgctcctcagagagggcgcggtggctgagtggtggtggcctggccctctgaggaaagctgtcctgtctctggacatttggcatggccagactctgaccccactgccctaggctcttaaatactcattgggagggtccgagtccttacctggcctagccccctcatttcacaagaagaagaatgaagtccaggaggagaagggctcattgca

SEQ ID NO: 181054 - DNA, 4416 bp, Homo sapiens
  Payload ID: 15652
  Gene Symbol: SH3TC2
  Gene Name: SH3 domain and tetratricopeptide repeats 2
  ENST ID: ENST00000504690
  CDS Start-End: 142-3921
tgcattgtgcattgagcaggcctcggtccctcgtgtgccagggaggaggcgggaggagggacaccgttgggaggctgtcccttgcagcactcttctggcctgtgttcccaagggcctcggccagggtaggatggtacacacatgggtggctgcttctgcatccccagggagcggagtctgacccggggcccaggtaaagaaactccttccaaggatccaactgtatcgagtgagtgtatagcctcatctgaatacaaggaaaaatgttttctgccacagaacattaatccagacctgacactctccttctgtgtaaagagccgctccaggaggtgtgtaaatggacccctacaggaagctgctcggaggcggctctgggcactggagaatgaggaccaggaggtgcgcatgctgtttaaggacctctcagcaaggttggtcagtatccagtctcagagggcccagtttctcatcaccttcaagaccatggaggaaatctggaagttctccacctaccttaatttaggctacgtatccatgtgtctagaacatctcctctttgaccacaagtactggctcaactgcatattggtggaggatacagagatccaagtgtctgtagatgataaacacctggaaacaatatacctgggactcctgatacaggaaggccacttcttctgcagagccctgtgctccgtgactccaccagccgagaaggaaggggaatgcttgacactttgcaagaatgagttaatctcagtgaagatggcagaagctggctccgagttggaaggcgtgtctttggtgacaggtcagcggggcctggtactggtgtcagccttggagcctctgcctctccctttccaccagtggttcctaaagaattatccaggaagctgtggcctttccaggaagagggattggacaggctcctatcagattggcagaggacgctgtaaggccttgacgggttatgagccaggagaaaaggatgaactgaatttctaccagggagaaagcattgagatcatcggctttgtcatacctgggcttcagtggttcattggaaagtcgacaagttcaggacaagtgggctttgtccccaccaggaacatagatcctgattcttattccccaatgagcaggaactctgcctttctcagtgatgaggagagatgctccctgttggccctgggaagtgataagcagactgagtgttccagcttcctccacactcttgctcgcactgacatcacatctgtctaccggctcagtgggtttgaatccatccagaatcctccaaatgatctgagtgcatcccagcctgaaggtttcaaggaggtcaggcctggcagagcctgggaggagcatcaggccgtggggtccagacagtccagcagctctgaggactccagcctggaggaggagctcctctcggccacctcagacagctatcgcctgccggagcctgatgaccttgatgacccggaactgctcatggacctaagcactggtcaggaggaggaggctgagaacttcgcccccatattggcttttctggatcatgagggttatgctgaccactttaagagtctctatgacttctccttctctttcctcacttcttccttttatagcttctctgaggaggatgagtttgtggcctacctggaggcatcaagaaagtgggccaagaagagccacatgacctgggcccatgcccgtctctgcttcctcctgggccggctgagcatcaggaaggtcaaactctctcaggccagggtgtacttcgaggaggccatccacattctcaatggagcatttgaggacctatccttggtggccactctgtacatcaatttggctgccatctacctgaaacagaggctgagacataaaggctccgccctgttggaaaaggcaggtgccctgctggcctgcctgcctgaccgtgagtctagtgccaagcatgaactcgacgtggtggcctacgtgctgcgccaggggattgtggtgggcagcagcccgctggaggccagggcctgctttctggccatccgcttgctcctgagcctaggccggcacgaggaggtcctgccctttgccgagcgcctgcagctcctctctggacaccctcctgcctctgaggctgtggccagtgttttgagttttctgtatgacaagaaatatcttccacaccttgcagtggcctctgtccagcaacatggtatccagagtgcccaagggatgtctcttcctatttggcaggtccaccttgtcctccagaacacaaccaagctccttggctttccttccccaggctggggtgaagtttctgccttggcctgcccaatgctcagacaggccctggctgcctgtgaggaactagcagaccggagcacccagagggccctgtgtctcatcctttccaaagtgtacctcgagcacaggtctcctgacggtgccatccactacctgagccaggccttggtgctagggcagctgctgggtgagcaggaatcctttgagtcttctctctgcctggcatgggcctatctcttagccagccaggccaagaaggctttggatgtgcttgagccactgctatgctccctgaaggagacagagagtctcactcaaaggggagtcatctataacctcctgggacttgcactccaaggtgaaggccgggtgaacagggcagccaagagctatcttcgggccttgaacagagcccaggaggtgggagatgtgcataaccaggcagtggctatggccaatcttggccacctgagccttaagtcctgggctcagcatccagccagaaactatctcctgcaggctgtacgactctattgtgaacttcaggccagtaaggagacagacatggaattagtacaggtgtttctctggttggcccaagttctggtgtctggacaccagctgacccatggccttctttgttatgaaatggcattgctgtttggcttaaggcatcgacatctaaagagtcagcttcaggccaccaaatccctctgccatttctacagctctgtgtccccaaaccctgaggcatgcatcacctaccatgagcactggctggccctggctcagcaactcagggaccgggagatggaagggaggctgctggagtccctggggcagctttatcggaacctaaataccgccaggtccctcaggaggtcactcacatgcatcaaggagagcctgcgtatcttcattgacctgggggagacagacaaggctgctgaggcctggcttggggcggggcgactccactacctcatgcaggaagacgagctggtggagctgtgcctgcaggcagccatccagacagccctgaagtcagaggagcctttgctggctctcaaactttatgaagaagcaggtgatgtgttcttcaatgggacccgccacaggcatcatgcagtggagtactaccgagctggagctgttcctttagcaaggaggttgaaggcggtgagaactgagctccggattttcaataagctgacagagctgcagattagcctcgaaggctatgagaaggctttggaatttgccaccctggccgccaggctcagcacagtcacaggagatcagaggcaagagctggtggcctttcaccgcctggctacagtgtactactccctgcacatgtatgagatggctgaggactgctacctgaagaccctgtccctctgtccaccatggctgcagagtcccaaggaggccctgtactatgccaaggtgtattatcgcctgggcagactcaccttctgccagctgaagtttctcctctgttgcccaggctggagttcagtggtacagtcagggcttcctgcgacctcagactccggggctcaagtgatcctccagtgtcaacctcctgagtagctggaactacagggcagttgcaggctggcccagggcagacccaactgagggcaatggtccttagagctatggccaccctgacgtggatgcctggtgagaggcttgtgaacagagaagactaactgtggagatgctgacccatttagcttttacctgtcccaggatggttggagatctctgggagagagagagaggtaatgaggactcagttttgaccaaggcaagatggcttcaaaaaaataacaaatgccttggcaatgatttcttggacatgataccagaagcacaggcaacaaaagcaaaaacagatgagtaacactacatcaaactaaaaacttctgcacagcaaaggaaacaaccaacaaaatgagaaggcaacttacagaatggaagaaaatatttgagaaccatatatctggtaaaggcaaaagactcccaccggaagccaaccagatgtggctgcctaatcttggacttcccagtctccagaactgt

SEQ ID NO: 181055 - DNA, 1251 bp, Homo sapiens
  Payload ID: 15653
  Gene Symbol: SH3BGR
  Gene Name: SH3 domain binding glutamate-rich protein
  Uniprot ID: P55822
  ENST ID: ENST00000333634
  CDS Start-End: 79-798
gctgcttttatcgaccaatcaaatattttcctgacagatcccaaaatattcctgggccaatggagggaggagcccaagatgcctctgctgctccttggagagacagagcctcttaagttggagcgggactgccggagcccagtggacccctgggctgctgccagccccgacctggcacttgcttgcctgtgtcactgtcaggatttgtctagcggcgcattccctgacaggggtgtgttggggggagtcctctttccaactgtcgaaatggttatcaaagtgtttgttgctacatcttctgggtccatagcgattaggaagaaacagcaagaagtagtgggttttttggaagcgaataaaatcgactttaaggaattagatattgctggagatgaagacaacaggaggtggatgagagagaatgttcctggagagaaaaaacctcaaaatgggattcctttgcctccccagatcttcaatgaggagcagtactgtggggattttgactctttcttctctgcaaaagaagagaatattatttattccttccttggtttggctcctcctccagactcaaagggatcagagaaggctgaagaaggtggagaaactgaggcacaaaaagagggcagtgaagatgtgggcaacctccctgaagcccaggagaagaatgaagaagaaggagagacagccacagaagagacggaagaaatagccatggagggtgcggaaggggaagccgaggaggaggaagaaactgcagaaggagaagagcctggagaagacgaagattcctaggccttttcatgcttcatttcttccacttctccagaaaatggaagctatgaagcaacatttcaaatgtctctccacaaaccaaactcaacagaatactttggcttgaagccggcacacccagggttactgaggacttatgctgcctgacctggttagatgtacatggaggtatctcccgaatcatacaaaattaaatgtgaagaccgtttatgcataccttcatgtgcctgacagtcttggcttttgaagatttttttttcttttttgctctgcatagctagaccatcttattaataatactctgaaaaaaatgatttcaaggcatggaagttctctgtgatacaacaatagtatttcttcaaatgcgccttatgctacttatctcagaaacaggttttaaaatgaagtgctttccagagaaccatcatataaataaagattaatagaaaaata

SEQ ID NO: 181056 - DNA, 780 bp, Homo sapiens
  Payload ID: 15653
  Gene Symbol: SH3BGR
  Gene Name: SH3 domain binding glutamate-rich protein
  Uniprot ID: P55822
  ENST ID: ENST00000380631
  CDS Start-End: 240-626
tgtagacgtctgtaaacgatcctcctgccgtccctgttcggcgcccgggaccctgccttcccgcgtggccgcaccgagacgagggagcctgtcacgcgctctggcgctctcctgacctcttaaggctctgtcagtcttagattaggaagaaacagcaagaagtagtgggttttttggaagcgaataaaatcgactttaaggaattagatattgctggagatgaagacaacaggaggtggatgagagagaatgttcctggagagaaaaaacctcaaaatgggattcctttgcctccccagatcttcaatgaggagcagtactgtggggattttgactctttcttctctgcaaaagaagagaatattatttattccttccttggtttggctcctcctccagactcaaagggatcagagaaggctgaagaaggtggagaaactgaggcacaaaaagagggcagtgaagatgtgggcaacctccctgaagcccaggagaagaatgaagaagaaggagagacagccacagaagagacggaagaaatagccatggagggtgcggaaggggaagccgaggaggaggaagaaactgcagaaggagaagagcctggagaagacgaagattcctaggccttttcatgcttcatttcttccacttctccagaaaatggaagctatgaagcaacatttcaaatgtctctccacaaaccaaactcaacagaatactttggcttgaagccggcacacccagggttactgaggacttatgctgcctgacctggtt

SEQ ID NO: 181057 - DNA, 816 bp, Homo sapiens
  Payload ID: 15653
  Gene Symbol: SH3BGR
  Gene Name: SH3 domain binding glutamate-rich protein
  Uniprot ID: P55822
  ENST ID: ENST00000380634
  CDS Start-End: 128-514
ggcggggaggggcgtcttgggcctggagattaggaagaaacagcaagaagtagtgggttttttggaagcgaataaaatcgactttaaggaattagatattgctggagatgaagacaacaggaggtggatgagagagaatgttcctggagagaaaaaacctcaaaatgggattcctttgcctccccagatcttcaatgaggagcagtactgtggggattttgactctttcttctctgcaaaagaagagaatattatttattccttccttggtttggctcctcctccagactcaaagggatcagagaaggctgaagaaggtggagaaactgaggcacaaaaagagggcagtgaagatgtgggcaacctccctgaagcccaggagaagaatgaagaagaaggagagacagccacagaagagacggaagaaatagccatggagggtgcggaaggggaagccgaggaggaggaagaaactgcagaaggagaagagcctggagaagacgaagattcctaggccttttcatgcttcatttcttccacttctccagaaaatggaagctatgaagcaacatttcaaatgtctctccacaaaccaaactcaacagaatactttggcttgaagccggcacacccagggttactgaggacttatgctgcctgacctggttagatgtacatggaggtatctcccgaatcatacaaaattaaatgtgaagaccgtttatgcataccttcatgtgcctgacagtcttggcttttgaagatttttttttcttttttgctctgcatagctagaccatcttattaataatactc

SEQ ID NO: 181058 - DNA, 1014 bp, Homo sapiens
  Payload ID: 15653
  Gene Symbol: SH3BGR
  Gene Name: SH3 domain binding glutamate-rich protein
  Uniprot ID: P55822
  ENST ID: ENST00000380637
  CDS Start-End: 175-561
caggagccgcggcggggaggggcgtcttgggcctggaggtcagtgtggcctcgcgtttgtcttcggtgacgggaaattaggaagaaacagcaagaagtagtgggttttttggaagcgaataaaatcgactttaaggaattagatattgctggagatgaagacaacaggaggtggatgagagagaatgttcctggagagaaaaaacctcaaaatgggattcctttgcctccccagatcttcaatgaggagcagtactgtggggattttgactctttcttctctgcaaaagaagagaatattatttattccttccttggtttggctcctcctccagactcaaagggatcagagaaggctgaagaaggtggagaaactgaggcacaaaaagagggcagtgaagatgtgggcaacctccctgaagcccaggagaagaatgaagaagaaggagagacagccacagaagagacggaagaaatagccatggagggtgcggaaggggaagccgaggaggaggaagaaactgcagaaggagaagagcctggagaagacgaagattcctaggccttttcatgcttcatttcttccacttctccagaaaatggaagctatgaagcaacatttcaaatgtctctccacaaaccaaactcaacagaatactttggcttgaagccggcacacccagggttactgaggacttatgctgcctgacctggttagatgtacatggaggtatctcccgaatcatacaaaattaaatgtgaagaccgtttatgcataccttcatgtgcctgacagtcttggcttttgaagatttttttttcttttttgctctgcatagctagaccatcttattaataatactctgaaaaaaatgatttcaaggcatggaagttctctgtgatacaacaatagtatttcttcaaatgcgccttatgctacttatctcagaaacaggttttaaaatgaagtgctttccagagaaccatcatataaataaagattaatagaaaaata

SEQ ID NO: 181059 - DNA, 585 bp, Homo sapiens
  Payload ID: 15653
  Gene Symbol: SH3BGR
  Gene Name: SH3 domain binding glutamate-rich protein
  ENST ID: ENST00000440288
  CDS Start-End: 268-585
tgagtttcttgtgtagacgtctgtaaacgatcctcctgccgtccctgttcggcgcccgggaccctgccttcccgcgtggccgcaccgagacgagggagcctgtcacgcgctctggcgctctcctgacctcttaaggctctgtcagtcttaggtaacttgagtcagtagattaggaagaaacagcaagaagtagtgggttttttggaagcgaataaaatcgactttaaggaattagatattgctggagatgaagacaacaggaggtggatgagagagaatgttcctggagagaaaaaacctcaaaatgggattcctttgcctccccagatcttcaatgaggagcagtactgtggggattttgactctttcttctctgcaaaagaagagaatattatttattccttccttggtttggctcctcctccagactcaaagggatcagagaaggctgaagaaggtggagaaactgaggcacaaaaagagggcagtgaagatgtgggcaacctccctgaagcccaggagaagaatgaagaagaaggagagacagccacagaagagacggaagaaatagccatggagggtgcg

SEQ ID NO: 181060 - DNA, 512 bp, Homo sapiens
  Payload ID: 15653
  Gene Symbol: SH3BGR
  Gene Name: SH3 domain binding glutamate-rich protein
  ENST ID: ENST00000447939
  CDS Start-End: 1-165
ggatcagagaaggctgaagaaggtggagaaactgaggcacaaaaagagggcagtgaagatgtgggcaacctccctgaagcccaggagaagaataaaatggaagctatgaagcaacatttcaaatgtctctccacaaaccaaactcaacagaatactttggcttgaagccggcacacccagggttactgaggacttatgctgcctgacctggttagatgtacatggaggtatctcccgaatcatacaaaattaaatgtgaagaccgtttatgcataccttcatgtgcctgacagtcttggcttttgaagatttttttttcttttttgctctgcatagctagaccatcttattaataatactctgaaaaaaatgatttcaaggcatggaagttctctgtgatacaacaatagtatttcttcaaatgcgccttatgctacttatctcagaaacaggttttaaaatgaagtgctttccagagaaccatcatataaataaagattaatagaaaaata

SEQ ID NO: 181061 - DNA, 812 bp, Homo sapiens
  Payload ID: 15653
  Gene Symbol: SH3BGR
  Gene Name: SH3 domain binding glutamate-rich protein
  ENST ID: ENST00000458295
  CDS Start-End: 302-595
ggcgtcttgggcctggaggtcagtgtggcctcgcgtttgtcttcggtgacgggaagtgagtttcttgtgtagacgtctgtaaacgatcctcctgccgtccctgttcggcgcccgggaccctgccttcccgcgtggccgcaccgagacgagggagcctgtcacgcgctctggcgctctcctgacctcttaaggctctgtcagtcttaggaagaaacagcaagaagtagtgggttttttggaagcgaataaaatcgactttaaggaattagatattgctggagatgaagacaacaggaggtggatgagagagaatgttcctggagagaaaaaacctcaaaatgggattcctttgcctccccagatcttcaatgaggagcagtactgtggggattttgactctttcttctctgcaaaagaagagaatattatttattccttccttggtttggctcctcctccagactcaaaggaagaagaaggagagacagccacagaagagacggaagaaatagccatggagggtgcggaaggggaagccgaggaggaggaagaaactgcagaaggagaagagcctggagaagacgaagattcctaggccttttcatgcttcatttcttccacttctccagaaaatggaagctatgaagcaacatttcaaatgtctctccacaaaccaaactcaacagaatactttggcttgaagccggcacacccagggttactgaggacttatgctgcctgacctggttagatgtacatggaggtatctcccgaatcatacaaaattaaatgtgaagaccgtttatgcatac

SEQ ID NO: 181062 - DNA, 865 bp, Homo sapiens
  Payload ID: 15653
  Gene Symbol: SH3BGR
  Gene Name: SH3 domain binding glutamate-rich protein
  ENST ID: ENST00000452550
  CDS Start-End: 1-412
atcttctgggtccatagcgattaggaagaaacagcaagaagtagtgggttttttggaagcgaataaaatcgactttaaggaattagatattgctggagatgaagacaacaggaggtggatgagagagaatgttcctggagagaaaaaacctcaaaatgggattcctttgcctccccagatcttcaatgaggagcagtactgtggggattttgactctttcttctctgcaaaagaagagaatattatttattccttccttggtttggctcctcctccagactcaaaggaagaagaaggagagacagccacagaagagacggaagaaatagccatggagggtgcggaaggggaagccgaggaggaggaagaaactgcagaaggagaagagcctggagaagacgaagattcctaggccttttcatgcttcatttcttccacttctccagaaaatggaagctatgaagcaacatttcaaatgtctctccacaaaccaaactcaacagaatactttggcttgaagccggcacacccagggttactgaggacttatgctgcctgacctggttagatgtacatggaggtatctcccgaatcatacaaaattaaatgtgaagaccgtttatgcataccttcatgtgcctgacagtcttggcttttgaagatttttttttcttttttgctctgcatagctagaccatcttattaataatactctgaaaaaaatgatttcaaggcatggaagttctctgtgatacaacaatagtatttcttcaaatgcgccttatgctacttatctcagaaacaggttttaaaatgaagtgctttccagagaaccatcatataaataaagattaatagaaaaata

SEQ ID NO: 181063 - DNA, 246 bp, Homo sapiens
  Payload ID: 15653
  Gene Symbol: SH3BGR
  Gene Name: SH3 domain binding glutamate-rich protein
  ENST ID: ENST00000423596
  CDS Start-End: 1-246
atcttcaatgaggagcagtactgtgggggatcagagaaggctgaagaaggtggagaaactgaggcacaaaaagagggcagtgaagatgtgggcaacctccctgaagcccaggagaagaatgaagaagaaggagagacagccacagaagagacggaagaaatagccatggagggtgcggaaggggaagccgaggaggaggaagaaactgcagaaggagaagagcctggagaagacgaagattcctag

SEQ ID NO: 181064 - DNA, 1923 bp, Homo sapiens
  Payload ID: 15654
  Gene Symbol: SH3BGRL
  Gene Name: SH3 domain binding glutamate-rich protein like
  Uniprot ID: O75368
  ENST ID: ENST00000373212
  CDS Start-End: 259-603
cgagattccctattaaaaaaaaatagaattgatgcaaacagcctgttccttccggggttttgggctggaactgcagcgcttagagagctcggtggaagctgctaaaggcggaggcggggctctggcgagttctccttccaccttcccccacccttctctgccaaccgctgtttcagcccctagctggattccagccattgctgcagctgctccacagcccttttcaggacccaaacaaccgcagccgctgttcccaggatggtgatccgtgtatatattgcatcttcctctggctctacagcgattaagaagaaacaacaagatgtgcttggtttcctagaagccaacaaaataggatttgaagaaaaagatattgcagccaatgaagagaatcggaagtggatgagagaaaatgtacctgaaaatagtcgaccagccacaggttaccccctgccacctcagattttcaatgaaagccagtatcgcggggactatgatgccttctttgaagccagagaaaataatgcagtgtatgccttcttaggcttgacagccccacctggttcaaaggaagcagaagtgcaagcaaagcagcaagcatgaaccttaagcactgtgctttaagcatcctgaaaaatgagtctccattgcttttataaaatagcagaattagctttgcttcaaaagaaataggcttaatgttgaaataatagattagttgggttttcacatgcaaacattcaaaatgaatacaaaattaaaatttgaacattatggtgattatggtgaggagaatgggatattaacataaaattatattaataagtagatatcgtagaaatagtgttgttacctgccaagccatcctgtatacaccaatgattttacaaagaaaacacccttccctccttctgccattactatggcaacttaagtgtatctgcagctctacattaaaaaggagaaagagaaataacctgtctctcattcctaagttgcctcattaattttcatgaacaagaatatgtacctttttgatgctatattactgcgattaaaaagttcttgcaggtaatgtttatgatatgttaaacgttgtaatttcctatcgtaattataacattcccattcttttgtagatgaaacttctacatattgaaccacagattttctgagcttctaaatgtagcctttcattgcacatttcagtgatcagaatagatatccttttacacgcacaaaagcaatagattcattcagtggacaagttccttgtttaactacacagctatgatggaatgatatatccaagttccttgcctcagtgaaatatgcatatgtatatcatgaaagtgggatgccaagtaagcttaaaatggcattctctagcaaagagattagacttttaaataactcttataaaacaggttggcgatcatttcccaagattggtttcccttgagtttttgctaaaacaaatcttagtagttttgcccgtttaaaacaactcacaatcgtaaatgctactattcctaagatatcttacctttttatttcagtttagccatgtattgtatgagtgtattagtctaagcagtgagaatcttttctatgcctctattccagcaaaaagtagaagtatcaaataaaaagggcaacttttaaaatattaagcctgaagacttctaaaaagacaagaaacatggcctaaataaccaacatagatttacatagtaagtttcacactaccttattaccaaaagcaaacacctcttactttaaactacattatcatgtatatctattgtatgctggtctttactttttgccaaaatcaacatataatgaagagatgcctttgtttcatgagattcaaacttgatgctatgctttaaaataaactcagtacttttagaaacataa

SEQ ID NO: 181065 - DNA, 4653 bp, Homo sapiens
  Payload ID: 15655
  Gene Symbol: SH3BGRL2
  Gene Name: SH3 domain binding glutamate-rich protein like 2
  Uniprot ID: Q9UJC5
  ENST ID: ENST00000369838
  CDS Start-End: 180-503
ccgggcggcgctgggcttttatctgcggacccgccgggagggagccagatcccagcgatcttccccgacggcagcgctttacccagaggctgccggcggctcgtagctgggttcagctctgcgtccacgccagcccggagcccggggggcaaggggtctgtcccgggcgcagcgagaggatggtcatccgcgtgttcatcgcctcttcctcgggcttcgtggcgataaagaagaagcagcaagatgtggttagatttctggaagccaacaagatagagtttgaggaggtggatatcacaatgtcagaagaacagaggcaatggatgtacaaaaacgtccccccggaaaagaaacccactcagggcaaccccctgccacctcagatatttaatggcgaccgatactgtggagattatgacagtttttttgaatccaaggaaagcaacacagtcttttcatttttaggcctgaaaccacggttggcatcaaaggcagaaccttagagaagaagagtggaagatgacggagatgcattttgaagcacccctggtactcagcacacacatgcttacctaatgcatcactgtgacaaaagccacacgcattatcagtaactttgcttgccacggaaaaggtgtttttgaaagatgtggctataatgagaattgcatgattgctttaaaccaaatcaggtggtggattttttttttcttattctatttgcctgcagttgcctcactcacctggaaataccgtcacctgttacaggtgtactttcttaatgactgaaagataagtgggtagcaccgtcagagagaaaatgttggatctgccctaggttatagtagatgccggaattgcgtaaacccacttctctttaagctgcctggattgcacctttgaaatatgtctgccaagttgttagaatctttgaatcagaaggaaaaaaagcagcgctggttgacaaagggtgttgaagatttttgctgcagaatcagttacaaacatcacagttcccatgctttgtaataacacctggtgaaaaagttagatattctagacttgttttagtaatggaaactcttacctccacatattatcctacagatgtttccagaaatccctgttgtaacatcaagtgatcagaactaagttactgggatgacaataattgctatttgaaatatatgcttctttatttcttgcaaggggcaagtttcacccaaatgcctgagactgcttgaaagatatattttaagtggtgcactaattagtgaatatataggaaaattatctgacgagtatctgaaggcattttcagctctagcaatttatttataatatataagttcatatattttttaatccagctcccctaacagacagctgctgcttctattttgtgaagggactatattttttgagaaaggaaaatctcagttagatatattttgtgaacccttgattagacatattaaaatataccaatgttgtagtaaaatttaatttttccttttgttacttttcatttgcctctaattttgcttgctcatatttctggccaatgtacagcctcatatttttcagagtaatacagatacttgttctcattccgtatatgagcacaagtaaggtttcagagcaacacacatgagaaagagagtaacccggaattgtacttgtcaagcaaaatctatactcctattggagtggatgctgatgaacatcgaacatatctacttcattagagcagaggctatttttctgcattcttgtccctataacagggatgcttaattttttttttaacttagagttttaaattgccaaacatgggaacagccttgaataggataaattttcagagggctgcctaaaatattttatttctagcatcctgattctggacttttcattataattctgagcaggaaatttataagaaattgaaagagcagaagaattacagccctgtcacatgtgcccagcactccgccccatgccttgctaaatgtagactaaagaacttgttgaatgctaaggctgaaatcccaacctgagatttgtagtccaggattacaaccagaaggaaagtatgacagatttctacttaactagaatggacacatgatccacaattttctcttcaagggaagctgttgtcaaattatggatattactggttagttgtcattaagtaagatccaggtcaaattccatttgacaaatcccagggactatccaggaatttttttttaactggatattgtgtttgagtatgtgagtcttctgataaaactcagaatttctttttaagcagttgtaaaaattgtcatgttgtaattcattactcagctaacatttagtctactcttgctagtgagtgccaagaaccaacttggtaaggttgaggctttgcaagttaactgctggggttataggatcaataccatacttgctagacaaagctacccagatttgtcttatattataatttttgagttaaccgtagtatacctattatgattatagtaaacagactagtgggtagtaatgctaaattaccatcacagttatgtgccatctccccaccccatttttttttttttttttttgatcagcaaagaaatacaggagaccagtctcgagtggtgctgtacttgttatgagtgaggcagcagcacagtgtgtggcatttacatggtacccaggctccacagagtaccaagatgttgccctctgggaccacacttagctcagagaatatggggtccttacttgtattcttttatcagctgattttgaaacatataataatgattttcttgttcccttctttaactagctgcctttagattttgataatcacagtcttaaaatactaggaaagaagtggatgggaattgtaggcatagatttcatatcaagggcatttcaagacagaatttttatttcctgtagtaggcttgctggagcaaaggaaatgtgctgctaaaaatcaacttatgccattttaaaattagataaaatatggagtgccatcctgctaggtgagtacagaccagaagaaaatttagttgggaaaatacttgtttttccaaattccggtgttttattacaatcaaagaagaggaaagcaaggtattttttcacctcagattctaatatattctagatttgtttctgttttatagatttaattcaatacctccacatagatgtttttatattacatgaatttaataataaactaaacttttttttgtctcccgttattgaaaagtaccaaagcttctttctgttgtgtttgattttactataggggttttgctttttctagagatacttttcatttaacagcttttgttaagtgtcaggctgcactttgctccatataattattgttttcagatttcaacttgtatgtgtttgtctcttaaagcattggtgaaatcacatattttatattcagcataaaggagaataaattccagaaaacacatattctgaaaatggagtgtttgttccctgccatttttcacacctctcttaattttagttctgtttagttgagaggctgtgattttactcttgcctgtgaacctcatgcatgaaagcagcacattaaattgtaaaaatacaaacagatcgtgtgatcattcaaggagccagacatgaggtcctgcacgagggtgttgggaggacaccacagattcatctcagacagtgatcaggactgaggatggagttaaatcactcagcccctgggtggggtggggtggttcaaatggatgactgatctcctgagtacactgaagccacaggctggtggccatgttctctgaattgggtgcagaagacaagggcagagtggctgcggcccctattacctttgtagcagccacatcagaaagcagaagaaaacagtatttctgaaggcattgtttgaggttgatctcagcactgaacgatttcaagccctacgcaccagaacagaaggagggtggaggaagtgatcagagggaacgagctgtaggtttgcagaaatgtgtgaaaccaaaatgatcactgcctacttgtgattcaaatcttcagagttttcctagttcttctagaaatacatgtcaggtttgtttgttcatcctttctgtcagcatggatcaagcccctaaaatgtggtaagtgttgtcagagcagggcaatatctctactctcaagtatgaggggaatagaaacaaagcagcagttttagccagggttcaatgatagagtggaggtaaattaagagcctccaggctgtgattcaccatttgagacattatacataatttgtttttgttataagccatttgaatttttaaaaaatttcatacatgcaatggaatatagatatgtatatacacatataatatatatgctaaagtataaagagtaataataatgacaataaacaaacccctgtgtgcctaccacccaccttattgcctttcctttgaggtaccgtgtgcggtttcctgaacctatctctatccctgtctgatagagggaacccctgtactgaactttgtgttgaccatagccttcttgtctttcatcactttatctccatgtatgtatccttaaagaataataaatggaattaaactgaatgta

SEQ ID NO: 181066 - DNA, 1661 bp, Homo sapiens
  Payload ID: 15656
  Gene Symbol: SH3BGRL3
  Gene Name: SH3 domain binding glutamate-rich protein like 3
  Uniprot ID: Q9H299
  ENST ID: ENST00000270792
  CDS Start-End: 981-1262
cctggaccagggggacatctgagaagcatgatgttgagtgccagacagctaggtctccaaagttgggctcgttgctggagtctgccccctcaaccgctgaattcttgctgggagtagtagcagtttgggaatgccatctgcagcatggagctggggttgagcttggaccaccccaagacctggggtggatcttaagggtcagcttgagcctaggctctcgagtcctgacatcatcctctaccgccacgctttccagctgtcagccttggtctccatctggttccttgagggtgtggcctctgcgtcctgctatcacccttccttgtctaaaccttcccacctgagtggagaggaacttgggggaaaatctctaagcatgggctcttcctgctgtcctatgcttcctatcccctagggttagtggtgcgtgttgggtggtggagcgagggatcccttggagcaaggttcttagagaactttgggtctgaaagcagctcaaaccttccaaagccccaagcttccctgtgctattagagcacctcctcctggagagagcggctctcgtggctggggagttggatgcaccaaacctgtgtgcggctggagagggaggcttctgccagaccctctcccgggcctgtcctgccacccaggcccctccccagtctcacactgagctccagatcagggaagggccgaaaaggacgatcagggcagccgcagaaggggcgccctgcgtgggacgggtccgttgcgcgcctggtaaccgagggggaagggaaggggcctctggcgtgcggggcggtgtcgcgcaggtcccaccccgcctgcccgcgccgcccattggtcccgagcgcgatgacttggcgggcggagcaggaaggaaaccgctcccgagcacggcggcggcgtcgtctcccggcagtgcagctgccgctaccgccgccctctgcccgccggcccgtctgtctacccccagcatgagcggcctgcgcgtctacagcacgtcggtcaccggctcccgcgaaatcaagtcccagcagagcgaggtgacccgaatcctggatgggaagcgcatccaataccagctagtggacatctcccaggacaacgccctgagggatgagatgcgagccttggcaggcaaccccaaggccaccccaccccagattgtcaacggggaccagtactgtggggactatgagctcttcgtggaggctgtggaacaaaacacgctgcaggagttcctgaagctggcttgagtcaagcctgtccagagttcccctgctggactccatcaccacactccccccagccttcacctggccatgaaggaccttttgaccaactccctgtcattcctaacctaaccttagagtccctcccccaatgcaggccacttctcctccctcctctctaaatgtagtcccctctcctccatctaaaggcaacattccttacccattagtctcagaaattgtcttaagcaacagccccaaatgctggctgcccccagccaagcattggggccgccatcctgcctggcactggctgatgggcacctctgttggttccatcagccagagctctgccaaaggccccgcagtccctctcccaggaggaccctagaggcaattaaatgatgtcctgttccattggca

SEQ ID NO: 181067 - DNA, 768 bp, Homo sapiens
  Payload ID: 15656
  Gene Symbol: SH3BGRL3
  Gene Name: SH3 domain binding glutamate-rich protein like 3
  ENST ID: ENST00000319041
  CDS Start-End: 35-301
cctctgcccgccggcccgtctgtctacccccagcatgagcggcctgcgcgtctacagcacgtcggtcaccggctcccgcgaaatcaagtcccagcagagcgaggtgacccgaatcctggatgggaagcgcatccaataccagctagtggacatctcccaggacaacgccctgagggatgagatgcgagccttggcaggcaaccccaaggccaccccaccccagattgtcaacggggaccagtactgtggggtatgggctgggggacgggggggtggggggagtgttggaagaggactctagccagggtcatatctgccacaaagcacttgggccccctgcattcaggtgaccacccctcgcctccccttctccaggactatgagctcttcgtggaggctgtggaacaaaacacgctgcaggagttcctgaagctggcttgagtcaagcctgtccagagttcccctgctggactccatcaccacactccccccagccttcacctggccatgaaggaccttttgaccaactccctgtcattcctaacctaaccttagagtccctcccccaatgcaggccacttctcctccctcctctctaaatgtagtcccctctcctccatctaaaggcaacattccttacccattagtctcagaaattgtcttaagcaacagccccaaatgctggctgcccccagccaagcattggggccgccatcctgcctggcactggctgatgggcacctctgttggttccatcagccagagctc

SEQ ID NO: 181068 - DNA, 1653 bp, Homo sapiens
  Payload ID: 15656
  Gene Symbol: SH3BGRL3
  Gene Name: SH3 domain binding glutamate-rich protein like 3
  ENST ID: ENST00000614679
  CDS Start-End: 580-1260
cctggaccagggggacatctgagaagcatgatgttgagtgccagacagctaggtctccaaagttgggctcgttgctggagtctgccccctcaaccgctgaattcttgctgggagtagtagcagtttgggaatgccatctgcagcatggagctggggttgagcttggaccaccccaagacctggggtggatcttaagggtcagcttgagcctaggctctcgagtcctgacatcatcctctaccgccacgctttccagctgtcagccttggtctccatctggttccttgagggtgtggcctctgcgtcctgctatcacccttccttgtctaaaccttcccacctgagtggagaggaacttgggggaaaatctctaagcatgggctcttcctgctgtcctatgcttcctatcccctagggttagtggtgcgtgttgggtggtggagcgagggatcccttggagcaaggttcttagagaactttgggtctgaaagcagctcaaaccttccaaagccccaagcttccctgtgctattagagcacctcctcctggagagagcggctctcgtggctggggagttggatgcaccaaacctgtgtgcggctggagagggaggcttctgccagaccctctcccgggcctgtcctgccacccaggcccctccccagtcacactgagctccagatcagggaagggccgaaaaggacgatcagggcagccgcagaaggggcgccctgcgtgggacgggtccgttgcgcgcctggtaaccgagggggaagggaaggggcctctggcgtgcggggcggtgtcgcgcaggtcccaccccgcctgcccgcgccgcccattggtcccgagcgcgatgacttggcgggcggagcaggaaggaaaccgctcccgagcacggcggcggcgtcgtctcccggcagtgcagctgccgctaccgccgccctctgcccgccggcccgtctgtctacccccagcatgagcggcctgcgcgtctacagcacgtcggtcaccggctcccgcgaaatcaagtcccagcagagcgaggtgacccgaatcctggatgggaagcgcatccaataccagctagtggacatctcccaggacaacgccctgagggatgagatgcgagccttggcaggcaaccccaaggccaccccaccccagattgtcaacggggaccagtactgtggggactatgagctcttcgtggaggctgtggaacaaaacacgctgcaggagttcctgaagctggcttgagtcaagcctgtccagagttcccctgctggactccatcaccacactccccccagccttcacctggccatgaaggaccttttgaccaactccctgtcattcctaacctaaccttagagtccctcccccaatgcaggccacttctcctccctcctctctaaatgtagtcccctctcctccatctaaaggcaacattccttacccattagtctcagaaattgtcttaagcaacagccccaaatgctggctgcccccagccaagcattggggccgccatcctgcctggcactggctgatgggcacctctgttggttccatcagccagagctctgccaaaggccccgcagtccctctcccaggaggaccctagaggcaattaaatgatgtcctgttcca

SEQ ID NO: 181069 - DNA, 4992 bp, Homo sapiens
  Payload ID: 15657
  Gene Symbol: SBK1
  Gene Name: SH3 domain binding kinase 1
  Uniprot ID: Q52WX2
  ENST ID: ENST00000341901
  CDS Start-End: 790-2064
agccgcgatgccgcgatggagcgcagcccgggcgggcgccggggccggggcccgagcgccaggcggagcgcgagctggagccgcagccggagcccgggccaggccgggggccgggagcgcagggccgggctgctcgtagcggcggcgaccgagccccccagcggctgaggggcttccagcgcccgccggtggccgggacccactaaagcccccgcagccgaggagtgcggggagcccccttccacatccaggatccggcgagcctcggggaagagggggggccctcccggatccgacaccgagcgactcccctgcggggaaagcggagacttcctcggtatttagaagacagcaagccccctacggcaccgcaaggactccccctcctcagtctgggcccccgccccaagacctagaacgcagtgcccccaggccgggattgcgagaaccccctcccaagatccggtcattacaactccacacctcaagacaagaagacccagctcagaacgcccctagatcaggggatcccaattccccccaactccggtacatagaaatcccaaatctaggcagccggggacagcaagagacactctcaccagcaagaagcctcggggatcccccccctaaagctccaggacttgggcgactgagcccctggcggcaccgcttgcaccccggtccatggtcgtggcgccctgagcccccggggccgggcagacgaagaccgcgacggcgcccaggccccctgccgcggcgtccccgcggccccagcccagggagaagatgagcgtgggctgcccagagcctgagccgccccgctccctgacctgctgtgggccggggactgcccctgggcctggtgccggtgtgccccttctcactgaagacatgcaggccctgactctccgcacactggccgccagcgacgtcaccaagcactacgaactagtccgggagctgggcaaaggcacctatgggaaggttgacctggtggtctacaagggcacaggcacaaaaatggcactgaagtttgtgaacaagagcaaaaccaagctgaagaacttcctacgggaggtgagcatcaccaacagcctctcctccagccccttcatcatcaaggtctttgacgtggtctttgagacagaggactgctacgtctttgcccaggagtacgcacctgctggggacctgtttgacatcatccctccccaggtggggctccctgaggacacggtgaagcgctgtgtgcagcagctgggcctggcgctggacttcatgcacgggcggcagctggtgcaccgcgacatcaagcccgagaacgtgctgctgttcgaccgcgagtgccgccgcgtaaagctggccgacttcggcatgacgcgccgcgtgggctgccgcgtcaagcgcgtgagcggcaccatcccttacacggcgcctgaggtgtgccaggcgggccgcgccgacgggctggcggtggacacgggcgtggacgtgtgggccttcggcgtgctcatcttctgcgtgctcaccggcaacttcccgtgggaggcggcgtcgggcgccgacgccttcttcgaggagttcgtgcgctggcagcggggccgcctgccggggctgccttcgcagtggcgccgcttcaccgagcccgcgctgcgcatgttccagcgcttactggccctggagcccgagcgccgcggcccagccaaggaggtgttccgcttcctcaagcacgagctcacgtccgagctgcgccgccggccctcgcaccgcgcgcgcaagccccccggggaccgcccgcccgccgccgggccactgcgcctcgaggcgcctgggccgctcaagcggacggtgctgaccgagagcggcagcggctcccggcccgcgccccccgccgtcgggtcggtgcccttgcccgtgccggtgccggtgccagtgcccgtgccggtgcctgtgcccgagcccggcctagctccccaggggccccccggccggaccgacggccgcgcggacaagagcaaagggcaggtggtgctggccacggccatcgagatctgcgtctgagtcgcctccgccgccctcggacccgggagcagcccgggcccgccccgagccggtgcccggtgcggcggtagggaatggagccacctcgccgcggggcagggggcgcagcggtagactaggcaggacgcggcccggcacctggtccgtccccggcgggctggtgagggggccaccaaagacccctagcgcggcctggtgagcgggggcttggcccagaggagccaagccgcacagacccgagaattcggaggccaccacacaacacacacacacacacacacacacacacacacacacacacacacacacacacacacgccaggagcaagggagctttcgggccacactcccagacgcctccctgagccctggaacccggactcgttgctcctggccttccataccccctggcagatcatcctgcggtcccaccccagatcccctcctcctcgccatcccattctgccccctccccaccctgggtacagaaagggactgaagtgttgggcagagagggggcttaaggcccctgggcacaggctgggatcagggcagtgagcgaagggcagctgtgtcctgccctcccttctggaggctggaggggagaggccaagcccttggaaaatgtagcaaatgtctggatgtcgcataagtgcgtgtatgtgcgggacaggccccgagaagctagtgactcctgcacacccccattgcacaaatgaaatcacagcccaggagggagggtagcttggcactggctgagaaatagagctctctccccgcccctccccctaaccacaagggattgtcctgacaacttgtggggatagaagggctcacagggcaggggtctcagctgcccccatccttagggcaggggagttagtgtggagccgagagcaggtcccagctccccctgccagccgcactgtcccaggcccagggacctctgccgggtcctcccagcccttgccacacagcctagacgtagtagcctgggcttccagcaggtggcgagctggttcgtgctggaaatttctcctgggtttcttggggtcaaacatgccaacctccaagaccccatcctcacgtctcccacttttctggcgctggagtgtgcagggcgtaggacctgcatgtgtgggtgtgagaatgggggcggtggacaccagggggcgagtgtgtgactaggtgtgtgtgcacatgtgtagggtgcagacgcatgggtgccatcctttgcgttcagtgactgtgcgtccagacccctcaccagcggcccccccaccacaccctggtcctcccaggcagctgtcccagggcgcccaggcctgccttgcaccacagccctcaggaaatccggcaaggaggcccctgcaggttggttcaggcccccaggtagcaaaacagagacaacagcagccccgcctgaccccctgcccctctctgtggaggcccgggacccccgcaataagcaccacatgggtgaggctgtccctgtcagggtcccctgccagggtccctcctggggttctgggccatttgaggggctctttgatgggccaggccggccagagtgaactccgagcactttctggctggtgccccaacctctccactccccactcattcccaccttgaaaaagggctataggtcccctgccctgcccgggtccagtttacaaacagtgtggggtggccccagggcctggccccactctccctgctgtgcccactcctctccagactccacctccccagtgggtatgggccctccacatgccaggtaagtagcaaacccccactccctccaaggaccaggtctcagagaaggccctggtcactgcccccggcccacctggagcccatcggggctgcctctcccagccgcgacttctccttttgccttaggcctcgcgacatcctgatctctcctgcaataactaggaatcgagattccacagtagacgtcccttgccgtgctcgctctctctctcgcgcgcgctctctctctccctctctctctctctctctctctctctctctctctctctctctctctctcctctctttctctctctccctctctctgttaagatcctgttcgggagtttccccagccgttgtagtatctagtatgttagagttgggaggggaccatagttatgtagcccagccccctcattcccagaggcacccagagggccagcctccagcctgaccccagagcagaaccggaacaccaggttggggccctggtgctgccacctcctctgctggtcgggctgggaccctttgccccttaggagaggtgttggtcacagatgtttacctcagtttatgtcactgtcgaagaaacaaaaaataatagcaaaaaataacactgtagacatgaagacttagaagacaaaaaaaaaaaaatcacacaaaaaatctcccttgttgcgattcttctgtgaaggtacagtgtgtatgtgtgtatgtgtgtatgtgtgtgcgtgtctctgtcccagaccctgtgtcccccacactgccccctgtccttcggtgcttcccagagacccctctgagctggcctgtggggcacgggaagccccctggatgggaggcggggccacaggtcggctagagggtctccaccaggcccactgaacagaaccccacggctgccagaatgttccctgagcccacactgtggccagtgggacagtcctggtggctgacatcagcgtccatgcttggctcagggcctggggcggggtcctgggtagagtcctagccccagagccccagcccctcatgtcttgccgcccttcctccatgtgtttgtaaatactctggcatcctttggccctgagaaggtttttaaatgtgttatttacttctctaaacatgacgattgctataaaaataaacaaaagtttagaaaaatga

SEQ ID NO: 181070 - DNA, 1056 bp, Homo sapiens
  Payload ID: 15658
  Gene Symbol: SBK2
  Gene Name: SH3 domain binding kinase family, member 2
  Uniprot ID: P0C263
  ENST ID: ENST00000344158
  CDS Start-End: 10-1056
ctcgcagagatgcccggcaaacagtctgaggaagggccggcggaggcaggggcttcggaggacagcgaggaggagggtctgggcggcctgacattagaggagctccagcagggccaggaggctgcccgcgcgctggaggacatgatgacgctgagtgctcagaccctggtccgagccgaggtggacgagctctacgaggaagtgcgtcccctgggccagggttgctatggccgcgtccttctggtcacccatcgtcagaaaggcacacccctggcactgaagcagctcccgaaaccccgcacgtccctccgtggcttcctgtacgagttctgtgtggggctctcgctgggcgcgcactcagccatcgtgacggcctacggcattggcatcgagtcggcacactcctacagcttcctgacggagcccgtcctgcacggggacctcatggccttcatccagcccaaggtgggcctcccgcagcccgcggtgcaccgctgcgccgcccagctggcctccgccctggagtacatccacgcccgcggcctggtgtaccgggacctgaagccggagaacgtcctggtgtgcgacccggcctgccggcgcttcaagctgaccgacttcggccacacgaggcctcgcgggacgctgctgcgcctggccgggccgcccatcccctacacggcccccgagctctgcgcgcccccgccgctccccgagggcctgcccattcagcccgccctggacgcctgggcgctgggcgtcctgctcttctgcctcctcacgggctacttcccctgggaccggcccctggccgaggccgaccccttctacgaggacttcctcatctggcaggcgtcgggccagccccgggaccgccctcagccctggttcggcctggccgccgcggccgacgcgcttctgcgggggctgctggaccctcacccccgaaggaggagcgctgtgatcgccatcagggagcacctggggcgcccctggaggcagcgggagggcgaggcggaggcagtgggagcggtggaagaggaggctgggcagtga

SEQ ID NO: 181071 - DNA, 1085 bp, Homo sapiens
  Payload ID: 15658
  Gene Symbol: SBK2
  Gene Name: SH3 domain binding kinase family, member 2
  Uniprot ID: P0C263
  ENST ID: ENST00000413299
  CDS Start-End: 39-1085
gccggcggccggagggtcaggagggccttggaggagagatgcccggcaaacagtctgaggaagggccggcggaggcaggggcttcggaggacagcgaggaggagggtctgggcggcctgacattagaggagctccagcagggccaggaggctgcccgcgcgctggaggacatgatgacgctgagtgctcagaccctggtccgagccgaggtggacgagctctacgaggaagtgcgtcccctgggccagggttgctatggccgcgtccttctggtcacccatcgtcagaaaggcacacccctggcactgaagcagctcccgaaaccccgcacgtccctccgtggcttcctgtacgagttctgtgtggggctctcgctgggcgcgcactcagccatcgtgacggcctacggcattggcatcgagtcggcacactcctacagcttcctgacggagcccgtcctgcacggggacctcatggccttcatccagcccaaggtgggcctcccgcagcccgcggtgcaccgctgcgccgcccagctggcctccgccctggagtacatccacgcccgcggcctggtgtaccgggacctgaagccggagaacgtcctggtgtgcgacccggcctgccggcgcttcaagctgaccgacttcggccacacgaggcctcgcgggacgctgctgcgcctggccgggccgcccatcccctacacggcccccgagctctgcgcgcccccgccgctccccgagggcctgcccattcagcccgccctggacgcctgggcgctgggcgtcctgctcttctgcctcctcacgggctacttcccctgggaccggcccctggccgaggccgaccccttctacgaggacttcctcatctggcaggcgtcgggccagccccgggaccgccctcagccctggttcggcctggccgccgcggccgacgcgcttctgcgggggctgctggaccctcacccccgaaggaggagcgctgtgatcgccatcagggagcacctggggcgcccctggaggcagcgggagggcgaggcggaggcagtgggagcggtggaagaggaggctgggcagtga

SEQ ID NO: 181072 - DNA, 480 bp, Homo sapiens
  Payload ID: 15659
  Gene Symbol: SBK3
  Gene Name: SH3 domain binding kinase family, member 3
  ENST ID: ENST00000592464
  CDS Start-End: 1-480
acccctgaggatggggacccagaggtgagagacgggagccaggggaggaagacagagagagaaaagaaggagagagaggcaggaggcaacacggggagagagaggaagagaaacagaaaacagggaaacgcaaagacctcagagacccagacccagggagagaggatgacagagatccaaggacacacagcgagaccaaggcccccagagaattggactcagaaacacacagcgggatgcacaggggaagaggacggtggagagagagaccagggaggacacagccacagccctccaacggctggtggagctgacgaccagcagggtgaccccggtgaggagccttcgggaccagtaccacctcatccggaagctgggctccggctcctacggccgcgtgctccttgcccagcctcaccaggggggtccagctgtggctctgaagctcctgcgtcgggatttggtcctgagaagcacctt

SEQ ID NO: 181073 - DNA, 1270 bp, Homo sapiens
  Payload ID: 15659
  Gene Symbol: SBK3
  Gene Name: SH3 domain binding kinase family, member 3
  Uniprot ID: P0C264
  ENST ID: ENST00000612221
  CDS Start-End: 1-1080
atggagcgcagggcctccgagacccctgaggatggggacccagaggaggacacagccacagccctccaacggctggtggagctgacgaccagcagggtgaccccggtgaggagccttcgggaccagtaccacctcatccggaagctgggctccggctcctacggccgcgtgctccttgcccagcctcaccaggggggtccagctgtggctctgaagctcctgcgtcgggatttggtcctgagaagcaccttcctgagggagttctgtgtgggccgctgcgtctctgcacacccaggcctgctgcagaccctggcaggacccctacagaccccccgctattttgccttcgcccaggagtacgcgccctgtggggacctcagcgggatgctgcaggaaaggggcctcccagaactgctggtgaagcgggtggtggcccagttggcaggagctctggacttcctccacagccgggggctggtccacgcagatgtcaaacctgacaacgtgctggtcttcgacccggtctgcagccgtgtggccctgggagacctgggtctgacccggccagagggcagcccgacccccgccccaccagtgcctctgcccacggcaccgcctgagctctgtctcctgctaccgcccgacaccctgcctctgcggccagccgtggactcctggggcctgggggtgcttctcttctgtgctgccactgcctgtttcccttgggacgtggcactggcccccaaccctgagttcgaggccttcgctggctgggtgaccaccaagcctcagccacctcagccaccaccaccctgggaccagtttgcgcccccagccctggccttgctccaggggcttctggacctggatcccgagactaggagccccccactggctgtcctggacttcctgggggacgactgggggttgcaagggaacagagagggacctggggttttggggagcgccgtgtcctatgaggacagggaggagggaggctcaagcctggaggagtggacagatgagggtgatgacagcaaaagtggtgggaggacggggacagatgggggagctccctgaccaggtgacagagacaggtggccagagcctgggccagaggcccttcccccagcccccagggccacctggatggagagacagctgcacccgggaggacagagagggaacacattgcactctccctacggaacgctgggcttggacgcgcattcctcttccaactgaggacccaagagcccagctcctgccc

SEQ ID NO: 181074 - DNA, 5273 bp, Homo sapiens
  Payload ID: 15660
  Gene Symbol: SH3D19
  Gene Name: SH3 domain containing 19
  Uniprot ID: Q5HYK7
  ENST ID: ENST00000304527
  CDS Start-End: 1091-3463
tcatttttccccctccccattctgttagaagcttctgccaaccatgattcatggaatgatttttttgagctgagtaatctgtggctttgcagtttccttgctttctttccttagctaaatctcttctagtgttagcaaagtatttagcacaggaaagatcttataaaatgaaataatgcatgtaatgatgcattttccaagtagatgattttaacaaaccgtaagcttttatgcctgtccttcattgtgtcttttctgcctctgtcaggcgaactgtgatgaagagccttatacttaggaagacacaactacctttgaacagtcctttgtgaaatctaatgatcgcaacgaacgaaataaaccagaacatcgttcttcaagccaaggacccttgtcatccattagagcggtaatcaagagatcttctcggacttctattcagagtgaacttcatcgagatagaaggcgcccagagatcaccattgtggcagctgagccactgaggccagcctcgtggtttccaggaaccccacccccaggactgggatttcctacatcatctgcagcaggctcttggaggcctaatgagctggttcctgctgagctcccaccatcttatgaacaagttataaaagaaatcaaccaagttcaagttaatactacaaataataataatgctgctgctactccaaggcacactattacttctgcaactcagactgacttttcagaagaaatagacaacgatctgcctcaaagttttgttttggtctcgtcagcactacaggcacctctcaagcctcttcagcctttctcagcagtctcgtctggcaatcttccaacaaatgtggcacctttaatcgtctttgatatttctgaagaaccgaattgtccagaaaaccccagtgctacaagatgtccagtgccaaaaccaagatcaaaaagcaacctcagaccaatacccagagattctcacattaaagagcaaagtcaacagaaaatcagcccagcagccgtaggagaggagtcatccccaggccggccccagtctctgctggacaacgctagcacctcagacagtcaggcagtgatgaacattatgaacacagaacaaagccaaaatagtattgtttccagaattaaagtgtttgagggtcagacaaacatagaaacctcaggactgcccaagaaaccagaaattactccacgttcacttcctccaaagcctactgtttcctcagggaaaccttctgtagctcccaaaccagctgctaacagagcttctggagagtgggactctgggactgagaacagactcaaggtgacctccaaggaaggactcaccccataccctcccctgcaagaagcgggaagcatcccagtaaccaaacctgaattgccaaagaaaccaaaccctggccttatacgaagtgttaatcctgagattccgggaagagggcccctggctgagagctctgatagtgggaagaaagtgccaactcctgccccgcggcctttgctgctgaagaaatctgtttcctcagaaaaccccacctacccttcagctccactgaaacctgtcactgttcctccccgactcgcaggggcatcacaagccaaagcatacaagtcactgggagaagggcccccagccaaccccccagttccagttctgcagagcaagcccttggtggacatcgatctcatcagctttgatgatgatgttttgcccaccccatcggggaacctggctgaagaatctgttggttcagagatggttctagatccctttcagctccctgcaaaaacagaaccaataaaagaacgagcagttcaaccagcacccaccaggaagcccactgtaattcgaattccagccaaaccaggaaaatgtttacatgaggatccacaaagtccacctcctctccctgctgaaaaacctattggaaacactttcagtacagtatctggaaagctcagtaatgttgagagaactagaaacttggaatccaaccacccaggtcaaacaggaggttttgtgcgagtacccccaaggttgccaccgagacctgtgaatggaaaaaccattccaactcaacagcctccaaccaaggtgccccctgagagaccacctcccccaaagctttctgcaaccagaagatctaataagaaactgccttttaatcgatcctcttctgacatggatcttcagaaaaaacaaagtaacttggcaactggactctcaaaagccaagagtcaagtttttaaaaatcaagatccggtgctaccccctcgtcccaaaccaggacaccctctctacagtaaatacatgctgtctgtgcctcatggaattgccaatgaagatattgtctctcaaaaccccggagaactctcttgtaagcgtggggatgtacttgtgatgctgaagcagacggaaaataattacttggagtgccaaaagggagaagacactggcagagttcacctgtctcaaatgaagattatcactccacttgatgaacatcttagaagcagaccaaacgatccaagccacgctcagaagcctgttgacagtggtgctcctcatgctgtcgttcttcatgatttcccagcagagcaagttgatgatttgaacctcacttctggagaaattgtttatcttctggagaagatagatacagattggtacagagggaactgtagaaaccagattggcatatttcctgccaactatgtcaaagtgattattgatatcccagaaggaggaaatgggaaaagagaatgtgtttcatctcattgtgttaaaggctcaagatgtgttgctcggtttgaatatattggagagcagaaggatgagttgagtttctcagagggagaaattattattcttaaagagtatgtgaatgaggaatgggccagaggagaagttcgaggcagaactgggattttccccctgaactttgtggagcctgttgaggattatcccacctctggtgcaaatgttttaagcacaaaggtaccactgaaaaccaaaaaagaagattctggctcaaactctcaggttaacagtcttccggcagaatggtgtgaagctcttcacagttttacagcagagaccagtgatgacttatcattcaagaggggagaccggatccagattctggaacgtctggattctgactggtgcaggggcagactgcaggacagggaggggatcttcccagcagtgtttgtgaggccctgcccagctgaggcaaaaagtatgttggccatagtaccgaaggggaggaaggccaaagccttatatgatttccgaggggagaatgaagatgaactttccttcaaggctggagatataataacagagctggaatctgtagatgatgactggatgagtggagaacttatgggaaaatctggaatatttcccaaaaactacatacagtttctacagatcagctagaggagaagcttgtctgtgttccttggcacaagaactcacttgaactatcaccttgactatcagatatgtttttgcactattttttttaactgaaaaagaaatatctaagctgtacatggtacactagaattttctgaaagcagaaaacgttcagattttgtagttaattttcattacaatagaaacatgcacatggaaacccatgagctaggattctaccgaggaaaacatctagtgggattagcaaggtgaagggaaagcatctggtggcatggcagcatggggaggctcacacacagaagttgcacgtggacatctgttttaatcagcacaagtgaattaaccatgcttcttcatttttttactttagttaaaaaagaggacatttaatattctacatgctgtaactatcaggacatggttagcaatctcaatttcatttttgatattcaaattaattcttacagcttgagcatatcagccttattaccagagcaaatccttccttcagatgggatagtttactgactagttggagcatttgtaagcacatggtgaaatcagcccctgcccaccaaaataatctttatgttaccaagtgattcccatttgtctaaggatttgaagggggtctaaattggatgtatcttacttagtctaaagaaccaaaaccatccctgaaatgccttgctaatacaactaatccttccatatatgtgccatacttatttttttcctcagtgtatactttatgttaacagggttattacaaagcacattttctgaatctgcaatcattcctttgacaattactggacccaaaggaaaattcattttctttgcattattccagtaatatataaaaactgtgtcttgttatagtagtacattatgaatcacatataaaatcttacaatacagaacaactgttaagatggaaaacagtgccaaacctccacagctcatttctttgtaatataatcagaatgaaaaataatttaagaggacagaagactggtacttttttgttttattttttctctagcttatccctgcacaattattagagtgaatgaaaaaccactttcctgctttccattgttataaattctaagcttaagataaaagtggttctttacatgactgaatcaattacaatttatgggctagagccaaataggttgaagacaatcatccaaacagatcaatggaatagaatttcattggaaatgtaaaacactttcccaacaatggtcatgactttcttctgtttttgagaagagtttcatatgctggaccacattttagcttttattgttttttttttcccattgtccaaaaagttaagcaacaagtggccacacttttacgtgactacaacctggagttctgcaaagaaggtaatatttacttggtctttgactaaagttatctccccattctatggttacattttattttggactatggggacttctaatacgttttggtaaagaagagagtataaagaaaattcttgtcaaatttcactcaaaagtaatttcatgagaaatcaatgatttaaagcattatccaaattaaattatcatttgcagcaaactgtacaacagcaggaaggatatggaatggaacatgaggtatatatctttgcctttataattttaacatcttatattgaagattctgaaaacctatctttattagaggaaaatctcaatcttcagttttggccttctgtcagcagaatgataagtgcaatagttgtaaatctacttgacactgtaataaactgaactgaactttcaaagtc

SEQ ID NO: 181075 - DNA, 4888 bp, Homo sapiens
  Payload ID: 15660
  Gene Symbol: SH3D19
  Gene Name: SH3 domain containing 19
  Uniprot ID: Q5HYK7
  ENST ID: ENST00000409252
  CDS Start-End: 709-3081
ccagaacatcgttcttcaagccaaggacccttgtcatccattagagcggtaatcaagagatcttctcggacttctattcagagtgaacttcatcgagatagaaggcgcccagagatcaccattgtggcagctgagccactgaggccagcctcgtggtttccaggaaccccacccccaggactgggatttcctacatcatctgcagcaggctcttggaggcctaatgagctggttcctgctgagctcccaccatcttatgaacaagttataaaagaaatcaaccaagttcaagttaatactacaaataataataatgctgctgctactccaaggcacactattacttctgcaactcagactgacttttcagaagaaatagacaacgatctgcctcaaacactacaggcacctctcaagcctcttcagcctttctcagcagtctcgtctggcaatcttccaacaaatgtggcacctttaatcgtctttgatatttctgaagaaccgaattgtccagaaaaccccagtgctacaagatgtccagtgccaaaaccaagatcaaaaagcaacctcagaccaatacccagagattctcacattaaagagcaaagtcaacagaaaatcagcccagcagccgtaggagaggagtcatccccaggccggccccagtctctgctggacaacgctagcacctcagacagtcaggcagtgatgaacattatgaacacagaacaaagccaaaatagtattgtttccagaattaaagtgtttgagggtcagacaaacatagaaacctcaggactgcccaagaaaccagaaattactccacgttcacttcctccaaagcctactgtttcctcagggaaaccttctgtagctcccaaaccagctgctaacagagcttctggagagtgggactctgggactgagaacagactcaaggtgacctccaaggaaggactcaccccataccctcccctgcaagaagcgggaagcatcccagtaaccaaacctgaattgccaaagaaaccaaaccctggccttatacgaagtgttaatcctgagattccgggaagagggcccctggctgagagctctgatagtgggaagaaagtgccaactcctgccccgcggcctttgctgctgaagaaatctgtttcctcagaaaaccccacctacccttcagctccactgaaacctgtcactgttcctccccgactcgcaggggcatcacaagccaaagcatacaagtcactgggagaagggcccccagccaaccccccagttccagttctgcagagcaagcccttggtggacatcgatctcatcagctttgatgatgatgttttgcccaccccatcggggaacctggctgaagaatctgttggttcagagatggttctagatccctttcagctccctgcaaaaacagaaccaataaaagaacgagcagttcaaccagcacccaccaggaagcccactgtaattcgaattccagccaaaccaggaaaatgtttacatgaggatccacaaagtccacctcctctccctgctgaaaaacctattggaaacactttcagtacagtatctggaaagctcagtaatgttgagagaactagaaacttggaatccaaccacccaggtcaaacaggaggttttgtgcgagtacccccaaggttgccaccgagacctgtgaatggaaaaaccattccaactcaacagcctccaaccaaggtgccccctgagagaccacctcccccaaagctttctgcaaccagaagatctaataagaaactgccttttaatcgatcctcttctgacatggatcttcagaaaaaacaaagtaacttggcaactggactctcaaaagccaagagtcaagtttttaaaaatcaagatccggtgctaccccctcgtcccaaaccaggacaccctctctacagtaaatacatgctgtctgtgcctcatggaattgccaatgaagatattgtctctcaaaaccccggagaactctcttgtaagcgtggggatgtacttgtgatgctgaagcagacggaaaataattacttggagtgccaaaagggagaagacactggcagagttcacctgtctcaaatgaagattatcactccacttgatgaacatcttagaagcagaccaaacgatccaagccacgctcagaagcctgttgacagtggtgctcctcatgctgtcgttcttcatgatttcccagcagagcaagttgatgatttgaacctcacttctggagaaattgtttatcttctggagaagatagatacagattggtacagagggaactgtagaaaccagattggcatatttcctgccaactatgtcaaagtgattattgatatcccagaaggaggaaatgggaaaagagaatgtgtttcatctcattgtgttaaaggctcaagatgtgttgctcggtttgaatatattggagagcagaaggatgagttgagtttctcagagggagaaattattattcttaaagagtatgtgaatgaggaatgggccagaggagaagttcgaggcagaactgggattttccccctgaactttgtggagcctgttgaggattatcccacctctggtgcaaatgttttaagcacaaaggtaccactgaaaaccaaaaaagaagattctggctcaaactctcaggttaacagtcttccggcagaatggtgtgaagctcttcacagttttacagcagagaccagtgatgacttatcattcaagaggggagaccggatccagattctggaacgtctggattctgactggtgcaggggcagactgcaggacagggaggggatcttcccagcagtgtttgtgaggccctgcccagctgaggcaaaaagtatgttggccatagtaccgaaggggaggaaggccaaagccttatatgatttccgaggggagaatgaagatgaactttccttcaaggctggagatataataacagagctggaatctgtagatgatgactggatgagtggagaacttatgggaaaatctggaatatttcccaaaaactacatacagtttctacagatcagctagaggagaagcttgtctgtgttccttggcacaagaactcacttgaactatcaccttgactatcagatatgtttttgcactattttttttaactgaaaaagaaatatctaagctgtacatggtacactagaattttctgaaagcagaaaacgttcagattttgtagttaattttcattacaatagaaacatgcacatggaaacccatgagctaggattctaccgaggaaaacatctagtgggattagcaaggtgaagggaaagcatctggtggcatggcagcatggggaggctcacacacagaagttgcacgtggacatctgttttaatcagcacaagtgaattaaccatgcttcttcatttttttactttagttaaaaaagaggacatttaatattctacatgctgtaactatcaggacatggttagcaatctcaatttcatttttgatattcaaattaattcttacagcttgagcatatcagccttattaccagagcaaatccttccttcagatgggatagtttactgactagttggagcatttgtaagcacatggtgaaatcagcccctgcccaccaaaataatctttatgttaccaagtgattcccatttgtctaaggatttgaagggggtctaaattggatgtatcttacttagtctaaagaaccaaaaccatccctgaaatgccttgctaatacaactaatccttccatatatgtgccatacttatttttttcctcagtgtatactttatgttaacagggttattacaaagcacattttctgaatctgcaatcattcctttgacaattactggacccaaaggaaaattcattttctttgcattattccagtaatatataaaaactgtgtcttgttatagtagtacattatgaatcacatataaaatcttacaatacagaacaactgttaagatggaaaacagtgccaaacctccacagctcatttctttgtaatataatcagaatgaaaaataatttaagaggacagaagactggtacttttttgttttattttttctctagcttatccctgcacaattattagagtgaatgaaaaaccactttcctgctttccattgttataaattctaagcttaagataaaagtggttctttacatgactgaatcaattacaatttatgggctagagccaaataggttgaagacaatcatccaaacagatcaatggaatagaatttcattggaaatgtaaaacactttcccaacaatggtcatgactttcttctgtttttgagaagagtttcatatgctggaccacattttagcttttattgttttttttttcccattgtccaaaaagttaagcaacaagtggccacacttttacgtgactacaacctggagttctgcaaagaaggtaatatttacttggtctttgactaaagttatctccccattctatggttacattttattttggactatggggacttctaatacgttttggtaaagaagagagtataaagaaaattcttgtcaaatttcactcaaaagtaatttcatgagaaatcaatgatttaaagcattatccaaattaaattatcatttgcagcaaactgtacaacagcaggaaggatatggaatggaacatgaggtatatatctttgcctttataattttaacatcttatattgaagattctgaaaacctatctttattagaggaaaatctcaatcttcagttttggccttctgtcagcagaatgataagtgcaatagttgtaaatctacttgacactgtaataaactgaactgaactttcaaa

SEQ ID NO: 181076 - DNA, 5284 bp, Homo sapiens
  Payload ID: 15660
  Gene Symbol: SH3D19
  Gene Name: SH3 domain containing 19
  Uniprot ID: Q5HYK7
  ENST ID: ENST00000409598
  CDS Start-End: 1169-3472
gaaatccaacttctgaaatgttctgggtggtagatagttaagggtgaagctgtattggtcttagtatttgcagatgttgtagctgactgctcatttttccccctccccattctgttagaagcttctgccaaccatgattcatggaatgatttttttgagctgagtaatctgtggctttgcagtttccttgctttctttccttagctaaatctcttctagtgttagcaaagtatttagcacaggaaagatcttataaaatgaaataatgcatgtaatgatgcattttccaagtagatgattttaacaaaccgtaagcttttatgcctgtccttcattgtgtcttttctgcctctgtcaggcgaactgtgatgaagagccttatacttaggaagacacaactacctttgaacagtcctttgtgaaatctaatgatcgcaacgaacgaaataaaccagaacatcgttcttcaagccaaggacccttgtcatccattagagcggtaatcaagagatcttctcggacttctattcagagtgaacttcatcgagatagaaggcgcccagagatcaccattgtggcagctgagccactgaggccagcctcgtggtttccaggaaccccacccccaggactgggatttcctacatcatctgcagcaggctcttggaggcctaatgagctggttcctgctgagctcccaccatcttatgaacaagttataaaagaaatcaaccaagttcaagttaatactacaaataataataatgctgctgctactccaaggcacactattacttctgcaactcagactgacttttcagaagaaatagacaacgatctgcctcaaagtaatgcaacactacaggcacctctcaagcctcttcagcctttctcagcagtctcgtctggcaatcttccaacaaatgtggcacctttaatcgtctttgatatttctgaagaaccgaattgtccagaaaaccccagtgctacaagatgtccagtgccaaaaccaagatcaaaaagcaacctcagaccaatacccagagattctcacattaaagagcaaagtcaacagaaaatcagcccagcagccgtaggagaggagtcatccccaggccggccccagtctctgctggacaacgctagcacctcagacagtcaggcagtgatgaacattatgaacacagaacaaagccaaaatagtattgtttccagaattaaagtgtttgagggtcagacaaacatagaaacctcaggactgcccaagaaaccagaaattactccacgttcacttcctccaaagcctactgtttcctcagggaaaccttctgtagctcccaaaccagctgctaacagagcttctggagagtgggactctgggactgagaacagactcaaggtgacctccaaggaaggactcaccccataccctcccctgcaagaagcgggaagcatcccagtaaccaaacctgaattgccaaagaaaccaaaccctggccttatacgaagtgttaatcctgagattccgggaagagggcccctggctgagagctctgatagtgggaagaaagtgccaactcctgccccgcggcctttgctgctgaagaaatctgtttcctcagaaaaccccacctacccttcagctccactgaaacctgtcactgttcctccccgactcgcaggggcatcacaagccaaagcatacaagtcactgggagaagggcccccagccaaccccccagttccagttctgcagagcaagcccttggtggacatcgatctcatcagctttgatgatgatgttttgcccaccccatcggggaacctggctgaagaatctgttggttcagagatggttctagatccctttcagctccctgcaaaaacagaaccaataaaagaacgagcagttcaaccagcacccaccaggaagcccactgtaattcgaattccagccaaaccaggaaaatgtttacatgaggatccacaaagtccacctcctctccctgctgaaaaacctattggaaacactttcagtacagtatctggaaagctcagtaatgttgagagaactagaaacttggaatccaaccacccaggtcaaacaggaggttttgtgcgagtacccccaaggttgccaccgagacctgtgaatggaaaaaccattccaactcaacagcctccaaccaaggtgccccctgagagaccacctcccccaaagctttctgcaaccagaagatctaataagaaactgccttttaatcgatcctcttctgacatggatcttcagaaaaaacaaagtaacttggcaactggactctcaaaagccaagagtcaagtttttaaaaatcaagatccggtgctaccccctcgtcccaaaccaggacaccctctctacagtaaatacatgcgtggggatgtacttgtgatgctgaagcagacggaaaataattacttggagtgccaaaagggagaagacactggcagagttcacctgtctcaaatgaagattatcactccacttgatgaacatcttagaagcagaccaaacgatccaagccacgctcagaagcctgttgacagtggtgctcctcatgctgtcgttcttcatgatttcccagcagagcaagttgatgatttgaacctcacttctggagaaattgtttatcttctggagaagatagatacagattggtacagagggaactgtagaaaccagattggcatatttcctgccaactatgtcaaagtgattattgatatcccagaaggaggaaatgggaaaagagaatgtgtttcatctcattgtgttaaaggctcaagatgtgttgctcggtttgaatatattggagagcagaaggatgagttgagtttctcagagggagaaattattattcttaaagagtatgtgaatgaggaatgggccagaggagaagttcgaggcagaactgggattttccccctgaactttgtggagcctgttgaggattatcccacctctggtgcaaatgttttaagcacaaaggtaccactgaaaaccaaaaaagaagattctggctcaaactctcaggttaacagtcttccggcagaatggtgtgaagctcttcacagttttacagcagagaccagtgatgacttatcattcaagaggggagaccggatccagattctggaacgtctggattctgactggtgcaggggcagactgcaggacagggaggggatcttcccagcagtgtttgtgaggccctgcccagctgaggcaaaaagtatgttggccatagtaccgaaggggaggaaggccaaagccttatatgatttccgaggggagaatgaagatgaactttccttcaaggctggagatataataacagagctggaatctgtagatgatgactggatgagtggagaacttatgggaaaatctggaatatttcccaaaaactacatacagtttctacagatcagctagaggagaagcttgtctgtgttccttggcacaagaactcacttgaactatcaccttgactatcagatatgtttttgcactattttttttaactgaaaaagaaatatctaagctgtacatggtacactagaattttctgaaagcagaaaacgttcagattttgtagttaattttcattacaatagaaacatgcacatggaaacccatgagctaggattctaccgaggaaaacatctagtgggattagcaaggtgaagggaaagcatctggtggcatggcagcatggggaggctcacacacagaagttgcacgtggacatctgttttaatcagcacaagtgaattaaccatgcttcttcatttttttactttagttaaaaaagaggacatttaatattctacatgctgtaactatcaggacatggttagcaatctcaatttcatttttgatattcaaattaattcttacagcttgagcatatcagccttattaccagagcaaatccttccttcagatgggatagtttactgactagttggagcatttgtaagcacatggtgaaatcagcccctgcccaccaaaataatctttatgttaccaagtgattcccatttgtctaaggatttgaagggggtctaaattggatgtatcttacttagtctaaagaaccaaaaccatccctgaaatgccttgctaatacaactaatccttccatatatgtgccatacttatttttttcctcagtgtatactttatgttaacagggttattacaaagcacattttctgaatctgcaatcattcctttgacaattactggacccaaaggaaaattcattttctttgcattattccagtaatatataaaaactgtgtcttgttatagtagtacattatgaatcacatataaaatcttacaatacagaacaactgttaagatggaaaacagtgccaaacctccacagctcatttctttgtaatataatcagaatgaaaaataatttaagaggacagaagactggtacttttttgttttattttttctctagcttatccctgcacaattattagagtgaatgaaaaaccactttcctgctttccattgttataaattctaagcttaagataaaagtggttctttacatgactgaatcaattacaatttatgggctagagccaaataggttgaagacaatcatccaaacagatcaatggaatagaatttcattggaaatgtaaaacactttcccaacaatggtcatgactttcttctgtttttgagaagagtttcatatgctggaccacattttagcttttattgttttttttttcccattgtccaaaaagttaagcaacaagtggccacacttttacgtgactacaacctggagttctgcaaagaaggtaatatttacttggtctttgactaaagttatctccccattctatggttacattttattttggactatggggacttctaatacgttttggtaaagaagagagtataaagaaaattcttgtcaaatttcactcaaaagtaatttcatgagaaatcaatgatttaaagcattatccaaattaaattatcatttgcagcaaactgtacaacagcaggaaggatatggaatggaacatgaggtatatatctttgcctttataattttaacatcttatattgaagattctgaaaacctatctttattagaggaaaatctcaatcttcagttttggccttctgtcagcagaatgataagtgcaatagttgtaaatctacttgacactgtaataaactgaactgaactttcaaagtccc

SEQ ID NO: 181077 - DNA, 2656 bp, Homo sapiens
  Payload ID: 15660
  Gene Symbol: SH3D19
  Gene Name: SH3 domain containing 19
  Uniprot ID: Q5HYK7
  ENST ID: ENST00000427414
  CDS Start-End: 190-2385
cccagtgctacaagatgtccagtgccaaaaccaagatcaaaaagcaacctcagaccaatacccagagattctcacattaaagagcaaagtcaacagaaaatcagcccagcagccgtaggagaggagtcatccccaggccggccccagtctctgctggacaacgctagcacctcagacagtcaggcagtgatgaacattatgaacacagaacaaagccaaaatagtattgtttccagaattaaagtgtttgagggtcagacaaacatagaaacctcaggactgcccaagaaaccagaaattactccacgttcacttcctccaaagcctactgtttcctcagggaaaccttctgtagctcccaaaccagctgctaacagagcttctggagagtgggactctgggactgagaacagactcaaggtgacctccaaggaaggactcaccccataccctcccctgcaagaagcgggaagcatcccagtaaccaaacctgaattgccaaagaaaccaaaccctggccttatacgaagtgttaatcctgagattccgggaagagggcccctggctgagagctctgatagtgggaagaaagtgccaactcctgccccgcggcctttgctgctgaagaaatctgtttcctcagaaaaccccacctacccttcagctccactgaaacctgtcactgttcctccccgactcgcaggggcatcacaagccaaagcatacaagtcactgggagaagggcccccagccaaccccccagttccagttctgcagagcaagcccttggtggacatcgatctcatcagctttgatgatgatgttttgcccaccccatcggggaacctggctgaagaatctgttggttcagagatggttctaggtttacatgaggatccacaaagtccacctcctctccctgctgaaaaacctattggaaacactttcagtacagtatctggaaagctcagtaatgttgagagaactagaaacttggaatccaaccacccaggtcaaacaggaggttttgtgcgagtacccccaaggttgccaccgagacctgtgaatggaaaaaccattccaactcaacagcctccaaccaaggtgccccctgagagaccacctcccccaaagctttctgcaaccagaagatctaataagaaactgccttttaatcgatcctcttctgacatggatcttcagaaaaaacaaagtaacttggcaactggactctcaaaagccaagagtcaagtttttaaaaatcaagatccggtgctaccccctcgtcccaaaccaggacaccctctctacagtaaatacatgcgtggggatgtacttgtgatgctgaagcagacggaaaataattacttggagtgccaaaagggagaagacactggcagagttcacctgtctcaaatgaagattatcactccacttgatgaacatcttagaagcagaccaaacgatccaagccacgctcagaagcctgttgacagtggtgctcctcatgctgtcgttcttcatgatttcccagcagagcaagttgatgatttgaacctcacttctggagaaattgtttatcttctggagaagatagatacagattggtacagagggaactgtagaaaccagattggcatatttcctgccaactatgtcaaagtgattattgatatcccagaaggaggaaatgggaaaagagaatgtgtttcatctcattgtgttaaaggctcaagatgtgttgctcggtttgaatatattggagagcagaaggatgagttgagtttctcagagggagaaattattattcttaaagagtatgtgaatgaggaatgggccagaggagaagttcgaggcagaactgggattttccccctgaactttgtggagcctgttgaggattatcccacctctggtgcaaatgttttaagcacaaaggtaccactgaaaaccaaaaaagaagattctggctcaaactctcaggttaacagtcttccggcagaatggtgtgaagctcttcacagttttacagcagagaccagtgatgacttatcattcaagaggggagaccggatccagattctggaacgtctggattctgactggtgcaggggcagactgcaggacagggaggggatcttcccagcagtgtttgtgaggccctgcccagctgaggcaaaaagtatgttggccatagtaccgaaggggaggaaggccaaagccttatatgatttccgaggggagaatgaagatgaactttccttcaaggctggagatataataacagagctggaatctgtagatgatgactggatgagtggagaacttatgggaaaatctggaatatttcccaaaaactacatacagtttctacagatcagctagaggagaagcttgtctgtgttccttggcacaagaactcacttgaactatcaccttgactatcagatatgtttttgcactattttttttaactgaaaaagaaatatctaagctgtacatggtacactagaattttctgaaagcagaaaacgttcagattttgtagttaattttcattacaatagaaacatgcacatggaaacccatgagctaggattctaccgaggaaaacatctagtgggattagcaaggtgaagggaaagcatctggtggc

SEQ ID NO: 181078 - DNA, 5107 bp, Homo sapiens
  Payload ID: 15660
  Gene Symbol: SH3D19
  Gene Name: SH3 domain containing 19
  Uniprot ID: Q5HYK7
  ENST ID: ENST00000514152
  CDS Start-End: 1000-3303
agccatttgcttcctgagtggccacattccagctgtgcagactggtcatagcacatctgccaatcagaacaggccctggagggaagcccttggatactgagtcttgtttacatgcatcgtgactctgtttctcccttcctcttgtgtgttgtaccactaggaagattagtggggaaatttgctattacatgcctaagtaaactatgtaactaggatcacagccacaggaaatgatgttctggacagagttttagctcggctttagccacagatcgcaacgaacgaaataaaccagaacatcgttcttcaagccaaggacccttgtcatccattagagcggtaatcaagagatcttctcggacttctattcagagtgaacttcatcgagatagaaggcgcccagagatcaccattgtggcagctgagccactgaggccagcctcgtggtttccaggaaccccacccccaggactgggatttcctacatcatctgcagcaggctcttggaggcctaatgagctggttcctgctgagctcccaccatcttatgaacaagttataaaagaaatcaaccaagttcaagttaatactacaaataataataatgctgctgctactccaaggcacactattacttctgcaactcagactgacttttcagaagaaatagacaacgatctgcctcaaacactacaggcacctctcaagcctcttcagcctttctcagcagtctcgtctggcaatcttccaacaaatgtggcacctttaatcgtctttgatatttctgaagaaccgaattgtccagaaaaccccagtgctacaagatgtccagtgccaaaaccaagatcaaaaagcaacctcagaccaatacccagagattctcacattaaagagcaaagtcaacagaaaatcagcccagcagccgtaggagaggagtcatccccaggccggccccagtctctgctggacaacgctagcacctcagacagtcaggcagtgatgaacattatgaacacagaacaaagccaaaatagtattgtttccagaattaaagtgtttgagggtcagacaaacatagaaacctcaggactgcccaagaaaccagaaattactccacgttcacttcctccaaagcctactgtttcctcagggaaaccttctgtagctcccaaaccagctgctaacagagcttctggagagtgggactctgggactgagaacagactcaaggtgacctccaaggaaggactcaccccataccctcccctgcaagaagcgggaagcatcccagtaaccaaacctgaattgccaaagaaaccaaaccctggccttatacgaagtgttaatcctgagattccgggaagagggcccctggctgagagctctgatagtgggaagaaagtgccaactcctgccccgcggcctttgctgctgaagaaatctgtttcctcagaaaaccccacctacccttcagctccactgaaacctgtcactgttcctccccgactcgcaggggcatcacaagccaaagcatacaagtcactgggagaagggcccccagccaaccccccagttccagttctgcagagcaagcccttggtggacatcgatctcatcagctttgatgatgatgttttgcccaccccatcggggaacctggctgaagaatctgttggttcagagatggttctagatccctttcagctccctgcaaaaacagaaccaataaaagaacgagcagttcaaccagcacccaccaggaagcccactgtaattcgaattccagccaaaccaggaaaatgtttacatgaggatccacaaagtccacctcctctccctgctgaaaaacctattggaaacactttcagtacagtatctggaaagctcagtaatgttgagagaactagaaacttggaatccaaccacccaggtcaaacaggaggttttgtgcgagtacccccaaggttgccaccgagacctgtgaatggaaaaaccattccaactcaacagcctccaaccaaggtgccccctgagagaccacctcccccaaagctttctgcaaccagaagatctaataagaaactgccttttaatcgatcctcttctgacatggatcttcagaaaaaacaaagtaacttggcaactggactctcaaaagccaagagtcaagtttttaaaaatcaagatccggtgctaccccctcgtcccaaaccaggacaccctctctacagtaaatacatgcgtggggatgtacttgtgatgctgaagcagacggaaaataattacttggagtgccaaaagggagaagacactggcagagttcacctgtctcaaatgaagattatcactccacttgatgaacatcttagaagcagaccaaacgatccaagccacgctcagaagcctgttgacagtggtgctcctcatgctgtcgttcttcatgatttcccagcagagcaagttgatgatttgaacctcacttctggagaaattgtttatcttctggagaagatagatacagattggtacagagggaactgtagaaaccagattggcatatttcctgccaactatgtcaaagtgattattgatatcccagaaggaggaaatgggaaaagagaatgtgtttcatctcattgtgttaaaggctcaagatgtgttgctcggtttgaatatattggagagcagaaggatgagttgagtttctcagagggagaaattattattcttaaagagtatgtgaatgaggaatgggccagaggagaagttcgaggcagaactgggattttccccctgaactttgtggagcctgttgaggattatcccacctctggtgcaaatgttttaagcacaaaggtaccactgaaaaccaaaaaagaagattctggctcaaactctcaggttaacagtcttccggcagaatggtgtgaagctcttcacagttttacagcagagaccagtgatgacttatcattcaagaggggagaccggatccagattctggaacgtctggattctgactggtgcaggggcagactgcaggacagggaggggatcttcccagcagtgtttgtgaggccctgcccagctgaggcaaaaagtatgttggccatagtaccgaaggggaggaaggccaaagccttatatgatttccgaggggagaatgaagatgaactttccttcaaggctggagatataataacagagctggaatctgtagatgatgactggatgagtggagaacttatgggaaaatctggaatatttcccaaaaactacatacagtttctacagatcagctagaggagaagcttgtctgtgttccttggcacaagaactcacttgaactatcaccttgactatcagatatgtttttgcactattttttttaactgaaaaagaaatatctaagctgtacatggtacactagaattttctgaaagcagaaaacgttcagattttgtagttaattttcattacaatagaaacatgcacatggaaacccatgagctaggattctaccgaggaaaacatctagtgggattagcaaggtgaagggaaagcatctggtggcatggcagcatggggaggctcacacacagaagttgcacgtggacatctgttttaatcagcacaagtgaattaaccatgcttcttcatttttttactttagttaaaaaagaggacatttaatattctacatgctgtaactatcaggacatggttagcaatctcaatttcatttttgatattcaaattaattcttacagcttgagcatatcagccttattaccagagcaaatccttccttcagatgggatagtttactgactagttggagcatttgtaagcacatggtgaaatcagcccctgcccaccaaaataatctttatgttaccaagtgattcccatttgtctaaggatttgaagggggtctaaattggatgtatcttacttagtctaaagaaccaaaaccatccctgaaatgccttgctaatacaactaatccttccatatatgtgccatacttatttttttcctcagtgtatactttatgttaacagggttattacaaagcacattttctgaatctgcaatcattcctttgacaattactggacccaaaggaaaattcattttctttgcattattccagtaatatataaaaactgtgtcttgttatagtagtacattatgaatcacatataaaatcttacaatacagaacaactgttaagatggaaaacagtgccaaacctccacagctcatttctttgtaatataatcagaatgaaaaataatttaagaggacagaagactggtacttttttgttttattttttctctagcttatccctgcacaattattagagtgaatgaaaaaccactttcctgctttccattgttataaattctaagcttaagataaaagtggttctttacatgactgaatcaattacaatttatgggctagagccaaataggttgaagacaatcatccaaacagatcaatggaatagaatttcattggaaatgtaaaacactttcccaacaatggtcatgactttcttctgtttttgagaagagtttcatatgctggaccacattttagcttttattgttttttttttcccattgtccaaaaagttaagcaacaagtggccacacttttacgtgactacaacctggagttctgcaaagaaggtaatatttacttggtctttgactaaagttatctccccattctatggttacattttattttggactatggggacttctaatacgttttggtaaagaagagagtataaagaaaattcttgtcaaatttcactcaaaagtaatttcatgagaaatcaatgatttaaagcattatccaaattaaattatcatttgcagcaaactgtacaacagcaggaaggatatggaatggaacatgaggtatatatctttgcctttataattttaacatcttatattgaagattctgaaaacctatctttattagaggaaaatctcaatcttcagttttggccttctgtcagcagaatgataagtgcaatagttgtaaatctacttgacactgtaataaactgaactgaactttc

SEQ ID NO: 181079 - DNA, 5228 bp, Homo sapiens
  Payload ID: 15660
  Gene Symbol: SH3D19
  Gene Name: SH3 domain containing 19
  ENST ID: ENST00000604030
  CDS Start-End: 281-3424
agagcgggagtgggagtgggaaaggccagggattaagaggccgccgggacgccgcaaggaggcggggaatcggctcggcccgcgccctgccgctgcccggccggctgcaggtggagttcgcggaggtggccatttccacagccgccgccgacgcctcctctccgggagccgccttccccccggcccgagggcggtggcgtggggcgccgggtgcaggcgttctggggcgccggggccgcagctcgctggccatcccgcggctgcgccccgcgcctcgcccatggctgagggccggcggcgggaggacgaggaggaagagctacgcgagcgccgcgaacttggtggccagcgccgcgcccggggccgtgcgctctcgggccactcggccgcagatcgcaacgaacgaaataaaccagaacatcgttcttcaagccaaggacccttgtcatccattagagcggtaatcaagagatcttctcggacttctattcagagtgaacttcatcgagatagaaggcgcccagagatcaccattgtggcagctgagccactgaggccagcctcgtggtttccaggaaccccacccccaggactgggatttcctacatcatctgcagcaggctcttggaggcctaatgagctggttcctgctgagctcccaccatcttatgaacaagttataaaagaaatcaaccaagttcaagttaatactacaaataataataatgctgctgctactccaaggcacactattacttctgcaactcagactgacttttcagaagaaatagacaacgatctgcctcaaacactacaggcacctctcaagcctcttcagcctttctcagcagtctcgtctggcaatcttccaacaaatgtggcacctttaatcgtctttgatatttctgaagaaccgaattgtccagaaaaccccagtgctacaagatgtccagtgccaaaaccaagatcaaaaagcaacctcagaccaatacccagagattctcacattaaagagcaaagtcaacagaaaatcagcccagcagccgtaggagaggagtcatccccaggccggccccagtctctgctggacaacgctagcacctcagacagtcaggcagtgatgaacattatgaacacagaacaaagccaaaatagtattgtttccagaattaaagtgtttgagggtcagacaaacatagaaacctcaggactgcccaagaaaccagaaattactccacgttcacttcctccaaagcctactgtttcctcagggaaaccttctgtagctcccaaaccagctgctaacagagcttctggagagtgggactctgggactgagaacagactcaaggtgacctccaaggaaggactcaccccataccctcccctgcaagaagcgggaagcatcccagtaaccaaacctgaattgccaaagaaaccaaaccctggccttatacgaagtgttaatcctgagattccgggaagagggcccctggctgagagctctgatagtgggaagaaagtgccaactcctgccccgcggcctttgctgctgaagaaatctgtttcctcagaaaaccccacctacccttcagctccactgaaacctgtcactgttcctccccgactcgcaggggcatcacaagccaaagcatacaagtcactgggagaagggcccccagccaaccccccagttccagttctgcagagcaagcccttggtggacatcgatctcatcagctttgatgatgatgttttgcccaccccatcggggaacctggctgaagaatctgttggttcagagatggttctagatccctttcagctccctgcaaaaacagaaccaataaaagaacgagcagttcaaccagcacccaccaggaagcccactgtaattcgaattccagccaaaccaggaaaatgtttacatgaggatccacaaagtccacctcctctccctgctgaaaaacctattggaaacactttcagtacagtatctggaaagctcagtaatgttgagagaactagaaacttggaatccaaccacccaggtcaaacaggaggttttgtgcgagtacccccaaggttgccaccgagacctgtgaatggaaaaaccattccaactcaacagcctccaaccaaggtgccccctgagagaccacctcccccaaagctttctgcaaccagaagatctaataagaaactgccttttaatcgatcctcttctgacatggatcttcagaaaaaacaaagtaacttggcaactggactctcaaaagccaagagtcaagtttttaaaaatcaagatccggtgctaccccctcgtcccaaaccaggacaccctctctacagtaaatacatgcgtggggatgtacttgtgatgctgaagcagacggaaaataattacttggagtgccaaaagggagaagacactggcagagttcacctgtctcaaatgaagattatcactccacttgatgaacatcttagaagcagaccaaacgatccaagccacgctcagaagcctgttgacagtggtgctcctcatgctgtcgttcttcatgatttcccagcagagcaagttgatgatttgaacctcacttctggagaaattgtttatcttctggagaagatagatacagattggtacagagggaactgtagaaaccagattggcatatttcctgccaactatgtcaaagtgattattgatatcccagaaggaggaaatgggaaaagagaatgtgtttcatctcattgtgttaaaggctcaagatgtgttgctcggtttgaatatattggagagcagaaggatgagttgagtttctcagagggagaaattattattcttaaagagtatgtgaatgaggaatgggccagaggagaagttcgaggcagaactgggattttccccctgaactttgtggagcctgttgaggattatcccacctctggtgcaaatgttttaagcacaaaggtaccactgaaaaccaaaaaagaagattctggctcaaactctcaggttaacagtcttccggcagaatggtgtgaagctcttcacagttttacagcagagaccagtgatgacttatcattcaagaggggagaccggatccagattctggaacgtctggattctgactggtgcaggggcagactgcaggacagggaggggatcttcccagcagtgtttgtgaggccctgcccagctgaggcaaaaagtatgttggccatagtaccgaaggggaggaaggccaaagccttatatgatttccgaggggagaatgaagatgaactttccttcaaggctggagatataataacagagctggaatctgtagatgatgactggatgagtggagaacttatgggaaaatctggaatatttcccaaaaactacatacagtttctacagatcagctagaggagaagcttgtctgtgttccttggcacaagaactcacttgaactatcaccttgactatcagatatgtttttgcactattttttttaactgaaaaagaaatatctaagctgtacatggtacactagaattttctgaaagcagaaaacgttcagattttgtagttaattttcattacaatagaaacatgcacatggaaacccatgagctaggattctaccgaggaaaacatctagtgggattagcaaggtgaagggaaagcatctggtggcatggcagcatggggaggctcacacacagaagttgcacgtggacatctgttttaatcagcacaagtgaattaaccatgcttcttcatttttttactttagttaaaaaagaggacatttaatattctacatgctgtaactatcaggacatggttagcaatctcaatttcatttttgatattcaaattaattcttacagcttgagcatatcagccttattaccagagcaaatccttccttcagatgggatagtttactgactagttggagcatttgtaagcacatggtgaaatcagcccctgcccaccaaaataatctttatgttaccaagtgattcccatttgtctaaggatttgaagggggtctaaattggatgtatcttacttagtctaaagaaccaaaaccatccctgaaatgccttgctaatacaactaatccttccatatatgtgccatacttatttttttcctcagtgtatactttatgttaacagggttattacaaagcacattttctgaatctgcaatcattcctttgacaattactggacccaaaggaaaattcattttctttgcattattccagtaatatataaaaactgtgtcttgttatagtagtacattatgaatcacatataaaatcttacaatacagaacaactgttaagatggaaaacagtgccaaacctccacagctcatttctttgtaatataatcagaatgaaaaataatttaagaggacagaagactggtacttttttgttttattttttctctagcttatccctgcacaattattagagtgaatgaaaaaccactttcctgctttccattgttataaattctaagcttaagataaaagtggttctttacatgactgaatcaattacaatttatgggctagagccaaataggttgaagacaatcatccaaacagatcaatggaatagaatttcattggaaatgtaaaacactttcccaacaatggtcatgactttcttctgtttttgagaagagtttcatatgctggaccacattttagcttttattgttttttttttcccattgtccaaaaagttaagcaacaagtggccacacttttacgtgactacaacctggagttctgcaaagaaggtaatatttacttggtctttgactaaagttatctccccattctatggttacattttattttggactatggggacttctaatacgttttggtaaagaagagagtataaagaaaattcttgtcaaatttcactcaaaagtaatttcatgagaaatcaatgatttaaagcattatccaaattaaattatcatttgcagcaaactgtacaacagcaggaaggatatggaatggaacatgaggtatatatctttgcctttataattttaacatcttatattgaagattctgaaaacctatctttattagaggaaaatctcaatcttcagttttggccttctgtcagcagaatgataagtgcaatagttgtaaatctacttgacactgtaataaactgaactgaactttc

SEQ ID NO: 181080 - DNA, 882 bp, Homo sapiens
  Payload ID: 15660
  Gene Symbol: SH3D19
  Gene Name: SH3 domain containing 19
  ENST ID: ENST00000462257
  CDS Start-End: 1-700
aaacatagaaacctcaggactgcccaagaaaccagaaattactccacgttcacttcctccaaagcctactgtttcctcagggaaaccttctgtagctcccaaaccagctgctaacagagcttctggagagtgggactctgggactgagaacagactcaaggtgacctccaaggaaggactcaccccataccctcccctgcaagaagcgggaagcatcccagtaaccaaacctgaattgccaaagaaaccaaaccctggccttatacgaagtgttaatcctgagattccgggaagagggcccctggctgagagctctgatagtgggaagaaagtgccaactcctgccccgcggcctttgctgctgaagaaatctgtttcctcagaaaaccccacctacccttcagctccactgaaacctgtcactgttcctccccgactcgcaggggcatcacaagccaaagcatacaagtcactgggagaagggcccccagccaaccccccagttccagttctgcagagcaagcccttggtggacatcgatctcatcagctttgatgatgatgttttgcccaccccatcggggaacctggctgaagaatctgttggttcagagatggttctagaccatgtggaggcattacctttaacaagagagttaatcaataatctttttaaaagagctgaacataagcataattaggctgaaagaaactgggagaattatctcttgtcgtctttgccacttctgaagaactgcttcccccaatgaccctcagattctgataagtaaaaatttttaaaataataaaatagtgatttatctaaatggttatattattcaaggttacaaatagaagctacttgttatgaactaaatatgcc

SEQ ID NO: 181081 - DNA, 1168 bp, Homo sapiens
  Payload ID: 15661
  Gene Symbol: SH3D21
  Gene Name: SH3 domain containing 21
  ENST ID: ENST00000373139
  CDS Start-End: 35-1168
gagctgccaggctctggagggcgccccggaaaccatggaagtcctcgtcctggccggataccgcgcgcagaaggaggacgagctgagtctggcgcccggggacgtggtccggcaggtgcgctgggtgcccgcgcggggctggcttcgcggagagtttgggggccgctatggcctcttccccgagcgcctggtgcaggagatcccagagaccctgcggggctccggagaggcgcggaggccgcgctgtgcgcgccgccgaggtcatcctgccaaacacccgaggccccaaagatggtgcaaagtgaacttcagctacagcccagagcaggcggacgagctgaagctgcaagctggggagatcgtggaaatgataaaggagattgaggacggctggtggctggggaagaagaacgggcagctgggagccttcccatccaactttgtggaattgctggacagtgggcccccaagccttggtaacccagacatgccttcagtcagccctggtccccagcggcctcccaagctgagcagcctggcctatgacagccctccagactacctgcagacagtctcccaccctgaggtctacagggtcctgtttgactaccagcctgaggccccagacgagttggcgctgcggaggggggacgtggtaaaagtactcagcaagaccacagaggataagggctggtgggaaggagagtgtcaaggacgaagaggagtttttccagacaactttgtactcccaccacccccaatcaagaagctggtcccacggaaagtggtatctcgggaatcagctcctattaaggaaccaaaaaagttgatgcccaaaacatccctccccacagtcaagaagctagcaacagccaccactgggcccagcaaagccaagacatctcggacacccagcagggacagtcagaagctcacctcccgagactcaggccccaatggtggcttccaaagtgggggttcgtatcaccctggccgaaagcgatccaaaacccagactccccagcaacgctctgtgtccagtcaggaggaagagcacagcagcccggtaaaggccccctctgtgaagagaacccccatgccggacaagactgccaccccagagaggcccccagctccagagaacgcccccagctccaagaagatcccg

SEQ ID NO: 181082 - DNA, 2519 bp, Homo sapiens
  Payload ID: 15661
  Gene Symbol: SH3D21
  Gene Name: SH3 domain containing 21
  Uniprot ID: A4FU49
  ENST ID: ENST00000453908
  CDS Start-End: 29-2299
ccaggctctggagggcgccccggaaaccatggaagtcctcgtcctggccggataccgcgcgcagaaggaggacgagctgagtctggcgcccggggacgtggtccggcaggtgcgctgggtgcccgcgcggggctggcttcgcggagagtttgggggccgctatggcctcttccccgagcgcctggtgcaggagatcccagagaccctgcggggctccggagaggcgcggaggccgcgctgtgcgcgccgccgaggtcatcctgccaaacacccgaggccccaaagatggtgcaaagtgaacttcagctacagcccagagcaggcggacgagctgaagctgcaagctggggagatcgtggaaatgataaaggagattgaggacggctggtggctggggaagaagaacgggcagctgggagccttcccatccaactttgtggaattgctggacagtgggcccccaagccttggtaacccagacatgccttcagtcagccctggtccccagcggcctcccaagctgagcagcctggcctatgacagccctccagactacctgcagacagtctcccaccctgaggtctacagggtcctgtttgactaccagcctgaggccccagacgagttggcgctgcggaggggggacgtggtaaaagtactcagcaagaccacagaggataagggctggtgggaaggagagtgtcaaggacgaagaggagtttttccagacaactttgtactcccaccacccccaatcaagaagctggtcccacggaaagtggtatctcgggaatcagctcctattaaggaaccaaaaaagttgatgcccaaaacatccctccccacagtcaagaagctagcaacagccaccactgggcccagcaaagccaagacatctcggacacccagcagggacagtcagaagctcacctcccgagactcaggccccaatggtggcttccaaagtgggggttcgtatcaccctggccgaaagcgatccaaaacccagactccccagcaacgctctgtgtccagtcaggaggaagagcacagcagcccggtaaaggccccctctgtgaagagaacccccatgccggacaagactgccaccccagagaggcccccagctccagagaacgcccccagctccaagaagatcccggctcctgacaaagtcccctccccagagaagaccctcactctaggggacaaggcctctatcccagggaactccacctcggggaagatcccagctcctgacaaagtccccaccccagagaagatggtgactccggaggacaaggcttctatcccagagaactccatcatcccagaggagaccctgactgtggacaaaccctccactccagagagggtcttttcagtggaagagtcccctgccctagaagccccacctatggataaagtccctaatccaaagatggcccctctgggggatgaggcccccactctagaaaaggtcttgaccccagagctttctgaagaagaggtgtccaccagagatgacattcaattccatcacttctcttcggaggaagccctgcagaaggtcaagtactttgtagccaaagaggatccatcatcccaggaggaggcccacacgccagaggcacccccaccccagcctccttcctcagagaggtgcctgggagagatgaaatgtaccctagttagaggggacagctccccacgccaggctgagttgaagtctgggccagcatccaggcctgcccttgagaagccccacccccacgaagaggctacaacccttccagaggaggcaccttccaatgacgagaggacccctgaagaggaggcgccccccaacgagcagaggcctctgagagaggaggtgctccccaaagagggagtggcttccaaagaggaggtgaccctgaaagaggaattgccccctaaagaggaagtggctccaaaagaggaggtgccccccatagaaagagcctttgcccaaaaaacacgtcctatcaagccgcctccagactcccaagagacgctcgcgctcccctcgctggtcccgcaaaactacacggaaaacaagaatgaaggagttgatgtaacgtcgctgaggggcgaggtggagtctctaaggagggcgctggagctgatggaggtgcagctggagaggaagctgaccgacatctgggaggagctgaagagcgagaaggagcagcgccggcggctggaggtccaggtgatgcaggggacccagaagtcccagaccccgcgcgtcatccacacgcagacgcagacctactgagggtgggcctgggaagggaccgcggcctgacctggctggggccacccacgtccttgcacacgactttgggaaacgcgagaaagtaaactctgcctagcacggcgccacgccggtctggtcgctgggggcggggcctgcgcgggggcagggcctgggcctccgcattcctgacggtccctcccaggcacatctggccaacatgtggctcccattaccgttc

SEQ ID NO: 181083 - DNA, 2206 bp, Homo sapiens
  Payload ID: 15661
  Gene Symbol: SH3D21
  Gene Name: SH3 domain containing 21
  Uniprot ID: A4FU49
  ENST ID: ENST00000505871
  CDS Start-End: 165-2102
ccagctcctctgactggggcgtccgactggagctcagccgcgcttgtccggtgctaggtcatcctgccaaacacccgaggccccaaagatggtgcaaagtgaacttcagctacagcccagagcaggcggacgagctgaagctgcaagctggggagatcgtggaaatgataaaggagattgaggacggctggtggctggggaagaagaacgggcagctgggagccttcccatccaactttgtggaattgctggacagtgggcccccaagccttggtaacccagacatgccttcagtcagccctggtccccagcggcctcccaagctgagcagcctggcctatgacagccctccagactacctgcagacagtctcccaccctgaggtctacagggtcctgtttgactaccagcctgaggccccagacgagttggcgctgcggaggggggacgtggtaaaagtactcagcaagaccacagaggataagggctggtgggaaggagagtgtcaaggacgaagaggagtttttccagacaactttgtactcccaccacccccaatcaagaagctggtcccacggaaagtggtatctcgggaatcagctcctattaaggaaccaaaaaagttgatgcccaaaacatccctccccacagtcaagaagctagcaacagccaccactgggcccagcaaagccaagacatctcggacacccagcagggacagtcagaagctcacctcccgagactcaggccccaatggtggcttccaaagtgggggttcgtatcaccctggccgaaagcgatccaaaacccagactccccagcaacgctctgtgtccagtcaggaggaagagcacagcagcccggtaaaggccccctctgtgaagagaacccccatgccggacaagactgccaccccagagaggcccccagctccagagaacgcccccagctccaagaagatcccggctcctgacaaagtcccctccccagagaagaccctcactctaggggacaaggcctctatcccagggaactccacctcggggaagatcccagctcctgacaaagtccccaccccagagaagatggtgactccggaggacaaggcttctatcccagagaactccatcatcccagaggagaccctgactgtggacaaaccctccactccagagagggtcttttcagtggaagagtcccctgccctagaagccccacctatggataaagtccctaatccaaagatggcccctctgggggatgaggcccccactctagaaaaggtcttgaccccagagctttctgaagaagaggtgtccaccagagatgacattcaattccatcacttctcttcggaggaagccctgcagaaggtcaagtactttgtagccaaagaggatccatcatcccaggaggaggcccacacgccagaggcacccccaccccagcctccttcctcagagaggtgcctgggagagatgaaatgtaccctagttagaggggacagctccccacgccaggctgagttgaagtctgggccagcatccaggcctgcccttgagaagccccacccccacgaagaggctacaacccttccagaggaggcaccttccaatgacgagaggacccctgaagaggaggcgccccccaacgagcagaggcctctgagagaggaggtgctccccaaagagggagtggcttccaaagaggaggtgaccctgaaagaggaattgccccctaaagaggaagtggctccaaaagaggaggtgccccccatagaaagagcctttgcccaaaaaacacgtcctatcaagccgcctccagactcccaagagacgctcgcgctcccctcgctggtcccgcaaaactacacggaaaacaagaatgaaggagttgatgtaacgtcgctgaggggcgaggtggagtctctaaggagggcgctggagctgatggaggtgcagctggagaggaagctgaccgacatctgggaggagctgaagagcgagaaggagcagcgccggcggctggaggtccaggtgatgcaggggacccagaagtcccagaccccgcgcgtcatccacacgcagacgcagacctactgagggtgggcctgggaagggaccgcggcctgacctggctggggccacccacgtccttgcacacgactttgggaaacgcgagaaagtaaactctgcctagcacggcg

SEQ ID NO: 181084 - DNA, 3182 bp, Homo sapiens
  Payload ID: 15661
  Gene Symbol: SH3D21
  Gene Name: SH3 domain containing 21
  ENST ID: ENST00000480549
  CDS Start-End: 158-565
ctctgactggggcgtccgactggagctcagccgcgcttgtccggtgctaggtcatcctgccaaacacccgaggccccaaagatggtgcaaagtgaacttcagctacagcccagagcaggcggacgagctgaagctgcaagctggggagatcgtggaaatgataaaggagattgaggacggctggtggctggggaagaagaacgggcagctgggagccttcccatccaactttgtggaattgctggacagtgggcccccaagccttggtaacccagacatgccttcagtcagccctggtccccagcggcctcccaagaccacagaggataagggctggtgggaaggagagtgtcaaggacgaagaggagtttttccagacaactttgtactcccaccacccccaatcaagaagctggtcccacggaaagtggtatctcgggaatcagctcctattaaggaaccaaaaaagttgatgcccaaaacatccctccccacagtcaagaagctagcaacagccaccactgggcccagcaaagccaagaggaagagcacagcagcccggtaaaggccccctctgtgaagagaacccccatgccggacaagactgccaccccagagaggcccccagctccagagaacgcccccagctccaagaagatcccggctcctgacaaagtcccctccccagagaagaccctcactctaggggacaaggcctctatcccagggaactccacctcggggaagatcccagctcctgacaaagtccccaccccagagaagatggtgactccggaggacaaggcttctatcccagagaactccatcatcccagaggagaccctgactgtggacaaaccctccactccagagagggtcttttcagtggaagagtcccctgccctagaagccccacctatggataaagtccctaatccaaagatggcccctctgggggatgaggcccccactctagaaaaggtcttgaccccagagctttctgaagaagaggtgtccaccagagatgacattcaattccatcacttctcttcggaggaagccctgcagaaggtcaagtactttgtagccaaagaggatccatcatcccaggaggaggcccacacgccagaggcacccccaccccagcctccttcctcagagaggtgcctgggagagatgaaatgtaccctagttagaggggacagctccccacgccaggctgagttgaagtctgggccagcatccaggcctgcccttgagaagccccacccccacgaagaggctacaacccttccagaggaggcaccttccaatgacgagaggacccctgaagaggaggcgccccccaacgagcagaggcctctgagagaggaggtgctccccaaagagggagtggcttccaaagaggaggtgaccctgaaagaggaattgccccctaaagaggaagtggctccaaaagaggaggtgccccccatagaaagagcctttgcccaaaaaacacgtcctatcaagccgcctccagactcccaagagacgctcgcgctcccctcgctggtcccgcaaaactacacggaaaacaagaatgaaggagttgatgtaacgtcgctgaggggcgaggtggagtctctaaggagggcgctggagctgatggaggtgcagctggagaggaagctgaccgacatctgggaggagctgaagagcgagaaggagcagcgccggcggctggaggtccaggtgatgcaggggacccagaagtcccagaccccgcgcgtcatccacacgcagacgcagacctactgagggtgggcctgggaagggaccgcggcctgacctggctggggccacccacgtccttgcacacgactttgggaaacgcgagaaatgtatgaacccagggcactgtggggacagggcgacgtgtgtccaggcgtttgccggtccggctgcccggtgcgccagatctcccgcaggatccgttcgcgctcctccagccgctgcgcccgctccagctcctccgccgacgtgaagacgttgacgttgaggggcccgtccggctctgcggacagctcggggcccggcagcgtgtcgtcggggcccagccgagtcaccgtgtcctcctcgtcctcgtcgtcgtcctcgggctccagggtgctgctgcgggggtcccggcgctgagccgggccccggggccgcgggcggggcgcccacgagatgctgatgacgagcaggcagaggatcaaataaacggagtcttggagagattgaattgactttaccaaaaccgtcaggatttgaatctgctgctctctgatcctaaagcctgagctagaaaccaccgctccccctcctaggaggccccttccaggcaaagctgcttctcttccccagacccatgctggactggaagggaggggactgtccacccctccttccagggcccaggcttgaatgtgtcccctggccgagctctggtctagtcacgcagggttaatgattgttggactccagctttgagccagggcccggccagcagtctcgcagaccccagcgtggggcctctgtgcctgcgagctcctgcgctcttgtgcaccaagcagcttgtggcggcttgtggcagatcccaccccatcccgtcccccaccccaaggctaaacctgcctgtgctcacacacgcatttcccacctgggcttgtgcatgcaatgtggtgtgtgatcagtgtgtgtggcggggggcttccttctgccctgtctccacggggcccccccatcatggacctcccctcccttgctggagctagaatgagggggaggccgccttggcgggagccttagagaggaggaggaaagggggagaggaaattgcagacatagctgaaggcgctgcctgaggcctgtgggccagcgaccctctccctgtccgggctgcagacccctactcccccagtcccgagactgggttcaagtagagggcagatctagatgggggaggactaggactgactcctatggggatggaaaagggactcctgggtgtctttgtgactgtttagtgtgttctgtgaatgtgcgggcaggtatttttgcccacatctgtatatttgtctattaatgtgatgtatttgagtattgttgtgggggcgggtatgtctgtatataaatctgtgcagccactagtcaacaaa

SEQ ID NO: 181085 - DNA, 5272 bp, Homo sapiens
  Payload ID: 15662
  Gene Symbol: SH3RF1
  Gene Name: SH3 domain containing ring finger 1
  Uniprot ID: Q7Z6J0
  ENST ID: ENST00000284637
  CDS Start-End: 343-3009
cgccccgggcgccggctgcgtcccggcctcctcctcctcttcctccgccctccttggctgggaaagtgggaggcggcggcggcggcgtggtgtgtgtgcgcgcgtgaggggggcagcagagaggagtctcccggtgccgccgcggcgtcagagacactgcgagcggcgagcgcggtggggccgcatctgcatcagccgccgcagccgctgcggggccgcgaacaaagaggaggagccgaggcgcgagagcaaagtctgaaatggatgttacatgagtcattttaagggatgcacacaactatgaacatttctgaagattttttctcagtaaagtagataaagatggatgaatcagccttgttggatcttttggagtgtccggtgtgtctagagcgccttgatgcttctgcgaaggtcttgccttgccagcatacgttttgcaagcgatgtttgctggggatcgtaggttctcgaaatgaactcagatgtcccgagtgcaggactcttgttggctcgggtgtcgaggagcttcccagtaacatcttgctggtcagacttctggatggcatcaaacagaggccttggaaacctggtcctggtgggggaagtgggaccaactgcacaaatgcattaaggtctcagagcagcactgtggctaattgtagctcaaaagatctgcagagctcccagggcggacagcagcctcgggtgcaatcctggagccccccagtgaggggtatacctcagttaccatgtgccaaagcattatacaactatgaaggaaaagagcctggagaccttaaattcagcaaaggtgacatcatcattttgcgaagacaagtggatgaaaattggtaccatggggaagtcaatggaatccatggctttttccccaccaactttgtgcagattattaaaccgttacctcagcccccacctcagtgcaaagcactttatgactttgaagtgaaagacaaggaagcagacaaagattgccttccatttgcaaaggatgatgttctgactgtgatccgaagagtggatgaaaactgggctgaaggaatgctggcagacaaaataggaatatttccaatttcatatgttgagtttaactcggctgctaagcagctgatagaatgggataagcctcctgtgccaggagttgatgctggagaatgttcctcggcagcagcccagagcagcactgccccaaagcactccgacaccaagaagaacaccaaaaagcggcactccttcacttccctcactatggccaacaagtcctcccaggcatcccagaaccgccactccatggagatcagcccccctgtcctcatcagctccagcaaccccactgctgctgcacggatcagcgagctgtctgggctctcctgcagtgccccttctcaggttcatataagtaccaccgggttaattgtgaccccgcccccaagcagcccagtgacaactggcccctcgtttactttcccatcagatgttccctaccaagctgcccttggaactttgaatcctcctcttccaccaccccctctcctggctgccactgtccttgcctccacaccaccaggcgccaccgccgctgctgctgctgctggaatgggaccgaggcccatggcaggatccactgaccagattgcacatttacggccgcagactcgccccagtgtgtatgttgctatatatccatacactcctcggaaagaggatgaactagagctgagaaaaggggagatgtttttagtgtttgagcgctgccaggatggctggttcaaagggacatccatgcataccagcaagataggggttttccctggcaattatgtggcaccagtcacaagggcggtgacaaatgcttcccaagctaaagtccctatgtctacagctggccagacaagtcggggagtgaccatggtcagtccttccacggcaggagggcctgcccagaagctccagggaaatggcgtggctgggagtcccagtgttgtccccgcagctgtggtatcagcagctcacatccagacaagtcctcaggctaaggtcttgttgcacatgacggggcaaatgacagtcaaccaggcccgcaatgctgtgaggacagttgcagcgcacaaccaggaacgccccacggcagcagtgacacccatccaggtacagaatgccgccggcctcagccctgcatctgtgggcctgtcccatcactcgctggcctccccacaacctgcgcctctgatgccaggctcagccacgcacactgctgccatcagtatcagtcgagccagtgcccctctggcctgtgcagcagctgctccactgacttccccaagcatcaccagtgcttctctggaggctgagcccagtggccggatagtgaccgttctccctggactccccacatctcctgacagtgcttcatcagcttgtgggaacagttcagcaaccaaaccagacaaggatagcaaaaaagaaaaaaagggtttgttgaagttgctttctggcgcctccactaaacggaagccccgcgtgtctcctccagcatcgcccaccctagaagtggagctgggcagtgcagagcttcctctccagggagcggtggggcccgaactgccaccaggaggtggccatggcagggcaggctcctgccctgtggacggggacggaccggtcacgactgcagtggcaggagcagccctggcccaggatgcttttcataggaaggcaagttccctggactccgcagttcccatcgctccacctcctcgccaggcctgttcctccctgggtcctgtcttgaatgagtctagacctgtcgtttgtgaaaggcacagggtggtggtttcctatcctcctcagagtgaggcagaacttgaacttaaagaaggagatattgtgtttgttcataaaaaacgagaggatggctggttcaaaggcacattacaacgtaatgggaaaactggccttttcccaggaagctttgtggaaaacatatgaggagactgacactgaagaagcttaaaatcacttcacacaacaaagtagcacaaagcagtttaacagaaagagcacatttgtggacttccagatggtcaggagatgagcaaaggattggtatgtgactctgatgccccagcacagttaccccagcgagcagaatgaagaagatgtttgtgtgggttttgttagtctggattcggatgtataaggtgtgccttgtactgtctgatttactacacagagaaacttttttttttttttaagatatatgactaaaatggacaattgtttacaaggcttaactaatttatttgcttttttaaacttgaacttttcgtataatagatacgttctttggattatgattttaagaaattattaatttatgaaatgataggtaaggagaagctggattatctcctgttgagagcaagagattcgttttgacatagagtgaatgcattttcccctctcctcctccctgctaccattatattttggggttatgttttgcttctttaagatagaaatcccagttctctaatttggttttcttctttgggaaaccaaacatacaaatgaatcagtatcaattagggcctggggtagagagacagaaacttgagagaagagaagttagtgattccctctctttctagtttggtaggaatcaccctgaagacctagtcctcaatttaattgtgtgggtttttaattttcctagaatgaagtgactgaaacaatgagaaagaatacagcacaacccttgaacaaaatgtatttagaaatatatttagttttatagcagaagcagctcaattgtttggttggaaagtaggggaaattgaagttgtagtcactgtctgagaatggctatgaagcgtcatttcacattttaccccaactgacctgcatgcccaggacacaagtaaaacatttgtgagatagtggtggtaagtgatgcactcgtgttaagtcaaaggctataagaaacactgtgaaaagttcatattcatccattgtgattctttccccacgtcttgcatgtattactggattcccacagtaatatagactgtgcatggtgtgtatatttcattgcgatttcctgttaagatgagtttgtactcagaattgaccaattcaggaggtgtaaaaataaacagtgttctcttctctaccccaaagccactactgaccaaggtctcttcagtgcactcgctccctctctggctaaggcatgcattagccactacacaagtcattagtgaaagtggtcttttatgtcctcccagcagacagacatcaaggatgagttaaccaggagactactcctgtgactgtggagctctggaaggcttggtgggagtgaatttgcccacaccttacaattgtggcaggatccagaagagcctgtctttttatatccattccttgatgtcattggcctctcccaccgatttcattacggtgccacgcagtcatggatctgggtagtccggaaaacaaaaggagggaagacagcctggtaatgaataagatccttaccacagttttctcatgggaaatacataataaaccctttcatctttttttttttcctttaagaattaaaactgggaaatagaaacatgaactgaaaagtcttgcaatgacaagaggtttcatggtcttaaaaagatactttatgtggttgaagatgaaatcattcctaaattaaccttttttttaaaaaaaaacaatgtatattatgttcctgtgtgttgaatttaaaaaaaaaatactttacttggatattcatgtaatatataaaggtttggtgaaatgaactttagttaggaaaaagctggcatcagctttcatctgtgtaagttgacaccaatgtgtcataatattctttattttgggaaattagtgtattttataaaaattttaaaaagaaaaaagactactacaggttaagataatttttttacctgtcttttctccatattttaagctatgtgattgaagtacctctgttcatagtttcctggtataaagttggttaaaatttcatctgttaatagatcattaggtaatataatgtatgggttttctattggttttttgcagacagtagagggagattttgtaacaagggcttgttacacagtgatatggtaatgataaaattgcgatttatcactccttttcatgttaataatttgaggactggataaaaggtttcaagattaaaatttgatgttcaaacctttgt

SEQ ID NO: 181086 - DNA, 591 bp, Homo sapiens
  Payload ID: 15662
  Gene Symbol: SH3RF1
  Gene Name: SH3 domain containing ring finger 1
  ENST ID: ENST00000510806
  CDS Start-End: 355-591
cagagtttatcaactactgccctgaagggcgcttttctgttttagctgctttcaagcaaatctgtgtcttttagaattgtcaaccttcagctctttttggttgggcaaaattaaacagttctatttttaataacagcgaagaaacatatgtatttaatattgggatcatttaccacgagcgattacatgaggcatggtttcttaaacgctaaagtggcttaaaaaagggaatttagttggatataaaagtaaatttcagagcaaagtctgaaatggatgttacatgagtcattttaagggatgcacacaactatgaacatttctgaagattttttctcagtaaagtagataaagatggatgaatcagccttgttggatcttttggagtgtccggtgtgtctagagcgccttgatgcttctgcgaaggtcttgccttgccagcatacgttttgcaagcgatgtttgctggggatcgtaggttctcgaaatgaactcagatgtcccgagtgcaggactcttgttggctcgggtgtcgaggagcttcccagtaacatcttgctggtcagacttctggatggcatcaaacagagg

SEQ ID NO: 181087 - DNA, 1657 bp, Homo sapiens
  Payload ID: 15662
  Gene Symbol: SH3RF1
  Gene Name: SH3 domain containing ring finger 1
  ENST ID: ENST00000511421
  CDS Start-End: 1-911
ccaaagcattatacaactatgaaggaaaagagcctggagaccttaaattcagcaaaggtgacatcatcattttgcgaagacaagtggatgaaaattggtaccatggggaagtcaatggaatccatggctttttccccaccaactttgtgcagattattaaaccgttacctcagcccccacctcagtgcaaagcactttatgactttgaagtgaaagacaaggaagcagacaaagattgccttccatttgcaaaggatgatgttctgactgtgatccgaagagtggatgaaaactgggctgaaggaatgctggcagacaaaataggaatatttccaatttcatatgttgagtttaactcggctgctaagcagctgatagaatgggataagcctcctgtgccaggagttgatgctggagaatgttcctcggcagcagcccagagcagcactgccccaaagcactccgacaccaagaagaacaccaaaaagcggcactccttcacttccctcactatggccaacaagtcctcccaggcatcccagaaccgccactccatggagatcagcccccctgtcctcatcagctccagcaaccccactgctgctgcacggatcagcgagctgtctgggctctcctgcagtgccccttctcaggttcatataagtaccaccgggttaattgtgaccccgcccccaagcagcccagtgacaactggcccctcgtttactttcccatcagatgttccctaccaagctgcccttggagcgccaccgccgctgctgctgctgctggaatgggaccgaggcccatggcaggatccactgaccagattgcacatttacggccgcagactcgccccagtgtgtatgttgctatatatccatacactcctcggaaagaggatgaactagagctgagaaaaggggagatgtttttagtgtttgagcgctgccaggatggctggttcaaagggacatccatgcataccagcaagataggggttttccctggcaattatgtggcaccagtcacaagggcggtgacaaatgcttcccaagctaaagtccctatgtctacagctggccagacaagtcggggagtgaccatggtcagtccttccacggcaggagggcctgcccagaagctccagggaaatggcgtggctgggagtcccagtgttgtccccgcagctgtggtatcagcagctcacatccagacaagtcctcaggctaaggtcttgttgcacatgacggggcaaatgacagtcaaccaggcccgcaatgctgtgaggacagttgcagcgcacaaccaggaacgccccacggcagcagtgacacccatccaggtacagaatgccgccggcctcagccctgcatctgtgggcctgtcccatcactcgctggcctccccacaacctgcgcctctgatgccaggctcagccacgcacactgctgccatcagtatcagtcgagccagtgcccctctggcctgtgcagcagctgctccactgacttccccaagcatcaccagtgcttctctggaggctgagcccagtggccggatagtgaccgttctccctggactccccacatctcctgacagtgcttcatcagcttgtgggaacagttcagcaaccaaaccagacaaggatagcaaa

SEQ ID NO: 181088 - DNA, 487 bp, Homo sapiens
  Payload ID: 15662
  Gene Symbol: SH3RF1
  Gene Name: SH3 domain containing ring finger 1
  ENST ID: ENST00000502315
  CDS Start-End: 189-487
gcggccggcgcggggtcgacggggacccagcgtcggcggacccctagccgcggagaaggcggtggtctcgacattcccccatccccgccctggagcaaagtctgaaatggatgttacatgagtcattttaagggatgcacacaactatgaacatttctgaagattttttctcagtaaagtagataaagatggatgaatcagccttgttggatcttttggagtgtccggtgtgtctagagcgccttgatgcttctgcgaaggtcttgccttgccagcatacgttttgcaagcgatgtttgctggggatcgtaggttctcgaaatgaactcagatgtcccgagtgcaggactcttgttggctcgggtgtcgaggagcttcccagtaacatcttgctggtcagacttctggatggcatcaaacagaggccttggaaacctggtcctggtgggggaagtgggaccaactgcacaaatgcattaaggtctca

SEQ ID NO: 181089 - DNA, 3027 bp, Homo sapiens
  Payload ID: 15663
  Gene Symbol: SH3RF2
  Gene Name: SH3 domain containing ring finger 2
  Uniprot ID: Q8TEC5
  ENST ID: ENST00000359120
  CDS Start-End: 223-2412
aaagcggttggcagcagcggcgcttggaggaaaggaagccggttggagggcgcagcgcacccctgctgcgcggaggagggggctgagctgaactcagcagaagttacatgcacaaggcaaaaattctgacgttctcaagagaccagctctgcccccgtggctcaactgaccctaccatgtggacgctgctcctccaggtgggaactggagttttgaaataaaatggatgatttgacgttacttgatcttctggagtgccctgtgtgctttgagaagctcgatgtcacagccaaagtcctcccttgccagcacaccttctgcaaaccatgtctacagagggttttcaaggcccacaaagagctgcggtgccccgaatgcaggacgcctgtgttttccaacattgaggcgctgccggccaacctgctgctcgtgcgccttctggatggagtgcgctcagggcagagctccgggagagggggctccttccgcaggcctggcacgatgaccttgcaggatggcaggaaaagcaggaccaaccccagacgtctgcaggccagtcctttccggctagtgcctaatgtcagaatccacatggatggggtgcctcgagcaaaggccttatgcaactacagagggcagaatcccggtgacctaaggtttaataagggagatatcatccttctccggagacagcttgatgagaattggtaccagggggaaatcaatggcatcagcgggaacttcccagccagctccgtggaagtcatcaagcagctgccccagccgcccccgctctgcagggccctctacaacttcgacctacgaggcaaggacaagagtgagaaccaggattgcctgaccttcctcaaggacgatatcatcactgtgatcagccgagtggatgagaactgggcagaaggcaagttaggagataaagtaggcatcttccctatcttgtttgtagagccaaacctcaccgcaagacaccttttagagaagaacaaaggtcgccagtcatcccgcacaaaaaacctgtccctggtgtcctcgtcctccagaggcaacacgtctaccctccgtaggggcccagggtccaggaggaaggtgcctgggcagttttccatcacaacagccttgaacactctcaaccggatggtccattctccttcagggcgccatatggtagagatcagcaccccagtgctcatcagctccagcaacccctctgtgatcacccagcccatggagaaagcagacgttccttccagctgtgtgggacaggtcagcacttatcaccccgcacctgtctctccaggacattccacagccgtggtcagtctgcctggctcccagcaacacctctcagcgaacatgtttgtagccctgcactcctactcagcccatggacccgatgagctggacctgcaaaagggagaaggcgtcagggtcctggggaagtgccaggacggctggctcaggggcgtctccttggtcaccgggcgagtcggcatcttcccaaacaattacgtcatccccattttcagaaagacctctagttttccagactcccggagccctggtctctacaccacatggacgttatccacctcctctgtgtcctcccaaggcagcatttcagaaggtgatccacggcaaagccgtcccttcaaatccgtctttgtgcccactgccatagtcaaccccgtgagaagcacagccggccctgggactttaggacaagggtctcttcggaaagggcggagcagcatgagaaagaatggatccctgcagagacccctccagtccgggatccccactctcgtggtaggctccctcagacgcagccccaccatggtccttcggcctcagcagttccaattctaccagccacaggggatcccctcctccccctcagccgtggtggtggagatggggtccaagcctgccctcacgggggagcccgccctcacgtgcatcagcaggggcagtgaggcctggatccactccgcggccagctccctcattatggaagacaaagaaatccccatcaagagtgagcctctgccaaaaccgcccgcatctgccccaccatccatcctggtgaaaccagaaaactcaagaaatggcatcgaaaagcaagtcaaaaccgtgagatttcagaattacagccctcctcccaccaaacattacacctcccatcccacctccggaaagcctgaacagccagccaccctcaaggcgtcccagcctgaagcagcgtccttgggcccagagatgaccgtcctatttgcccaccgaagtggctgccactccggacagcagacagacctccggagaaagtcagctcttggcaaggccacaaccctggtgtccactgcctcaggcacgcagaccgtgtttcccagcaaatgaacctacgggtggcttttcctagaccccaaagaggtgaattgcatttaaatacagtctgcctccactgagggcatcctgccattctttggggacttgagcatgggtccttgttcttcctatttcacctccaggaaagcaaaagtgggagcagaaattcctgccctgggtgggaggatagatggcgtggccttccaaacatacaaacataatgatttgatgccacaaagctcgcttactcagaccaaggagtgaaaaattgtcgtgcccactttatgccccagcatggagtatgtggcctcttgtcatccccgtgttactgtgtagaatttctatggtgtcctaaagggggctgcagcaggggtgtgacaacggtgggattgttggcgttgcttctttgaccttacaatatcctcaacaagcattagaacaacttctgccatcttctggggcctgtacactggccactagtagctgccatatctttttccctctgtaaagtcataatcctggctgcaaagggaggatttctgcgcggggtgtgaggtggatactttgaacattctgagaacccaataaaactagaaggagccagcttcctgagtatgctccacttaa

SEQ ID NO: 181090 - DNA, 5607 bp, Homo sapiens
  Payload ID: 15663
  Gene Symbol: SH3RF2
  Gene Name: SH3 domain containing ring finger 2
  Uniprot ID: Q8TEC5
  ENST ID: ENST00000511217
  CDS Start-End: 53-2242
cctaccatgtggacgctgctcctccaggtgggaactggagttttgaaataaaatggatgatttgacgttacttgatcttctggagtgccctgtgtgctttgagaagctcgatgtcacagccaaagtcctcccttgccagcacaccttctgcaaaccatgtctacagagggttttcaaggcccacaaagagctgcggtgccccgaatgcaggacgcctgtgttttccaacattgaggcgctgccggccaacctgctgctcgtgcgccttctggatggagtgcgctcagggcagagctccgggagagggggctccttccgcaggcctggcacgatgaccttgcaggatggcaggaaaagcaggaccaaccccagacgtctgcaggccagtcctttccggctagtgcctaatgtcagaatccacatggatggggtgcctcgagcaaaggccttatgcaactacagagggcagaatcccggtgacctaaggtttaataagggagatatcatccttctccggagacagcttgatgagaattggtaccagggggaaatcaatggcatcagcgggaacttcccagccagctccgtggaagtcatcaagcagctgccccagccgcccccgctctgcagggccctctacaacttcgacctacgaggcaaggacaagagtgagaaccaggattgcctgaccttcctcaaggacgatatcatcactgtgatcagccgagtggatgagaactgggcagaaggcaagttaggagataaagtaggcatcttccctatcttgtttgtagagccaaacctcaccgcaagacaccttttagagaagaacaaaggtcgccagtcatcccgcacaaaaaacctgtccctggtgtcctcgtcctccagaggcaacacgtctaccctccgtaggggcccagggtccaggaggaaggtgcctgggcagttttccatcacaacagccttgaacactctcaaccggatggtccattctccttcagggcgccatatggtagagatcagcaccccagtgctcatcagctccagcaacccctctgtgatcacccagcccatggagaaagcagacgttccttccagctgtgtgggacaggtcagcacttatcaccccgcacctgtctctccaggacattccacagccgtggtcagtctgcctggctcccagcaacacctctcagcgaacatgtttgtagccctgcactcctactcagcccatggacccgatgagctggacctgcaaaagggagaaggcgtcagggtcctggggaagtgccaggacggctggctcaggggcgtctccttggtcaccgggcgagtcggcatcttcccaaacaattacgtcatccccattttcagaaagacctctagttttccagactcccggagccctggtctctacaccacatggacgttatccacctcctctgtgtcctcccaaggcagcatttcagaaggtgatccacggcaaagccgtcccttcaaatccgtctttgtgcccactgccatagtcaaccccgtgagaagcacagccggccctgggactttaggacaagggtctcttcggaaagggcggagcagcatgagaaagaatggatccctgcagagacccctccagtccgggatccccactctcgtggtaggctccctcagacgcagccccaccatggtccttcggcctcagcagttccaattctaccagccacaggggatcccctcctccccctcagccgtggtggtggagatggggtccaagcctgccctcacgggggagcccgccctcacgtgcatcagcaggggcagtgaggcctggatccactccgcggccagctccctcattatggaagacaaagaaatccccatcaagagtgagcctctgccaaaaccgcccgcatctgccccaccatccatcctggtgaaaccagaaaactcaagaaatggcatcgaaaagcaagtcaaaaccgtgagatttcagaattacagccctcctcccaccaaacattacacctcccatcccacctccggaaagcctgaacagccagccaccctcaaggcgtcccagcctgaagcagcgtccttgggcccagagatgaccgtcctatttgcccaccgaagtggctgccactccggacagcagacagacctccggagaaagtcagctcttggcaaggccacaaccctggtgtccactgcctcaggcacgcagaccgtgtttcccagcaaatgaacctacgggtggcttttcctagaccccaaagagagcctgccttggtcatcttcccaggaggaattcatgacaactgggatgcagaagagagcaaatgatctgctgggatggaaactgctcaatggagagtttgtggactgcatgatattccttgaacatcagggatggtacagggataccaatagtctggcctccaagacaggagagtaataggaggaagagcaaatctgtcttcacctgcagtattaatgggtggtgggccagaatggaggaaagcaagtgagtcatgtgctgctacaggttacaccaaactcccatccctctgttactcactgctgttgtcaaagccaaactttatcttgctaatttctcacagcttggcacctaacaaatgacaaggcaggacatccaatgccttcgagctctgtggtctggcctgtctctccagatcagatttagagtgaggtagcagatgacataatattctctttggtgttcaatccgaagaggccaatgcttcagcacaatgtcccctagccatcacccccagcccgactccccaccaagcatcctgcatccctctgccacatcttcattcttttccattctgtcttttccccgataccttctgaccccagggatttctaatagagcataatgatcaagaaaataaagacctggtacataaagagtctcagaaaaaaaatccatgatgttatatgaaagataccaaactgcaatgcttacaaagaggctatttcaagtagaaagatataaatatcacttataaccatgcatcctttatgttcataaataagtcatcataaagaacaagccattagaagacattctaatccttgtttttaaaaaaaagactataatctaagatacaattctaaaattactgtgctaacctgcaagagacattgctcacataaatgaaattcatatataccgtgatgttatttgaaccatatattttcatcttctcctcctctcttaagacatcaataagaatttgatttttaaaggcacatgctgctctgattatcaaagacaataacacaaatgcagcatcactgggatatgtcggttgttttaaagttcagatcctaattttactgaggaagcatcctcagtttttcatccagccctgcttgtaaacaggatccagcatcagccagaccatgagcagagtaaggattgcatctggaggttacagaaatgttttcttctatgtgaagctatcacatgcaggggttaaacaggcagccatcttttaatgcgatgaataatttggacttcttagccacacccttgtctcggttaaccacaggaggaggtgacaatacaccacaagaagccccagagttctggctttatctgccaagtggtaggtgagaagggaagaggtgggattgagcacactggctatttataccttgtcttcaaagccctcttagtcacatttccatcttcatgcattggcttctgccttacaattgagcaataggaaaccaccactcctaatttttgcacgtgctgctttttaagtctctgggaactttccatgaggtatagtggagggtttcataaggatttagctcttccttcgaacctgcttggccgataaaccagatatttttttaaaacacagcatacagattccaaatgatcaaggatcaaaaagtgttggggatgtcaggaaggatgcaaggatgggcttgaatgatcacaatgagtcaacccagaaatgtgcagtagaatagtttgctaatggtgacatctgagttgcatctcccggaaatattgtttcttattattacactttgggtcgggggaaggggtgttaagggtaaaaagaggaaggagcaaatagataaagagaaaaattcatgcctccaggaaacataagcagaaaaactatagacttgtgtctctgcttatttttttaagtacagtgtttttaatagaccaaagagaatctctatgagttaatatgtatgtgaataatgtttataaaaggggtataatgtgttagtcattatggaatattgtataaataaaccttccatatataaaacatataaaaaatgattgcttagggcagtggacacttaaggacttccaaacctttcatatcttcatcccaaaaaatagagcgttccagggctggcaacttatttccttagtatattccactgtaaagccaagaggtgtgggggcttgttttctggttttgtaatttgtaataatccgtatggattactgtaaaatgtctgttgcatgtgtgttggtgttggtgttggtgttgtttacccacatggagtcatcagagatttgttccacactttgtatcctggaaaaccaaaaggaattttcttttcttcgagacagagtctcgctctgtcgcccaggctggagtgcagtggtgccatcttggctcactgcaacctccgcctcccgaattcaagtgattctcctgcctcagcctcccgagtagctgggactacaggtgcgtgccaccttgccctgctaattttttgtatttttagtagagacggggtctcaccgtgttagccaggattgtctcgatctcctgaccttgtgatctgcccgcctcggcctcccaaagtgctgggattacagacgtgagccaccatgcccggcctggaattttctagtaagaagaaaaacatacagaatatgtcttcactgttgggtaactctcaaatttgtagcaatccagattttttgtaaaactgtgctaatgggatatttaatgtcagagttattgtctctcacttcaatatctagtactggataatgtttctcctgggagcacgtatttttttttcaagtcctcttttcctggacttaacatgttcttctagaagacaccagaagtcatgaccctaagccccctcccttcaggaccactttctaccatcggttttcaaaaaactatccacatgttaattctgttttatgttctgtgattctgtggtagactcagtgctttcagagtccagagcttgacttgggttagtggccttaatgaagtgctaaatttgctctttaccgcgagactgatcagaagaagcaaaaggggaaagggggctagaggtccactcgcaccttttacatcagacaagaggaggactgtgccagaaatctgtgcatgaaacaccatctgctcttcatgcagggaggggtcaaccgtgtgaacgtgcagagattactcgagccttctttgccaaaaatatgcattcttcccagctgtaagcgtgtgaagccaaatatgtcttttagcatgaaacaataaaaacatgtttattttcacttaataggttattccccaggcc

SEQ ID NO: 181091 - DNA, 5803 bp, Homo sapiens
  Payload ID: 15664
  Gene Symbol: SH3RF3
  Gene Name: SH3 domain containing ring finger 3
  Uniprot ID: Q8TEJ3
  ENST ID: ENST00000309415
  CDS Start-End: 194-2842
ccggtccccgccacgcaggccggtcggtgagccacttcgcaccgccacagccctagcatcgggccaccagccggggtgaagaaagtcacggcggagcccggctccccagtcctgatgctggctgccggtggcgggctccacgccggccccgggacctaggcagccgcgcgagaccgctgcgggcgcctcccccatgctgctcggagcgtcctggctgtgcgcatccaaggcggccgccgctgctgcgcagagcgagggcgacgaggacaggccaggcgagcgacggcggcgtcgggcggcggccaccgccgcgggggcgggcgaggacatggacgagtcgtcgctgctggacctgctggagtgctccgtgtgtctggagcgcctggacaccacggccaaggtgctgccatgccaacacactttctgccgccgctgcctggagagcatcgtgtgctcgcgccacgagctgcgctgccccgagtgccgcatcctggtgggctgcggcgtggacgaactgcccgccaacatcttgctggtgcgactgctggacggcatccgtcagcggccccgcgcgggcaccagccccggcggcagcccgcccgcgcgtcccatcccaggccagagtgcggcccccacgctcgcgggcggcgggggcggcgcggcaggcagcaccccgggttccccggttttcctctccgcggccgcgggcagcaccgccggcagtctgcgggagctggcgaccagcaggaccgcgccggcggcaaagaatccctgcctgcttccctatggcaaggccctctacagctacgaggggaaggaacctggtgacctcaagttcaacaagggggacatcatcgtcctgcggcgcaaggtggatgaacagtggtaccacggcgagctgcacggcacacagggcttcctcccagccagctatatccagtgcatccagcccttgccacacgccccgccccagggaaaagcactttatgatttcgagatgaaggacaaagaccaagacaaggactgtctgaccttcaccaaggacgagattctgacggtgctcaggagagtggatgagaactgggcggaaggcatgctgggagacaagatcgggatcttcccgctcctgtacgtggagctcaatgactccgccaagcagctcattgagatggacaagccatgcccagccgctgcatccagctgcaatgcctccctgccctctgactccggcgctgtggccagcgtggccccaagtcccactttaagcagctcaggggcggtcagtgcctttcagcggcgtgtggatggcaagaagaacaccaagaaacgccactccttcaccgcgctcagtgtgacgcacagatcctcccaggctgccagccacaggcattccatggaaattagtgctccagtgttgatcagctccagcgatccccgagccgcggccaggattggagaccttgctcatctgtcgtgcgctgctcccacccaggatgtctcctcctcggcgggatctacccccacggctgtcccacgggctgcctcggtgtctggagagcagggcacgcctcccaaggtccagctgcccctcaacgtgtacctggcgctctacgcctacaagccccagaagagtgacgagctggagctgcacaagggagagatgtaccgggtcctcgagaagtgtcaggatggctggttcaagggggcgtctctgaggaccggggtctctggggtgttccccggaaactacgtgacacccgtttccagggtgcctgcaggaggggcagggccgccccggaataatgtagtcggagggtctccactggccaaagggataaccacaaccatgcacccaggcagtgggagtctgagcagcctggccactgccaccaggcccgccctgcccatcaccactccccaggcccacgcccagcaccccacagcctcgcccccaacaggcagctgtctacggcactcagcccagccaacggccagccaagcccggagcaccatttcaacagctgcccactctgcagcccaggctcaggaccggccaactgccaccgtgtcacccctgcgcacccagaactctccatcccgcctgcctgccaccagcctcaggccccactcggtggtgtccccgcagcacagccaccagcccccggtgcagatgtgcccacggccggccatccccctcacatcagcagcatcagccatcacacctcccaacgtcagtgccgcaaacctcaacggggaggctggaggggggcccatcggtgttctgtccacatccagccccaccaacacgggatgcaaactagacgagaagaaaagtgaaaagaaagagaagaagagtgggctcctgaagcttctagccggagcatccaccaagaagaagtcacgctccccgccatctgtgtctccaacccacgacccccaggtggccgtggacgccctgctccaaggtgcagtgggccccgaagtgtcctcactgtccatccacggcagggcagggtcctgccccatagagagcgagatgcagggtgccatggggatggagcctctgcacaggaaggcaggctccttggatctaaacttcacatctccttcccggcaagctccgctgtccatggctgccatccgccccgagcccaagctgttgcccagagagaggtaccgcgtggtggtctcgtacccaccccagagtgaggcggagatcgagctgaaggaaggcgacatcgtctttgtgcacaagaagcgtgaggacggctggtacaaggggaccctgcagcggaacggccgcacaggcctcttcccgggcagcttcgtcgagagcttctgagaactggtgctccctgcacccagctcacagagggggaggccgcctgggaagctccacggcacacagagagggagccatggcgccccaagggttccaggtcatctccaaggcacctggcgggggataccctggcccagggtgggggccagggactgtggaggtcgtgccttctcccaaaacccccaaacggagagcacacctgggatgttcttcaaggaaatgcccaccccctctgtggaaactgcaaagaaagcaccttgaggaagagaggcaggtgccggcgcaggcaggcctgtggctgtggtttgcagccatggcagcgttctcatttaccacctaagcagggttggaggttgcaggaggtctgcaggcgaggtgggtggcatgggggccaggagcgctggagatcatctttctgggctgccctgggcttcccgcggggcccaggttgctctgtcaccattctatatacctcagtcacctgccgcccggctgctcagcaggggtgtttgtgaggccctgggggtgccccggaaggggcaccccaccgcccctgttgggaaccagagcagaatctgtgggcttgtcgcctgccagtagtataagcaacactttctgttcaccaccattgtcccttgcattacttctttcttacagcatatttttaacataaagctgttagactttatatatttctaataggtcagacattgcctatttttcatacatctggtgctgcctttttgtaaaactaataatgacttggttgagcttgaaagaaaagatgtctgaggcgacatcaaaggggcagaatttttatatttcccatatggctttgggagagcgccgagaagccgccatcccgcacctcagcgctggccagtactctgggggctggcggggtggatccattgagggggtcggagggagcttggaagcagccggtttctttaaactcttaccaaaaccccgcgctctgtctagacggtgatgattattattcaagacctggaaacatttcgaggaagggccactataattgtccttttgtgtggcggtagaaggagcacgcaggtcaaccccagccgggaaggcaaaatcttccctttattgcctcagagagaactgcaattagcattctcagaagatgatttcttggtatcaaaatgtgcagtttctacaacagtttagatcaccaccaccatttttcttcttttttaaaaataaataactgctcccatttcaggcagtgcaaaccttcatctgctggagaccagaggtacaaggagatcagggggttgcagcaccgctgcaggcttgcaagatcggggagttgggagggcgagagaggaggaggtgcagctttgatgctgggacctccctgagtggggctgatgaatgtatattcattagcaccatggctcacttcccaggaagactgatcaggagcccttcagggacaattttgttctcaagattcacaccttaggaacacatttttatcacctcaaaattttgatccatcacccctctctccacctatatttttacaaataccattcagacttaaattaagctgaagaaactagcctttggtaacatagggtgtcattggttttcagggatgtaaccaattccagaaatacattcttttgcctggcatgaagactttgaaacacgggccgcttattttcagagttcctgttttgggacgtgacttggctacttgttacttccaggtggtcaccacacggcgggggtcatgcctttccctcccccaagatgataatagatttaatagactcaaagaagttgttcagaatcaaagaagaaaaagtctggcttaaacatagtaacttctgtgtgccaggttaatgacaaccaaaagctctctatttaccattattgccaaacttcatcagttgcccatcctgcaccaaaatcctgtgcgtgtttaaattcacgttgtcaccaaagaggtgcacagatcaacaacctggatgacgcaggtgttctccagggaaaccagaccaagtcaagtctccaggtaacttttttgaagtcttttttttaaggcgcgcaggtaccaagcaacagaatagagtaacctgaacgttcttactctcccaggcatggcccacgtggtgcttcaggtagaaatgtgcttcaccctcctggtggggggcgaggacacagcccactgcatgcagcatggtagagagctggggcgaatatctccatgtctttggaggatgtcagctggccgctttcagggcagagtcgggtgggcgttggtgccaccttaggaaggagagcgatgcgtgggtctggccagagctctggagccaatgccgggctgcctgagagcagaggaaatgcatggcccatgtgcatttctgagtattttaaactcgttcaggccctgcagccttcatgatgatgtagctcgcagagaagagcaggagcagaattagccctttcttcaggccatcttgcctcaaagggtacacatgtttggcggttaagatgaaactaacccttatgtttcatcctggccccatgatgtacacatcttagccatgtagtggccttggggggccacagagatttcctttgaggagcatggtagagtccacagccatggctgaagtcagtggacaccgaggggacaggactgcaggccaccaggggcctctgcccagagggaggcagagaggatggcggccacgggtgctctcctggcatcctcatggggtgatgccaggccgggcacttcaaaacaggctcagccgactgggagatcctttgtactttgcacagttcacacacacaaacacacacaccctatcccaagtgtttttgttagacacaaatgtcagcgtgtgattttggaagacttgtcagtgatgacaaaccatgatgcctgtgtttctgagtctttaaataaaaatgaacatggag

SEQ ID NO: 181092 - DNA, 3861 bp, Homo sapiens
  Payload ID: 15665
  Gene Symbol: SH3BP5L
  Gene Name: SH3-binding domain protein 5-like
  Uniprot ID: Q7L8J4
  ENST ID: ENST00000366472
  CDS Start-End: 1231-2412
atcgagggcatctgaccctgggtgcacgagtgaattaactgagttaatgttgactaagttcctggttagtattcacggagcaattggtgaccccaccaaaacgtcgttcaaggtgcaaggtccagaggcctcgaggagtgggatttacacatcggagccgtccgctcagacgccgttagtggagggttccgccgacttcacgggagtgaggaaagtcacttttggaaatcgactttgccttcgcccgcgaagcccgccagcgtccggactcgagttgcccccggagccactgccggaagtttaccagctcactttcggcgtcgcgcccgcctccgtggagcaggccggaagtggctttccggcagccgccgccgcagctccgtaaagcaagatggcactactcactctgaggctattatctccgttttatatctagtattcctcttctcaccagttactctcgatttccgtcccgcgccctaattttcttcagcaccacattctcatgtttttctttcattcagccttggtggagtatggtctggaggcaacctacggctagcctgagcaacgtggggcaccattttgtacggaaactgaaggcagggcgggggagtgtgaggcctcccgaggaggcccggcttgagagagagcgtgggagggagagcgttgttcaccgatgatgtatttccgcttctggtctgcctggtcgtttttggttggatcggcttgttgcggggagggagggggggagattgtttgcagcatagaagctccgcggacgggaaggtaaactgagctccccagagacgctcatcctacagcctcagctcgggcccagccttctctctccagctgccaccacagcctggaggcgcctgcctccaccctcccgaatggtgctcctcctagcaggcctcggtccaggatccaagccccctttgccccctgccttggagctgttgctccgggtttgtcacagtggactccctgtggcgggaagggaagaacttttgcacagacaaggcttcagctctaggaaccccactgacaacttgaatctcaacctctaacctagtgtgaggttcttcctgtgcccaccttttctgccttttgagaagagaaactcttctcctggccatctagagcccaggaagccccaagctggggccctggtcccagcatgtcagtcctctcttgtgcatagggctctgccctccccctgtcagcatggctgagctcagacaggttccaggagggcgggagaccccacagggggagctgcggcctgaagttgtagaggatgaagtccctaggagcccagtcgcagaagagcctggaggaggtggaagcagcagcagtgaggccaaattgtccccaagagaggaggaagaactggatcctagaatacaggaggagttggagcacctgaaccaggccagcgaggagatcaaccaggtggaactacagctggatgaggccaggaccacctatcggaggatcctacaggagtcggcgaggaaactgaatacacagggttcccacttggggagctgcatcgagaaagcccggccctactatgaggctcggcggctggctaaggaggctcagcaggagacacagaaggcagcgctgcggtacgagcgggccgtaagcatgcacaacgctgctcgagaaatggtgtttgtggctgagcagggcgtcatggctgacaagaaccgactggaccccacgtggcaggagatgctgaaccatgctacctgcaaggtgaatgaggcggaggaagagcggcttcgaggtgagcgggagcaccagcgagtgactcggctgtgccaacaggctgaggctcgggtccaagccctgcagaagaccctccggagggccatcggcaagagccgcccctactttgagctcaaggcccagttcagccagatcctggaggagcacaaggccaaggtgacagaactggagcagcaggtagctcaggccaagacgcgctactccgtggcccttcgtaacctggagcagatcagcgagcagattcacgcacggcgccgcgggggtctgcctccccaccccctgggccctcggcgctcctcccccgtgggggccgaggcaggacccgaggacatggaggacggagacagcgggattgagggggccgagggtgcggggctggaggagggcagcagcctggggcccggccccgcccccgacaccgataccctgagtctgctgagcctgcgcacggtggcttcagacctgcagaagtgcgactccgtggagcacttgcgaggcctctcggaccacgtcagtctggacggccaagagctgggaacgcggagtggagggcgccggggcagcgacggcggagcccgtgggggtcggcaccagcgcagcgtcagcctgtagccgaggggccagggttcctggcttgaatctgccaccacgggccggttggggcccacagtcttctcacgccctctcctctggggcctcgtcttcccgaaggtccccttctccagtgcttccctgggagaggccagctgtgttcgagtcctctgtgcctgccctggcgttctcacagcctcccccttcccctcagcaggcggctctctttgccttacccattcagaaggctcgccctcggcgctctgtctgcctctgcctgccagctcatcacgatctgcagggcattgaccctttgctttccctttctgctccctctctttccatctgtttggctttttccctcagggaacttggtctagaaggcactgggaagctcatcagagaaaatgggtgctgggcctgagtactcccgtcggaggggatggacagtcacccctcccgttggtttccagccccgccccccttcccaaggcaactctggagggtaccctaggtatgctgctgagccctgccccccgtcctgctccagcctgcccgtgtgtaacctgtaagatgtactgtgtgcctccggaagacaccacctttcccttcagcattccctttcatgacctgaggcactctgcgatgtgtgccccaaagcagaacttacagggcctgcaggaagctggtgtcagggagagaaacccaaccccactgtcaacatagggagcatcaccaactccagactggctcctgtgggtatggtgtttccgctgggctgggtcctcaacattgccaaggtgctagtgggtccctaagagggcccatgttgggggtgaagtcatgaggtcctgaaggcttaggcccctgtcattcccaccctcactcttgctgcacagttgtgtttactttttctgggtagaggatgctgaactgactcagcaccctcctgcaggacggggttagggaatttggtgctcaattgctctcccttgctcttccccaaactgaaaatacctactgcaggatccctcggggcacactgaagcttggctgccaaccctcttacttcctttgttacagggaggggttggcttggggtgaaaagttctgccctccgcagggagcagctccagctgcctggcagtgctcccagtttgtagggaagccacaccagatctgggtgccttgggagaaccagtccttccttttgacccaccccaggaagatggagtgctcttttctaggcccatgttctgccagcaaccgggatgcgtgggcaactggactctgcacgggggtctacaggttgagggaggttggtcacaatgagaacctcggggtttgaggtggccatgggcagacagccgaaagggagggagggtgtgggtgtgcgtgtgtgcatgtgctggtgtgtaagggggaaagggtctttcctggttttatttaaataaagtagtttatgtaaca

SEQ ID NO: 181093 - DNA, 2852 bp, Homo sapiens
  Payload ID: 15666
  Gene Symbol: SH3BP1
  Gene Name: SH3-domain binding protein 1
  Uniprot ID: Q9Y3L3
  ENST ID: ENST00000357436
  CDS Start-End: 314-2419
aacctgtggacggccgcggccggcggacacacagcagcgggggcccggccgggggtcgcccgggggcccggaagccggggaagagcgaggaaaccaacttggagagaggagtgacctgggggccgggggcggagtcgtgagcgggggaggagagagccggccgccagcaagagccgcgcggcggcccaggaagcgagagcgccgcccacccatccggggcaagagccgcgccgcaggagaggcaggctggaccgggggctccccgggcccgcgacccccgccgtgaccccgcagcccccagctcgcccccaagatgatgaagaggcagctgcaccgcatgcggcagctggcccagacgggcagcttgggacgcaccccggagaccgctgagttcctgggtgaggacctgctgcaggtagaacagcggctggagccggccaagcgggcagcccacaacatccacaagcggctgcaggcctgtctgcagggccagagcggggcagacatggacaagcgggtgaagaagcttcccctcatggctctgtccaccacgatggctgagagcttcaaggagctggaccctgattccagcatggggaaggccttggagatgagctgtgccatccagaatcagctggcccgcatcctggccgagtttgagatgaccctggagagggacgtcctgcagccactcagcaggctgagtgaggaggagctgccagccatcctcaaacacaagaaaagcctccagaagctcgtgtccgactggaacacactcaagagcaggctcagtcaggcaaccaagaattcaggcagcagtcaaggcctaggaggcagcccgggtagtcacagccatacgaccatggccaacaaggtggagacgctgaaggaggaggaggaggagctgaagaggaaagtggagcaatgcagggacgagtacttggctgacctgtaccactttgttaccaaggaggactcctatgccaactacttcattcgtctcctggagattcaggccgattaccatcgcaggtcactgagctcgctggacacagccctggctgagctgagggagaaccacggccaagcagaccactccccttcgatgacagccacccacttccccagggtgtatggggtgtcgctggcaacccacctgcaagagctgggccgggagattgccctgcccatcgaggcctgcgtcatgatgctgctttctgagggcatgaaggaagagggtctcttccgtctggctgctggggcctcggtgctgaagcgtctcaagcagacaatggcctcggacccccacagcctggaggagttctgctccgacccgcacgctgtggcaggtgccctcaagtcctatctgcgggagctgccagagcctctgatgaccttcgacctctatgatgactggatgagggcagccagcctgaaggagccaggggcccggctgcaggccctccaagaggtgtgcagccgcctaccccccgagaacctcagcaacctcaggtacctgatgaagttcctggcacggctggccgaggagcaggaggtgaacaagatgacacccagcaacatcgccatagtcctgggacccaacttgctgtggccacctgagaaagaaggggaccaggcccagctggatgcagcctccgtgtcttccatccaggtggtgggcgtcgtcgaggcgctgatccagagcgcagacaccctcttccctggagacatcaacttcaacgtgtcaggcctcttctcagctgttaccctccaggacacagtcagtgacaggctggcctctgaggaacttccgtccactgccgtgcccaccccagccaccaccccggctccggctccggctccagctccagctccggccccagccttggcttcagcagctaccaaggaaaggacagagtctgaggtgcctcccagaccagcctcccccaaggtcaccaggagtcccccggagacagctgccccagtggaggacatggctcggaggaccaagcgcccggcgccagcccggcccaccatgccgcccccccaggtctccggctcccgctcctcccctccagccccgcccttgccccctggctctggcagccctgggaccccccaagccctgccccgacgtctggttggcagcagcctccgagcccccacagtgccacccccgttaccccccacaccccctcagcctgcccggcgccaaagccggcgttcaccagcctcccccagcccggcctccccaggtccagcctcccccagcccagtctctttgagtaaccctgcacaggtggacctgggggctgccacagcagagggaggagcccctgaggctatcagtggggtccccactcccccagctatcccccctcagccccgccccaggagccttgcctcagagaccaactgagtggctggtttctccctaagcagccctcagcaccccctccctccccacctggccctcccaggacagctctcgccccccacaaaggggcatgggcctccagcctttgcccacaagtgcctcagtgcccactgggtcggcccccatggccaggagggctcaggacaatcctctatttcctgaccttttcctcgtccaccctgggcttggggacccccccaccggactctccactctccggcaggtcctaggggagccaccggaaggaaggagaggtttgcctgctcctacgggactgattcttctcttgccgacatgttttttgtaaggctggtaaataaattattttggacaaaactggagcagctgcccaaatgatagttttattttctgtccttgaaataaagaagccaattttataaaggggaaaacaata

SEQ ID NO: 181094 - DNA, 3123 bp, Homo sapiens
  Payload ID: 15666
  Gene Symbol: SH3BP1
  Gene Name: SH3-domain binding protein 1
  ENST ID: ENST00000451997
  CDS Start-End: 96-158
gcaagagccgcgccgcaggagaggcaggctggaccgggggctccccgggcccgcgacccccgccgtgaccccgcagcccccagctcgcccccaagatgatgaagaggcagctgcaccgcatgcggcagctggcccagacgggcagcttgggacggtagaacagcggctggagccggccaagcgggcagcccacaacatccacaagcggctgcaggcctgtctgcagggccagagcggggcagacatggacaagcgggtgaagaagcttcccctcatggctctgtccaccacgatggctgagagcttcaaggagctggaccctgattccagcatggggaaggccttggagatgagctgtgccatccagaatcagctggcccgcatcctggccgagtttgagatgaccctggagagggacgtcctgcagccactcagcaggctgagtgaggaggagctgccagccatcctcaaacacaagaaaagcctccagaagctcgtgtccgactggaacacactcaagagcaggctcagtcaggcaaccaagaattcaggcagcagtcaaggcctaggaggcagcccgggtagtcacagccatacgaccatggccaacaaggtggagacgctgaaggaggaggaggaggagctgaagaggaaagtggagcaatgcagggacgagtacttggctgacctgtaccactttgttaccaaggaggactcctatgccaactacttcattcgtctcctggagattcaggccgattaccatcgcaggtcactgagctcgctggacacagccctggctgagctgagggagaaccacggccaagcagaccactccccttcgatgacagccacccacttccccagggtgtatggggtgtcgctggcaacccacctgcaagagctgggccgggagattgccctgcccatcgaggcctgcgtcatgatgctgctttctgagggcatgaaggaagagggtctcttccgtctggctgctggggcctcggtgctgaagcgtctcaagcagacaatggcctcggacccccacagcctggaggagttctgctccgacccgcacgctgtggcaggtgccctcaagtcctatctgcgggagctgccagagcctctgatgaccttcgacctctatgatgactggatgagggcagccagcctgaaggagccaggggcccggctgcaggccctccaagaggtgtgcagccgcctaccccccgagaacctcagcaacctcaggtacctgatgaagttcctggcacggctggccgaggagcaggaggtgaacaagatgacacccagcaacatcgccatagtcctgggacccaacttgctgtggccacctgagaaagaaggggaccaggcccagctggatgcagcctccgtgtcttccatccaggtggtgggcgtcgtcgaggcgctgatccagagcgcagacaccctcttccctggagacatcaacttcaacgtgtcaggcctcttctcagctgttaccctccaggacacagtcagtgacaggctggcctctgaggaacttccgtccactgccgtgcccaccccagccaccaccccggctccggctccggctccagctccagctccggccccagccttggcttcagcagctaccaaggaaaggacagagtctgaggtgcctcccagaccagcctcccccaaggtcaccaggagtcccccggagacagctgccccagtggaggacatggctcggaggagcaccgggagcctggccgctgcagtggagacagcctcgggacgccaggccctggtggtgggcaagcccagcccctacatgttcgagtgcatcacggagaacttcagcatcgaccccgcacgcacgcttatggtgggtgaccgcctggagaccgacatcctctttggccaccgctgcggcatgaccactgtgctcacgctcacaggagtctcccgcctagaagaggcccaggcctacctagcggccggccagcacgacctcgtgccccattactatgtggagagcatcgcagacttgacagaggggttggaggactgagcccactgcacctgcagccacaggcccacccctccccactccctgatcccgtaggtggaggcgatgggtcacgagccatgttaagcacaaccggctccttggtccagttctgcaccggggtggggctgggacccggggaaggtttgagggcccttgcaaccccctcccagcagtggctgggcactctttgctgccccagaagctggtcccctatggattcatcttggcctgacccagccaggtggccttatttcttccctgtcacctcccctccttgaaatctgggccctggtgcctgctgaagattccctctatccctgagtacttagtcttctcccccttccctggggcttctagagctctctctgcccctcaggtcctggcccttgggtccttgtcaaccagaggtctagggaaccacaacccttattgtcctgggtggaccaatccaaaggctaagtgatagtgactcatcaatgttgggtcctgtggggtaccagtttaggttcctaagtaatagtgaccctttcacgtcctggagcccgagtggaccaatcggaagcctaagtgacgatgaccctcgcatgtcctaggtccctgggtggacccatcaggaccccaagtgatagtgacccagtggtcttttagatcctcagtagaacagtccagaagcctgagagacagtggccccttgataatctgggtctcacgggaccagctaggggtccaggtttcagtcagtaaataagagtggtccacgtcctaaagacacctctcctttacaaagacttgtgatgctctggggcttctgtggccaagccccaccctttcctggtcatggtacccgtacagcgttgatggccacagctcgaaggggggctttcgtgtccccctgtgcggtcagtgttttcagtaccacctctctcccgtgcccacttggctatttacttatttatttattgtgtgccagtgatggtgggtgggggctgggccttccccgccacctccacccctgttgtgacctgtccttccgtacttaataaagtgcgcgtgggagtgtt

SEQ ID NO: 181095 - DNA, 2858 bp, Homo sapiens
  Payload ID: 15666
  Gene Symbol: SH3BP1
  Gene Name: SH3-domain binding protein 1
  Uniprot ID: Q9Y3L3
  ENST ID: ENST00000417536
  CDS Start-End: 939-2297
agccacgtggcctcgttcctgttccccttccctaccctgcaggactcgcctccacacttgtgatgtctcctgaagataactccggttggaagtttcttctacctgaaatgaaaccataacccctgcagcatccacttggggtgccagagtcccacctccagcacagtcttcattactggccatggcagggaggagtacagaatgggcaggcccaggacagctggcccatcagaccattagaaacagcgagtccggagttccaggggcttgtccacggccacacagcagcccgtggccccaggaagccaaagctcccagccagtcatccagtggtggggggtttagttccagggggccagaggtcctctgcggaagagagtgcaaggcagtatccgcggcaggcccagagaggccaggacaggtcagaaaggcctacccctctttcgcttggtaccctttcctctttgcgagggatgcaaaggttatttatacttcgggtctgcaggctgcgggtggggcaggcaccccgcctggggcgggttgcgggcgcaggggcaggaatgggcttacctgcttcccgccaccggggctgggcggggcgctgcggggaggaggagccgggcacaacctgtggacggccgcggccggcggacacacagcagcgggggcccggccgggggtcgcccgggggcccggaagccggggaagagcgaggaaaccaacttggagagaggagtgacctgggggccgggggcggagtcgtgagcgggggaggagagagccggccgccagcaagagccgcgcggcggcccaggaagcgagagcgccgcccacccatccggggcaagagccgcgccgcaggagaggcaggctggaccgggggctccccgggcccgcgacccccgccgtgaccccgcagcccccagctcgcccccaagatgatgaagaggcagctgcaccgcatgcggcagctggcccagacgggcagcttgggacgcaccccggagaccgctgagttcctgggtgaggacctgctgcaggtagaacagcggctggagccggccaagcgggcagcccacaacatccacaagcggctgcaggcctgtctgcagggccagagcggggcagacatggacaagcgggtgaagaagcttcccctcatggctctgtccaccacgatggctgagagcttcaaggagctggaccctgattccagcatggggaaggccttggagatgagctgtgccatccagaatcagctggcccgcatcctggccgagtttgagatgaccctggagagggacgtcctgcagccactcagcaggctgagtgaggaggagctgccagccatcctcaaacacaagaaaagcctccagaagctcgtgtccgactggaacacactcaagagcaggctcagtcaggcaaccaagaattcaggcagcagtcaaggcctaggaggcagcccgggtagtcacagccatacgaccatggccaacaaggtggagacgctgaaggaggaggaggaggagctgaagaggaaagtggagcaatgcagggacgagtacttggctgacctgtaccactttgttaccaaggaggactcctatgccaactacttcattcgtctcctggagattcaggccgattaccatcgcaggtcactgagctcgctggacacagccctggctgagctgagggagaaccacggccaagcagaccactccccttcgatgacagccacccacttccccagggtgtatggggtgtcgctggcaacccacctgcaagagctgggccgggagattgccctgcccatcgaggcctgcgtcatgatgctgctttctgagggcatgaaggaagagggtctcttccgtctggctgctggggcctcggtgctgaagcgtctcaagcagacaatggcctcggacccccacagcctggaggagttctgctccgacccgcacgctgtggcaggtgccctcaagtcctatctgcgggagctgccagagcctctgatgaccttcgacctctatgatgactggatgagggcagccagcctgaaggagccaggggcccggctgcaggccctccaagaggtgtgcagccgcctaccccccgagaacctcagcaacctcaggtacctgatgaagttcctggcacggctggccgaggagcaggaggtgaacaagatgacacccagcaacatcgccatagtcctgggacccaacttgctgtggccacctgagaaagaaggcacagagccagccagagagttggggtcacaaaccctttgctgagcagatgcatctctttgtcccagggaccaggcccagctggatgcagcctccgtgtcttccatccaggtggtgggcgtcgtcgaggcgctgatccagagcgcagacaccctcttccctggagacatcaacttcaacgtgtcaggcctcttctcagctgttaccctccaggacacagtcagtgacaggctggcctctgaggaacttccgtccactgccgtgcccaccccagccaccaccccggctccggctccggctccagctccagctccggccccagccttggcttcagcagctaccaaggaaaggacagagtctgaggtgcctcccagaccagcctcccccaaggtcaccaggagtcccccggagacagctgccccagtggaggacatggctcggaggaccaagcgcccggcgccagcccggcccaccatgccgcccccccaggtcctaggggagccaccggaaggaaggagaggtttgcctgctcctacgggactgattcttctcttgccgacatgttttttgtaaggctggtaaataaattattttggacaaaactgg

SEQ ID NO: 181096 - DNA, 9211 bp, Homo sapiens
  Payload ID: 15667
  Gene Symbol: SH3BP2
  Gene Name: SH3-domain binding protein 2
  Uniprot ID: P78314
  ENST ID: ENST00000356331
  CDS Start-End: 262-1947
cagccgggtgacccaggccgaggccggcagaagacagcctgatgccttgaagacttcctcttgcacttttgttggagggtgctggtttgctaaaagcagagagtatttttctttttatttattttgtttttaattttttaattttagctccagctcagttgcccagactggagagcagtggccaatcatagcttactgcctcctggaactcctggctcaatcgatcctcctggataagcctcctccgggtactatagcttcatggcggctgaagagatgcattggcctgtccctatgaaggccattggtgcccagaacctgctaaccatgcctgggggcgtggccaaggctggctacctgcacaagaagggcggtacccagctgcagctgctgaaatggcccctgcgctttgtcatcatccacaaacgctgcgtctactacttcaagagtagcacctctgcctccccgcagggcgccttctccctgagtggctataaccgggtgatgcgggcggctgaggagaccacgtccaacaacgttttccccttcaagatcatccatatcagcaagaagcaccgcacgtggttcttctcggcctcctccgaggaggagcgcaagagctggatggccttgctgcgcagggagattggccacttccacgaaaagaaagacctgcccttggacaccagcgactccagctcggacacagacagcttctacggcgcagttgagcggcctgtggatatcagcctttccccgtaccccacggacaatgaagactatgagcacgacgatgaggatgactcctacctggagcctgactccccggagcccggaaggcttgaggatgccctgatgcacccaccggcttacccaccacccccagtgcccacgcccaggaagccagccttctctgacatgccccgggcccactcctttacctccaagggccccggtcccctactgccacccccgccccctaagcacggcctcccagatgttggcctggctgctgaggactccaagagggacccactgtgcccgaggcgggctgagccttgccccagggtacctgctaccccccgaaggatgagcgatccccctctgagcaccatgcccaccgcacccggcctccggaaacccccttgcttccgggagagtgccagccccagcccggagccctggacccctggccacggggcctgctccacttccagtgctgccatcatggccactgccacctccagaaactgtgacaaactcaagtccttccacctgtccccccgaggaccacccacatctgagcccccacctgtgccagccaacaagcccaagttcctgaagatagctgaagaggaccccccaagggaggcagccatgcccggactctttgtgccccccgtggctccccggcctcctgcgctgaagctgccagtgcctgaggccatggcgcggcccgcagtcctgcccaggccagagaagccgcagctcccgcacctccagcgatcaccccccgatgggcagagtttcaggagcttctcctttgaaaagccccggcaaccctcacaggctgacactggcggggacgactcggacgaggactatgagaaggtgccactgcccaactcggtcttcgtcaacaccacggagtcctgcgaagtggaaaggttgttcaaggctacaagcccccggggagagccccaggatggactctactgcatccggaactcctctaccaagtcggggaaggtcctggttgtgtgggacgaaacctctaacaaagtgaggaactatcgcatttttgagaaggactctaagttctacctggagggcgaggtcctgtttgtgagtgtgggcagcatggtggagcactaccacacccacgtgctgcccagccaccagagcctgctgctgcggcacccctacggctacactgggcctaggtgatggcagtccatgtggctgccaggccaaggcagtcacaggggccctgaccccaggccacacagacggacatgggcccacatgggagggtgagcaggagcaaggctgtgcttgcctagggcctctgtgatggacatctcgtaggacccagccagtctcatccagcaggttgggttctagggctgaaccaggcgccaggctccagaggacgaagggactctgttgccccacactaacttgccctgtcccaatcccagaaacccaggaccaagctgtgcctgggctccaaggacaggaacactggtccccccatcacactcacccctaagtgggctgggagccaggcagggccagggcagctgggtgggggccggggctggccctgggacccccaggaacgctaagacacaggctccagtaggggctgttgcctccaataaagcagcagtgagctttgccttggtggctggggcttgattgggaaggaggggattaccagcttactgggtgcccatgctgatgtctaagtggtgaccgcagcagtacccgggaaccccaacagttggttgtcttgtcttccagggtgcaggtcactgagtgacttccccagggtgcacagcgagtaacagatcaggacccaaacttgggcagtctgggctgggagcccacaccccactcaccagttctgctgcctcaggtcaggccagggcagtgctgctgcagagctagaaggccctgcagctacagctgcttcattccctgcattagtgcctggttactgggtacctcctgagtggctgtccccgttccagaacttgcatacactgagcgggctacagagctagaaggccctgcagctacagctgcttcattccctgcattagcgagcagttattgggtacctcctgcatgcctggtcccattccagacaggggcctctggcctggctgagttcacagcccagtctggggacagctgggtatgaggtgcttacggcacagtgtccagggcagctgggtgtgcagggactgggggctcccggaagattttttggaggaagtaacagctacgatgggatgggaacagtggaccctaagcaggccaagggtgcgtagggacggtggtacccagatgcccaagtcttccaggcaatacctggctcaggcccagccccaatccatccccttactttctgccatggagttccagcaggtcactctccctggcacaccttccaggctggatttttaatgaaacagactcagggaggtaggggctggcagggaccctagaatccttgtgatttttcttagcaccttatgtcagggaaacctaaactgaggtcagcacttgggcccactgacagtgactgactgggggagaaggtcctgcagcccccttcccctgggtgtgttctggggacctgtggtttgctggcggaaacaagtgatgaggctggttagcggatgtgggaggctgtgaccccagggggccatagggtgcggtggaactgcaggccctgcagatgacggcagccagctgcttccaggaaccaggtgtccaaggccacctctgcaggggtttcctcttcagcctgcctggggtgagaggtcagtgcaccacagccgaggctggagcacagggagcttctgttgttctgatctatctctggaaaaccagccattcctcctccctgcagtcagaattctttgccctgtctgacctgaacttgcttagggagtcatgccactccccactgtggccatagtttctcttcctgtaaaattttattattttagttttttgtttttgagatgtagtctcaccctgtcgcccaggctggagtgcaatgccgtgatctccgctcactgccacctccgcctctctagttcaagcgattttcctgcctcagcctcccgagtagctgggattccaggcgcccgccaccacgcctggctaattttttgtatttttagtagagacgggattttatcatgttggccaggctggtctcgaactcctgacctcaggtgatctgcccaccttggcctcccaaagtgctgggattacaggcatgagccactgtgcctggccccttcctgtaaaatttttaaatggagaattgggtgcgagatgtggtttccagcctggtgcctggggtgctgagctagtgagtggtgcagtccaggacacctttgctttatgtcacttacacggtcacctggagccggctcaagtggctaaagcatcctggggcccagagccaggtgataggtccctctggccaactggacagttgaggcctgtggttacccgaagcccagctggggccctggtccagcctcgcctcccagactctgcacctgctagcacagctgtccacgtctgtgtgagctgctctaggccgagggcctcagtttcaagagtgtgttggggtgggatggggcaggccgtggtcctccagcatgaagaaggagccatgaggagttcccatgacctcccgagacttgccataagtgttctagtccacatataagggtagggttgggattaccatttactgaccacatctgtgaggtgccgagctgggtgcttgacatcatttgcttggagaagcagctgctagtagacccattttacaggtgagagaaccaagtctcacagaggcctgggttcaagtcccacctctgccactaactggcatgtgaccctatctatccttcactgctctgagcctagaccctggcccctgcctggctccctgccaggctccctgccacccctcacgacctctgatggtcgttgtgggggtctcttgcctggctcccagggctagggttagggctctggaggtgctttcactcaaccaagggggccacagcactggggagtgaaactgccccgcctcaccctgcgttgccctctgggtctgtgagggtgggctggcaggaggcctaggccttgccctaggggcagtcctgcttcctcattttatagatagggaaactgaggctttgggaggactcactgacatacctaccttcaagatgagttcaggtgggctcagttctggggcttgggaaaagggccccagtggctttgggaagcacccccagcccagggtgaaacatgcttcttctcttcctgtggttccatccgaaggattgtggtgagccccgtgccttcagttaataaagatttgtattgtgaaaagattttttcttttttttttgggacacagtctcactctgtcgcccaggctagagtggattggcgtgatctcggctcaatgcaaatctccagggttcaatcgattctcctgcctcaccctcccatgtagctgggattacagctgcctgccaaatttttgtatttttagtggaaccggggtttcaccatgttggccaggctggtcttgaactcctgacctcaactgatccgcccaccttggcctcccaagtgctgggattacaggcgcgagccacggcgcccagccttgaaaagatgtttttagaaccagaagaaacctcggttcccactgatccttctgggccacgttgtgcggagctcccctgctggttggggctcagcgcagccccagggaggtgcttcctgcacctcaggatgggcgagggtgggcattgggggagagggggacctgggacctgcggcttagttccctgaggcaggcagggcttattggggccatttcatagaaaggcagattgaagctcagcagggaagaggcttttgagggtgatccaggcgctggagggatggcctaggacaccagggtcacaccaggaacatgggagggccgtgcttgtctctagacgaggggaatgggggaagggccacaacctctgtttctgtgacccagcagcatcaagcccctcgctgggcacctcgcacacaccccctgccttatctctgcctgcacgccctgttccctccacctagactgcctgctgagggggcagtgccaggaggttgcctgtccttggggaagaggggcagtgaccctgtgaagatgcttgacagacaacccccaccacctcagaagtgtgtgtgagtggtgaacccttttaagccatcttccagccattctcactggagggagatttgatgggtacagagcagacccctacctgtctaccctccttcggacccctaggaagcttcgcaggccttccaggctgccagacagctgccctggcgttgccgtctgcttcttccctggccccactctgaggggctcagagctgaggcagaatccctttttcattcatttcctgcagaataaaacaacatacagaaaagtgaataaaacataaatgcacaacctaacacactgttaggaagtgaacgatctgcaaccaccatcaggaaatagttttgccagcacccaagtgccctcccctcacagtgtcacttccggcctctctgccctggcttatgtgagtcttgtgttcttgtttttctaaaaagtcttcagcacccaattatgcaggcattgcagtattttcctgtttctgtgctttatccccttgaatcatacagatgcaaattctggcagctggcttctttggctcgttattatgtctgtgagatttattcatgttgctgtgcgtagtatagtttgtgcatgttcattgctaaaaacttccattgtttggctgtatcgtagttcacagattcatttcactgtcagtcaagcttgtccaatgcatgcagcccaggatgcctttgaatgtggcccaacacaaatttgtaaactttcttaaaacattataaagatttttgtttgcgatttttttttttagctcatcagctatagttagtggtagtgtattttatgcgtgacccgagacagttcttccggtatggtccatggaagccaaaagattggacatgcctgctgtagatggacagttggtttgtttctagtttggggtaactacacacaatgctgctagcaacagttttgtccatgtctctgatgcacgtgtgttttttgcaaatggtgcacaaatttttctagggtttgtactcaggagtctgactcctgggttctagggtatgaagatctttctaaatattgttctagtttacgtgcccaccagcagtaaaacagaattcccttgccttcccatccttggcagacatttcacttttgccagtctggtggggtgtatagttatggccttaatttgcatttagctaattaccaaggagattgagcatatttttatgtttttattaaccattttgattttgtctcctgtgaagtgtctatcatcttttgcccattttttaacttgttgtctttttctttttcttttctttttttttttttctgagacagggtctcactctgttgccctggctggagtgcagtggtgcaatctcagctcactgcagccttgagtcaggctcaggtgattctctcacctcagcctcccaagtagctgggaccacaggcccacaccaccaagcccagctaattttttgtatttttaagtagagacgggtttcatcatgttatgcaggctgctctcaaactcttgagctcaagcgatctgctggcctcagcctcccaaagttgggattataggcgtgagctaccagattttttcttattaatctaataattctttgtatagtcttgatattatccataatgtgtattgcaaatatcttctctaactctggcttgactgtttatggtgtcctttttttttggggggggttttttgagacaaggtcttgctctgtcacccaggctggagtgttatggcacaatcttggcttattgcagcctcaattcctaggcttaaacagtcctcccacctcagcctcctgagtagccggaactacagtcacgcacttccatgtccagataattttttttttttttttagagataggatcttactatgccccagctggtctcaaactcctagactcaatgagcctcccatcttgacctcccaaagtgctgggagtacaggcatgagccactgtgcatgccagttcttatttttaatgcagttgaattgatcagtgttttcattttggttagtgctttttgtggcttaagaaattctttccaggctgggtacagtggctcacacctgtaatgccagcactttgggggcagaggcaggaggattacttgagctcaggagtttgagaccaacctggacaacatggcgaaacaccatctctacaaaaaatacaaaaattagctggacatggtggtgcgtgcctgtagtcccagctactcaggtggctggggtgagaggattgcttgagcccagaaggtcaaggctgcagtgagctgtgattgtgccactgcacttcagcctgtgagacagagtgagaccctatctcaaaaaaaaccaaaaaaaaaaaaaaaaaaaagaaaaccactgaaattatttccactccaaggtcatgaagatagtctcttagattatattctgaaatccttataaatgtaaatttcatatttaggcctttaattcacctagatttggttttttgcatatggtgtgaggtaaggattcactttcatttttttctctccatagggttacacacctgtcctatcattgtttgtaatctaactttctgcgcccatctgcaatgccacctctgtcatatgtccacatatgacatatgtagatctgttgttggattctttcctctgttccattagtctgtctgttcttgtgccaatatcaagctgtcttcattattatcaattatgtattgagatctgataaagtaagtcttttccaccttatttttcttctttgagagtgtcttgactattctggctctttgtattttcatgtaaggtttttctcccatataagttttaaaatcagcttgtcaattccaacaacaatgatgcacttgatagtttgggaatttattatagctatcaatcagttttgggaaaattgacgtctttacaatattgagttttctgattcatgaacatggtttacctctctttccatttgggtcttctttaaggtttaccaataggattttatatttttgtccattgtggtcttgcttatcttaagtttgatttgtaaatattttatgtttcttttagtctattgtaaattgtgtatttttaatttcatttttttttttgttaatagcatataaaacacaccttgtcttttaactggagcattttgtccattgtgtatttaatgtaattaaatctaccatcttattttatgctaca

SEQ ID NO: 181097 - DNA, 9211 bp, Homo sapiens
  Payload ID: 15667
  Gene Symbol: SH3BP2
  Gene Name: SH3-domain binding protein 2
  Uniprot ID: P78314
  ENST ID: ENST00000442312
  CDS Start-End: 180-1949
acttggtgctgcccagggagcagggaacaggaagtcccgggtggggaggaagcaccggcggccacaggcctcagaagcagcaggagtgagctgtgggcacagctgtggggcagccaggcgcgtcaggcctcacatgtctgggagatgtaggctgcctgggctggtggcccctgagccgcatggcctccctgggccccaggacaccggccccgagcaggtcacgaggacggagggccatgtgttgggtcagcaccatcagcttcatggcggctgaagagatgcattggcctgtccctatgaaggccattggtgcccagaacctgctaaccatgcctgggggcgtggccaaggctggctacctgcacaagaagggcggtacccagctgcagctgctgaaatggcccctgcgctttgtcatcatccacaaacgctgcgtctactacttcaagagtagcacctctgcctccccgcagggcgccttctccctgagtggctataaccgggtgatgcgggcggctgaggagaccacgtccaacaacgttttccccttcaagatcatccatatcagcaagaagcaccgcacgtggttcttctcggcctcctccgaggaggagcgcaagagctggatggccttgctgcgcagggagattggccacttccacgaaaagaaagacctgcccttggacaccagcgactccagctcggacacagacagcttctacggcgcagttgagcggcctgtggatatcagcctttccccgtaccccacggacaatgaagactatgagcacgacgatgaggatgactcctacctggagcctgactccccggagcccggaaggcttgaggatgccctgatgcacccaccggcttacccaccacccccagtgcccacgcccaggaagccagccttctctgacatgccccgggcccactcctttacctccaagggccccggtcccctactgccacccccgccccctaagcacggcctcccagatgttggcctggctgctgaggactccaagagggacccactgtgcccgaggcgggctgagccttgccccagggtacctgctaccccccgaaggatgagcgatccccctctgagcaccatgcccaccgcacccggcctccggaaacccccttgcttccgggagagtgccagccccagcccggagccctggacccctggccacggggcctgctccacttccagtgctgccatcatggccactgccacctccagaaactgtgacaaactcaagtccttccacctgtccccccgaggaccacccacatctgagcccccacctgtgccagccaacaagcccaagttcctgaagatagctgaagaggaccccccaagggaggcagccatgcccggactctttgtgccccccgtggctccccggcctcctgcgctgaagctgccagtgcctgaggccatggcgcggcccgcagtcctgcccaggccagagaagccgcagctcccgcacctccagcgatcaccccccgatgggcagagtttcaggagcttctcctttgaaaagccccggcaaccctcacaggctgacactggcggggacgactcggacgaggactatgagaaggtgccactgcccaactcggtcttcgtcaacaccacggagtcctgcgaagtggaaaggttgttcaaggctacaagcccccggggagagccccaggatggactctactgcatccggaactcctctaccaagtcggggaaggtcctggttgtgtgggacgaaacctctaacaaagtgaggaactatcgcatttttgagaaggactctaagttctacctggagggcgaggtcctgtttgtgagtgtgggcagcatggtggagcactaccacacccacgtgctgcccagccaccagagcctgctgctgcggcacccctacggctacactgggcctaggtgatggcagtccatgtggctgccaggccaaggcagtcacaggggccctgaccccaggccacacagacggacatgggcccacatgggagggtgagcaggagcaaggctgtgcttgcctagggcctctgtgatggacatctcgtaggacccagccagtctcatccagcaggttgggttctagggctgaaccaggcgccaggctccagaggacgaagggactctgttgccccacactaacttgccctgtcccaatcccagaaacccaggaccaagctgtgcctgggctccaaggacaggaacactggtccccccatcacactcacccctaagtgggctgggagccaggcagggccagggcagctgggtgggggccggggctggccctgggacccccaggaacgctaagacacaggctccagtaggggctgttgcctccaataaagcagcagtgagctttgccttggtggctggggcttgattgggaaggaggggattaccagcttactgggtgcccatgctgatgtctaagtggtgaccgcagcagtacccgggaaccccaacagttggttgtcttgtcttccagggtgcaggtcactgagtgacttccccagggtgcacagcgagtaacagatcaggacccaaacttgggcagtctgggctgggagcccacaccccactcaccagttctgctgcctcaggtcaggccagggcagtgctgctgcagagctagaaggccctgcagctacagctgcttcattccctgcattagtgcctggttactgggtacctcctgagtggctgtccccgttccagaacttgcatacactgagcgggctacagagctagaaggccctgcagctacagctgcttcattccctgcattagcgagcagttattgggtacctcctgcatgcctggtcccattccagacaggggcctctggcctggctgagttcacagcccagtctggggacagctgggtatgaggtgcttacggcacagtgtccagggcagctgggtgtgcagggactgggggctcccggaagattttttggaggaagtaacagctacgatgggatgggaacagtggaccctaagcaggccaagggtgcgtagggacggtggtacccagatgcccaagtcttccaggcaatacctggctcaggcccagccccaatccatccccttactttctgccatggagttccagcaggtcactctccctggcacaccttccaggctggatttttaatgaaacagactcagggaggtaggggctggcagggaccctagaatccttgtgatttttcttagcaccttatgtcagggaaacctaaactgaggtcagcacttgggcccactgacagtgactgactgggggagaaggtcctgcagcccccttcccctgggtgtgttctggggacctgtggtttgctggcggaaacaagtgatgaggctggttagcggatgtgggaggctgtgaccccagggggccatagggtgcggtggaactgcaggccctgcagatgacggcagccagctgcttccaggaaccaggtgtccaaggccacctctgcaggggtttcctcttcagcctgcctggggtgagaggtcagtgcaccacagccgaggctggagcacagggagcttctgttgttctgatctatctctggaaaaccagccattcctcctccctgcagtcagaattctttgccctgtctgacctgaacttgcttagggagtcatgccactccccactgtggccatagtttctcttcctgtaaaattttattattttagttttttgtttttgagatgtagtctcaccctgtcgcccaggctggagtgcaatgccgtgatctccgctcactgccacctccgcctctctagttcaagcgattttcctgcctcagcctcccgagtagctgggattccaggcgcccgccaccacgcctggctaattttttgtatttttagtagagacgggattttatcatgttggccaggctggtctcgaactcctgacctcaggtgatctgcccaccttggcctcccaaagtgctgggattacaggcatgagccactgtgcctggccccttcctgtaaaatttttaaatggagaattgggtgcgagatgtggtttccagcctggtgcctggggtgctgagctagtgagtggtgcagtccaggacacctttgctttatgtcacttacacggtcacctggagccggctcaagtggctaaagcatcctggggcccagagccaggtgataggtccctctggccaactggacagttgaggcctgtggttacccgaagcccagctggggccctggtccagcctcgcctcccagactctgcacctgctagcacagctgtccacgtctgtgtgagctgctctaggccgagggcctcagtttcaagagtgtgttggggtgggatggggcaggccgtggtcctccagcatgaagaaggagccatgaggagttcccatgacctcccgagacttgccataagtgttctagtccacatataagggtagggttgggattaccatttactgaccacatctgtgaggtgccgagctgggtgcttgacatcatttgcttggagaagcagctgctagtagacccattttacaggtgagagaaccaagtctcacagaggcctgggttcaagtcccacctctgccactaactggcatgtgaccctatctatccttcactgctctgagcctagaccctggcccctgcctggctccctgccaggctccctgccacccctcacgacctctgatggtcgttgtgggggtctcttgcctggctcccagggctagggttagggctctggaggtgctttcactcaaccaagggggccacagcactggggagtgaaactgccccgcctcaccctgcgttgccctctgggtctgtgagggtgggctggcaggaggcctaggccttgccctaggggcagtcctgcttcctcattttatagatagggaaactgaggctttgggaggactcactgacatacctaccttcaagatgagttcaggtgggctcagttctggggcttgggaaaagggccccagtggctttgggaagcacccccagcccagggtgaaacatgcttcttctcttcctgtggttccatccgaaggattgtggtgagccccgtgccttcagttaataaagatttgtattgtgaaaagattttttcttttttttttgggacacagtctcactctgtcgcccaggctagagtggattggcgtgatctcggctcaatgcaaatctccagggttcaatcgattctcctgcctcaccctcccatgtagctgggattacagctgcctgccaaatttttgtatttttagtggaaccggggtttcaccatgttggccaggctggtcttgaactcctgacctcaactgatccgcccaccttggcctcccaagtgctgggattacaggcgcgagccacggcgcccagccttgaaaagatgtttttagaaccagaagaaacctcggttcccactgatccttctgggccacgttgtgcggagctcccctgctggttggggctcagcgcagccccagggaggtgcttcctgcacctcaggatgggcgagggtgggcattgggggagagggggacctgggacctgcggcttagttccctgaggcaggcagggcttattggggccatttcatagaaaggcagattgaagctcagcagggaagaggcttttgagggtgatccaggcgctggagggatggcctaggacaccagggtcacaccaggaacatgggagggccgtgcttgtctctagacgaggggaatgggggaagggccacaacctctgtttctgtgacccagcagcatcaagcccctcgctgggcacctcgcacacaccccctgccttatctctgcctgcacgccctgttccctccacctagactgcctgctgagggggcagtgccaggaggttgcctgtccttggggaagaggggcagtgaccctgtgaagatgcttgacagacaacccccaccacctcagaagtgtgtgtgagtggtgaacccttttaagccatcttccagccattctcactggagggagatttgatgggtacagagcagacccctacctgtctaccctccttcggacccctaggaagcttcgcaggccttccaggctgccagacagctgccctggcgttgccgtctgcttcttccctggccccactctgaggggctcagagctgaggcagaatccctttttcattcatttcctgcagaataaaacaacatacagaaaagtgaataaaacataaatgcacaacctaacacactgttaggaagtgaacgatctgcaaccaccatcaggaaatagttttgccagcacccaagtgccctcccctcacagtgtcacttccggcctctctgccctggcttatgtgagtcttgtgttcttgtttttctaaaaagtcttcagcacccaattatgcaggcattgcagtattttcctgtttctgtgctttatccccttgaatcatacagatgcaaattctggcagctggcttctttggctcgttattatgtctgtgagatttattcatgttgctgtgcgtagtatagtttgtgcatgttcattgctaaaaacttccattgtttggctgtatcgtagttcacagattcatttcactgtcagtcaagcttgtccaatgcatgcagcccaggatgcctttgaatgtggcccaacacaaatttgtaaactttcttaaaacattataaagatttttgtttgcgatttttttttttagctcatcagctatagttagtggtagtgtattttatgcgtgacccgagacagttcttccggtatggtccatggaagccaaaagattggacatgcctgctgtagatggacagttggtttgtttctagtttggggtaactacacacaatgctgctagcaacagttttgtccatgtctctgatgcacgtgtgttttttgcaaatggtgcacaaatttttctagggtttgtactcaggagtctgactcctgggttctagggtatgaagatctttctaaatattgttctagtttacgtgcccaccagcagtaaaacagaattcccttgccttcccatccttggcagacatttcacttttgccagtctggtggggtgtatagttatggccttaatttgcatttagctaattaccaaggagattgagcatatttttatgtttttattaaccattttgattttgtctcctgtgaagtgtctatcatcttttgcccattttttaacttgttgtctttttctttttcttttctttttttttttttctgagacagggtctcactctgttgccctggctggagtgcagtggtgcaatctcagctcactgcagccttgagtcaggctcaggtgattctctcacctcagcctcccaagtagctgggaccacaggcccacaccaccaagcccagctaattttttgtatttttaagtagagacgggtttcatcatgttatgcaggctgctctcaaactcttgagctcaagcgatctgctggcctcagcctcccaaagttgggattataggcgtgagctaccagattttttcttattaatctaataattctttgtatagtcttgatattatccataatgtgtattgcaaatatcttctctaactctggcttgactgtttatggtgtcctttttttttggggggggttttttgagacaaggtcttgctctgtcacccaggctggagtgttatggcacaatcttggcttattgcagcctcaattcctaggcttaaacagtcctcccacctcagcctcctgagtagccggaactacagtcacgcacttccatgtccagataattttttttttttttttagagataggatcttactatgccccagctggtctcaaactcctagactcaatgagcctcccatcttgacctcccaaagtgctgggagtacaggcatgagccactgtgcatgccagttcttatttttaatgcagttgaattgatcagtgttttcattttggttagtgctttttgtggcttaagaaattctttccaggctgggtacagtggctcacacctgtaatgccagcactttgggggcagaggcaggaggattacttgagctcaggagtttgagaccaacctggacaacatggcgaaacaccatctctacaaaaaatacaaaaattagctggacatggtggtgcgtgcctgtagtcccagctactcaggtggctggggtgagaggattgcttgagcccagaaggtcaaggctgcagtgagctgtgattgtgccactgcacttcagcctgtgagacagagtgagaccctatctcaaaaaaaaccaaaaaaaaaaaaaaaaaaaagaaaaccactgaaattatttccactccaaggtcatgaagatagtctcttagattatattctgaaatccttataaatgtaaatttcatatttaggcctttaattcacctagatttggttttttgcatatggtgtgaggtaaggattcactttcatttttttctctccatagggttacacacctgtcctatcattgtttgtaatctaactttctgcgcccatctgcaatgccacctctgtcatatgtccacatatgacatatgtagatctgttgttggattctttcctctgttccattagtctgtctgttcttgtgccaatatcaagctgtcttcattattatcaattatgtattgagatctgataaagtaagtcttttccaccttatttttcttctttgagagtgtcttgactattctggctctttgtattttcatgtaaggtttttctcccatataagttttaaaatcagcttgtcaattccaacaacaatgatgcacttgatagtttgggaatttattatagctatcaatcagttttgggaaaattgacgtctttacaatattgagttttctgattcatgaacatggtttacctctctttccatttgggtcttctttaaggtttaccaataggattttatatttttgtccattgtggtcttgcttatcttaagtttgatttgtaaatattttatgtttcttttagtctattgtaaattgtgtatttttaatttcatttttttttttgttaatagcatataaaacacaccttgtcttttaactggagcattttgtccattgtgtatttaatgtaattaaatctaccatcttattttatgcta

SEQ ID NO: 181098 - DNA, 2318 bp, Homo sapiens
  Payload ID: 15667
  Gene Symbol: SH3BP2
  Gene Name: SH3-domain binding protein 2
  Uniprot ID: P78314
  ENST ID: ENST00000435136
  CDS Start-End: 179-1864
gtgagctgtgggcacagctgtggggcagccaggcgcgtcaggcctcacatgtctgggagatgtaggctgcctgggctggtggcccctgagccgcatggcctccctgggccccaggacaccggccccgagcaggtcacgaggacggagggccatgtgttgggtcagcaccatcagcttcatggcggctgaagagatgcattggcctgtccctatgaaggccattggtgcccagaacctgctaaccatgcctgggggcgtggccaaggctggctacctgcacaagaagggcggtacccagctgcagctgctgaaatggcccctgcgctttgtcatcatccacaaacgctgcgtctactacttcaagagtagcacctctgcctccccgcagggcgccttctccctgagtggctataaccgggtgatgcgggcggctgaggagaccacgtccaacaacgttttccccttcaagatcatccatatcagcaagaagcaccgcacgtggttcttctcggcctcctccgaggaggagcgcaagagctggatggccttgctgcgcagggagattggccacttccacgaaaagaaagacctgcccttggacaccagcgactccagctcggacacagacagcttctacggcgcagttgagcggcctgtggatatcagcctttccccgtaccccacggacaatgaagactatgagcacgacgatgaggatgactcctacctggagcctgactccccggagcccggaaggcttgaggatgccctgatgcacccaccggcttacccaccacccccagtgcccacgcccaggaagccagccttctctgacatgccccgggcccactcctttacctccaagggccccggtcccctactgccacccccgccccctaagcacggcctcccagatgttggcctggctgctgaggactccaagagggacccactgtgcccgaggcgggctgagccttgccccagggtacctgctaccccccgaaggatgagcgatccccctctgagcaccatgcccaccgcacccggcctccggaaacccccttgcttccgggagagtgccagccccagcccggagccctggacccctggccacggggcctgctccacttccagtgctgccatcatggccactgccacctccagaaactgtgacaaactcaagtccttccacctgtccccccgaggaccacccacatctgagcccccacctgtgccagccaacaagcccaagttcctgaagatagctgaagaggaccccccaagggaggcagccatgcccggactctttgtgccccccgtggctccccggcctcctgcgctgaagctgccagtgcctgaggccatggcgcggcccgcagtcctgcccaggccagagaagccgcagctcccgcacctccagcgatcaccccccgatgggcagagtttcaggagcttctcctttgaaaagccccggcaaccctcacaggctgacactggcggggacgactcggacgaggactatgagaaggtgccactgcccaactcggtcttcgtcaacaccacggagtcctgcgaagtggaaaggttgttcaaggctacaagcccccggggagagccccaggatggactctactgcatccggaactcctctaccaagtcggggaaggtcctggttgtgtgggacgaaacctctaacaaagtgaggaactatcgcatttttgagaaggactctaagttctacctggagggcgaggtcctgtttgtgagtgtgggcagcatggtggagcactaccacacccacgtgctgcccagccaccagagcctgctgctgcggcacccctacggctacactgggcctaggtgatggcagtccatgtggctgccaggccaaggcagtcacaggggccctgaccccaggccacacagacggacatgggcccacatgggagggtgagcaggagcaaggctgtgcttgcctagggcctctgtgatggacatctcgtaggacccagccagtctcatccagcaggttgggttctagggctgaaccaggcgccaggctccagaggacgaagggactctgttgccccacactaacttgccctgtcccaatcccagaaacccaggaccaagctgtgcctgggctccaaggacaggaacactggtccccccatcacactcacccctaagtgggctgggagccaggcagggccagggcagctgggtgggggccggggctggccctgggacccccaggaacgctaagacacaggctccagtaggggctgttgcctccaataaagcagcagtgagctttg

SEQ ID NO: 181099 - DNA, 2265 bp, Homo sapiens
  Payload ID: 15667
  Gene Symbol: SH3BP2
  Gene Name: SH3-domain binding protein 2
  Uniprot ID: P78314
  ENST ID: ENST00000452765
  CDS Start-End: 121-1806
gggcgcgggcgggacggagctgcggcggcggcgggtcccgcgggcgggagcgcctggcggccgagtcaagccgccgcctcgacccagggcccgcgggccaggagagcgctcggcggcttcatggcggctgaagagatgcattggcctgtccctatgaaggccattggtgcccagaacctgctaaccatgcctgggggcgtggccaaggctggctacctgcacaagaagggcggtacccagctgcagctgctgaaatggcccctgcgctttgtcatcatccacaaacgctgcgtctactacttcaagagtagcacctctgcctccccgcagggcgccttctccctgagtggctataaccgggtgatgcgggcggctgaggagaccacgtccaacaacgttttccccttcaagatcatccatatcagcaagaagcaccgcacgtggttcttctcggcctcctccgaggaggagcgcaagagctggatggccttgctgcgcagggagattggccacttccacgaaaagaaagacctgcccttggacaccagcgactccagctcggacacagacagcttctacggcgcagttgagcggcctgtggatatcagcctttccccgtaccccacggacaatgaagactatgagcacgacgatgaggatgactcctacctggagcctgactccccggagcccggaaggcttgaggatgccctgatgcacccaccggcttacccaccacccccagtgcccacgcccaggaagccagccttctctgacatgccccgggcccactcctttacctccaagggccccggtcccctactgccacccccgccccctaagcacggcctcccagatgttggcctggctgctgaggactccaagagggacccactgtgcccgaggcgggctgagccttgccccagggtacctgctaccccccgaaggatgagcgatccccctctgagcaccatgcccaccgcacccggcctccggaaacccccttgcttccgggagagtgccagccccagcccggagccctggacccctggccacggggcctgctccacttccagtgctgccatcatggccactgccacctccagaaactgtgacaaactcaagtccttccacctgtccccccgaggaccacccacatctgagcccccacctgtgccagccaacaagcccaagttcctgaagatagctgaagaggaccccccaagggaggcagccatgcccggactctttgtgccccccgtggctccccggcctcctgcgctgaagctgccagtgcctgaggccatggcgcggcccgcagtcctgcccaggccagagaagccgcagctcccgcacctccagcgatcaccccccgatgggcagagtttcaggagcttctcctttgaaaagccccggcaaccctcacaggctgacactggcggggacgactcggacgaggactatgagaaggtgccactgcccaactcggtcttcgtcaacaccacggagtcctgcgaagtggaaaggttgttcaaggctacaagcccccggggagagccccaggatggactctactgcatccggaactcctctaccaagtcggggaaggtcctggttgtgtgggacgaaacctctaacaaagtgaggaactatcgcatttttgagaaggactctaagttctacctggagggcgaggtcctgtttgtgagtgtgggcagcatggtggagcactaccacacccacgtgctgcccagccaccagagcctgctgctgcggcacccctacggctacactgggcctaggtgatggcagtccatgtggctgccaggccaaggcagtcacaggggccctgaccccaggccacacagacggacatgggcccacatgggagggtgagcaggagcaaggctgtgcttgcctagggcctctgtgatggacatctcgtaggacccagccagtctcatccagcaggttgggttctagggctgaaccaggcgccaggctccagaggacgaagggactctgttgccccacactaacttgccctgtcccaatcccagaaacccaggaccaagctgtgcctgggctccaaggacaggaacactggtccccccatcacactcacccctaagtgggctgggagccaggcagggccagggcagctgggtgggggccggggctggccctgggacccccaggaacgctaagacacaggctccagtaggggctgttgcctccaataaagcagcagtgagctttgccttg

SEQ ID NO: 181100 - DNA, 9158 bp, Homo sapiens
  Payload ID: 15667
  Gene Symbol: SH3BP2
  Gene Name: SH3-domain binding protein 2
  Uniprot ID: P78314
  ENST ID: ENST00000503393
  CDS Start-End: 40-1896
ggggaggagccggcggctgccaggccagggccggcgggcatggcgggctccgggccgcggccgcggagctggggccggcgggaggcgggcgcccgggacgaggcggcggcggccgggggacgcggcccggggccgtgccggtgctcgcaggggaggcgggcgtggatcgccccggggaagccggccatgcccgccgcgtggacgcccttcatggcggctgaagagatgcattggcctgtccctatgaaggccattggtgcccagaacctgctaaccatgcctgggggcgtggccaaggctggctacctgcacaagaagggcggtacccagctgcagctgctgaaatggcccctgcgctttgtcatcatccacaaacgctgcgtctactacttcaagagtagcacctctgcctccccgcagggcgccttctccctgagtggctataaccgggtgatgcgggcggctgaggagaccacgtccaacaacgttttccccttcaagatcatccatatcagcaagaagcaccgcacgtggttcttctcggcctcctccgaggaggagcgcaagagctggatggccttgctgcgcagggagattggccacttccacgaaaagaaagacctgcccttggacaccagcgactccagctcggacacagacagcttctacggcgcagttgagcggcctgtggatatcagcctttccccgtaccccacggacaatgaagactatgagcacgacgatgaggatgactcctacctggagcctgactccccggagcccggaaggcttgaggatgccctgatgcacccaccggcttacccaccacccccagtgcccacgcccaggaagccagccttctctgacatgccccgggcccactcctttacctccaagggccccggtcccctactgccacccccgccccctaagcacggcctcccagatgttggcctggctgctgaggactccaagagggacccactgtgcccgaggcgggctgagccttgccccagggtacctgctaccccccgaaggatgagcgatccccctctgagcaccatgcccaccgcacccggcctccggaaacccccttgcttccgggagagtgccagccccagcccggagccctggacccctggccacggggcctgctccacttccagtgctgccatcatggccactgccacctccagaaactgtgacaaactcaagtccttccacctgtccccccgaggaccacccacatctgagcccccacctgtgccagccaacaagcccaagttcctgaagatagctgaagaggaccccccaagggaggcagccatgcccggactctttgtgccccccgtggctccccggcctcctgcgctgaagctgccagtgcctgaggccatggcgcggcccgcagtcctgcccaggccagagaagccgcagctcccgcacctccagcgatcaccccccgatgggcagagtttcaggagcttctcctttgaaaagccccggcaaccctcacaggctgacactggcggggacgactcggacgaggactatgagaaggtgccactgcccaactcggtcttcgtcaacaccacggagtcctgcgaagtggaaaggttgttcaaggctacaagcccccggggagagccccaggatggactctactgcatccggaactcctctaccaagtcggggaaggtcctggttgtgtgggacgaaacctctaacaaagtgaggaactatcgcatttttgagaaggactctaagttctacctggagggcgaggtcctgtttgtgagtgtgggcagcatggtggagcactaccacacccacgtgctgcccagccaccagagcctgctgctgcggcacccctacggctacactgggcctaggtgatggcagtccatgtggctgccaggccaaggcagtcacaggggccctgaccccaggccacacagacggacatgggcccacatgggagggtgagcaggagcaaggctgtgcttgcctagggcctctgtgatggacatctcgtaggacccagccagtctcatccagcaggttgggttctagggctgaaccaggcgccaggctccagaggacgaagggactctgttgccccacactaacttgccctgtcccaatcccagaaacccaggaccaagctgtgcctgggctccaaggacaggaacactggtccccccatcacactcacccctaagtgggctgggagccaggcagggccagggcagctgggtgggggccggggctggccctgggacccccaggaacgctaagacacaggctccagtaggggctgttgcctccaataaagcagcagtgagctttgccttggtggctggggcttgattgggaaggaggggattaccagcttactgggtgcccatgctgatgtctaagtggtgaccgcagcagtacccgggaaccccaacagttggttgtcttgtcttccagggtgcaggtcactgagtgacttccccagggtgcacagcgagtaacagatcaggacccaaacttgggcagtctgggctgggagcccacaccccactcaccagttctgctgcctcaggtcaggccagggcagtgctgctgcagagctagaaggccctgcagctacagctgcttcattccctgcattagtgcctggttactgggtacctcctgagtggctgtccccgttccagaacttgcatacactgagcgggctacagagctagaaggccctgcagctacagctgcttcattccctgcattagcgagcagttattgggtacctcctgcatgcctggtcccattccagacaggggcctctggcctggctgagttcacagcccagtctggggacagctgggtatgaggtgcttacggcacagtgtccagggcagctgggtgtgcagggactgggggctcccggaagattttttggaggaagtaacagctacgatgggatgggaacagtggaccctaagcaggccaagggtgcgtagggacggtggtacccagatgcccaagtcttccaggcaatacctggctcaggcccagccccaatccatccccttactttctgccatggagttccagcaggtcactctccctggcacaccttccaggctggatttttaatgaaacagactcagggaggtaggggctggcagggaccctagaatccttgtgatttttcttagcaccttatgtcagggaaacctaaactgaggtcagcacttgggcccactgacagtgactgactgggggagaaggtcctgcagcccccttcccctgggtgtgttctggggacctgtggtttgctggcggaaacaagtgatgaggctggttagcggatgtgggaggctgtgaccccagggggccatagggtgcggtggaactgcaggccctgcagatgacggcagccagctgcttccaggaaccaggtgtccaaggccacctctgcaggggtttcctcttcagcctgcctggggtgagaggtcagtgcaccacagccgaggctggagcacagggagcttctgttgttctgatctatctctggaaaaccagccattcctcctccctgcagtcagaattctttgccctgtctgacctgaacttgcttagggagtcatgccactccccactgtggccatagtttctcttcctgtaaaattttattattttagttttttgtttttgagatgtagtctcaccctgtcgcccaggctggagtgcaatgccgtgatctccgctcactgccacctccgcctctctagttcaagcgattttcctgcctcagcctcccgagtagctgggattccaggcgcccgccaccacgcctggctaattttttgtatttttagtagagacgggattttatcatgttggccaggctggtctcgaactcctgacctcaggtgatctgcccaccttggcctcccaaagtgctgggattacaggcatgagccactgtgcctggccccttcctgtaaaatttttaaatggagaattgggtgcgagatgtggtttccagcctggtgcctggggtgctgagctagtgagtggtgcagtccaggacacctttgctttatgtcacttacacggtcacctggagccggctcaagtggctaaagcatcctggggcccagagccaggtgataggtccctctggccaactggacagttgaggcctgtggttacccgaagcccagctggggccctggtccagcctcgcctcccagactctgcacctgctagcacagctgtccacgtctgtgtgagctgctctaggccgagggcctcagtttcaagagtgtgttggggtgggatggggcaggccgtggtcctccagcatgaagaaggagccatgaggagttcccatgacctcccgagacttgccataagtgttctagtccacatataagggtagggttgggattaccatttactgaccacatctgtgaggtgccgagctgggtgcttgacatcatttgcttggagaagcagctgctagtagacccattttacaggtgagagaaccaagtctcacagaggcctgggttcaagtcccacctctgccactaactggcatgtgaccctatctatccttcactgctctgagcctagaccctggcccctgcctggctccctgccaggctccctgccacccctcacgacctctgatggtcgttgtgggggtctcttgcctggctcccagggctagggttagggctctggaggtgctttcactcaaccaagggggccacagcactggggagtgaaactgccccgcctcaccctgcgttgccctctgggtctgtgagggtgggctggcaggaggcctaggccttgccctaggggcagtcctgcttcctcattttatagatagggaaactgaggctttgggaggactcactgacatacctaccttcaagatgagttcaggtgggctcagttctggggcttgggaaaagggccccagtggctttgggaagcacccccagcccagggtgaaacatgcttcttctcttcctgtggttccatccgaaggattgtggtgagccccgtgccttcagttaataaagatttgtattgtgaaaagattttttcttttttttttgggacacagtctcactctgtcgcccaggctagagtggattggcgtgatctcggctcaatgcaaatctccagggttcaatcgattctcctgcctcaccctcccatgtagctgggattacagctgcctgccaaatttttgtatttttagtggaaccggggtttcaccatgttggccaggctggtcttgaactcctgacctcaactgatccgcccaccttggcctcccaagtgctgggattacaggcgcgagccacggcgcccagccttgaaaagatgtttttagaaccagaagaaacctcggttcccactgatccttctgggccacgttgtgcggagctcccctgctggttggggctcagcgcagccccagggaggtgcttcctgcacctcaggatgggcgagggtgggcattgggggagagggggacctgggacctgcggcttagttccctgaggcaggcagggcttattggggccatttcatagaaaggcagattgaagctcagcagggaagaggcttttgagggtgatccaggcgctggagggatggcctaggacaccagggtcacaccaggaacatgggagggccgtgcttgtctctagacgaggggaatgggggaagggccacaacctctgtttctgtgacccagcagcatcaagcccctcgctgggcacctcgcacacaccccctgccttatctctgcctgcacgccctgttccctccacctagactgcctgctgagggggcagtgccaggaggttgcctgtccttggggaagaggggcagtgaccctgtgaagatgcttgacagacaacccccaccacctcagaagtgtgtgtgagtggtgaacccttttaagccatcttccagccattctcactggagggagatttgatgggtacagagcagacccctacctgtctaccctccttcggacccctaggaagcttcgcaggccttccaggctgccagacagctgccctggcgttgccgtctgcttcttccctggccccactctgaggggctcagagctgaggcagaatccctttttcattcatttcctgcagaataaaacaacatacagaaaagtgaataaaacataaatgcacaacctaacacactgttaggaagtgaacgatctgcaaccaccatcaggaaatagttttgccagcacccaagtgccctcccctcacagtgtcacttccggcctctctgccctggcttatgtgagtcttgtgttcttgtttttctaaaaagtcttcagcacccaattatgcaggcattgcagtattttcctgtttctgtgctttatccccttgaatcatacagatgcaaattctggcagctggcttctttggctcgttattatgtctgtgagatttattcatgttgctgtgcgtagtatagtttgtgcatgttcattgctaaaaacttccattgtttggctgtatcgtagttcacagattcatttcactgtcagtcaagcttgtccaatgcatgcagcccaggatgcctttgaatgtggcccaacacaaatttgtaaactttcttaaaacattataaagatttttgtttgcgatttttttttttagctcatcagctatagttagtggtagtgtattttatgcgtgacccgagacagttcttccggtatggtccatggaagccaaaagattggacatgcctgctgtagatggacagttggtttgtttctagtttggggtaactacacacaatgctgctagcaacagttttgtccatgtctctgatgcacgtgtgttttttgcaaatggtgcacaaatttttctagggtttgtactcaggagtctgactcctgggttctagggtatgaagatctttctaaatattgttctagtttacgtgcccaccagcagtaaaacagaattcccttgccttcccatccttggcagacatttcacttttgccagtctggtggggtgtatagttatggccttaatttgcatttagctaattaccaaggagattgagcatatttttatgtttttattaaccattttgattttgtctcctgtgaagtgtctatcatcttttgcccattttttaacttgttgtctttttctttttcttttctttttttttttttctgagacagggtctcactctgttgccctggctggagtgcagtggtgcaatctcagctcactgcagccttgagtcaggctcaggtgattctctcacctcagcctcccaagtagctgggaccacaggcccacaccaccaagcccagctaattttttgtatttttaagtagagacgggtttcatcatgttatgcaggctgctctcaaactcttgagctcaagcgatctgctggcctcagcctcccaaagttgggattataggcgtgagctaccagattttttcttattaatctaataattctttgtatagtcttgatattatccataatgtgtattgcaaatatcttctctaactctggcttgactgtttatggtgtcctttttttttggggggggttttttgagacaaggtcttgctctgtcacccaggctggagtgttatggcacaatcttggcttattgcagcctcaattcctaggcttaaacagtcctcccacctcagcctcctgagtagccggaactacagtcacgcacttccatgtccagataattttttttttttttttagagataggatcttactatgccccagctggtctcaaactcctagactcaatgagcctcccatcttgacctcccaaagtgctgggagtacaggcatgagccactgtgcatgccagttcttatttttaatgcagttgaattgatcagtgttttcattttggttagtgctttttgtggcttaagaaattctttccaggctgggtacagtggctcacacctgtaatgccagcactttgggggcagaggcaggaggattacttgagctcaggagtttgagaccaacctggacaacatggcgaaacaccatctctacaaaaaatacaaaaattagctggacatggtggtgcgtgcctgtagtcccagctactcaggtggctggggtgagaggattgcttgagcccagaaggtcaaggctgcagtgagctgtgattgtgccactgcacttcagcctgtgagacagagtgagaccctatctcaaaaaaaaccaaaaaaaaaaaaaaaaaaaagaaaaccactgaaattatttccactccaaggtcatgaagatagtctcttagattatattctgaaatccttataaatgtaaatttcatatttaggcctttaattcacctagatttggttttttgcatatggtgtgaggtaaggattcactttcatttttttctctccatagggttacacacctgtcctatcattgtttgtaatctaactttctgcgcccatctgcaatgccacctctgtcatatgtccacatatgacatatgtagatctgttgttggattctttcctctgttccattagtctgtctgttcttgtgccaatatcaagctgtcttcattattatcaattatgtattgagatctgataaagtaagtcttttccaccttatttttcttctttgagagtgtcttgactattctggctctttgtattttcatgtaaggtttttctcccatataagttttaaaatcagcttgtcaattccaacaacaatgatgcacttgatagtttgggaatttattatagctatcaatcagttttgggaaaattgacgtctttacaatattgagttttctgattcatgaacatggtttacctctctttccatttgggtcttctttaaggtttaccaataggattttatatttttgtccattgtggtcttgcttatcttaagtttgatttgtaaatattttatgtttcttttagtctattgtaaattgtgtatttttaatttcatttttttttttgttaatagcatataaaacacaccttgtcttttaactggagcattttgtccattgtgtatttaatgtaattaaatctaccatcttattttatgcta

SEQ ID NO: 181101 - DNA, 2579 bp, Homo sapiens
  Payload ID: 15667
  Gene Symbol: SH3BP2
  Gene Name: SH3-domain binding protein 2
  Uniprot ID: P78314
  ENST ID: ENST00000515737
  CDS Start-End: 262-555
cagccgggtgacccaggccgaggccggcagaagacagcctgatgccttgaagacttcctcttgcacttttgttggagggtgctggtttgctaaaagcagagagtatttttctttttatttattttgtttttaattttttaattttagctccagctcagttgcccagactggagagcagtggccaatcatagcttactgcctcctggaactcctggctcaatcgatcctcctggataagcctcctccgggtactatagcttcatggcggctgaagagatgcattggcctgtccctatgaaggccattggtgcccagaacctgctaaccatgcctgggggcgtggccaaggctggctacctgcacaagaagggcggtacccagctgcagctgctgaaatggcccctgcgctttgtcatcatccacaaacgctgcgtctactacttcaagagtagcacctctgcctccccgcagggcgccttctccctgagtggctataaccggcagcccagaccccagccagcccaggccctgtcccaaacagaggctgggccctaggattccctgctccagggtcctcccaggccgggatcagtttccagcttcacgcatgtcctgggctgggctctatccagtgatgggccatgagctgccctggagggccttctgcactaacaggcagggtgatgcgggcggctgaggagaccacgtccaacaacgttttccccttcaagatcatccatatcagcaagaagcaccgcacgtggttcttctcggcctcctccgaggaggagcgcaagagctggatggccttgctgcgcagggagattggccacttccacgaaaagaaagacctgcccttggacaccagcgactccagctcggacacagacagcttctacggcgcagttgagcggcctgtggatatcagcctttccccgtaccccacggacaatgaagactatgagcacgacgatgaggatgactcctacctggagcctgactccccggagcccggaaggcttgaggatgccctgatgcacccaccggcttacccaccacccccagtgcccacgcccaggaagccagccttctctgacatgccccgggcccactcctttacctccaagggccccggtcccctactgccacccccgccccctaagcacggcctcccagatgttggcctggctgctgaggactccaagagggacccactgtgcccgaggcgggctgagccttgccccagggtacctgctaccccccgaaggatgagcgatccccctctgagcaccatgcccaccgcacccggcctccggaaacccccttgcttccgggagagtgccagccccagcccggagccctggacccctggccacggggcctgctccacttccagtgctgccatcatggccactgccacctccagaaactgtgacaaactcaagtccttccacctgtccccccgaggaccacccacatctgagcccccacctgtgccagccaacaagcccaagttcctgaagatagctgaagaggaccccccaagggaggcagccatgcccggactctttgtgccccccgtggctccccggcctcctgcgctgaagctgccagtgcctgaggccatggcgcggcccgcagtcctgcccaggccagagaagccgcagctcccgcacctccagcgatcaccccccgatgggcagagtttcaggagcttctcctttgaaaagccccggcaaccctcacaggctgacactggcggggacgactcggacgaggactatgagaaggtgccactgcccaactcggtcttcgtcaacaccacggagtcctgcgaagtggaaaggttgttcaaggctacaagcccccggggagagccccaggatggactctactgcatccggaactcctctaccaagtcggggaaggtcctggttgtgtgggacgaaacctctaacaaagtgaggaactatcgcatttttgagaaggactctaagttctacctggagggcgaggtcctgtttgtgagtgtgggcagcatggtggagcactaccacacccacgtgctgcccagccaccagagcctgctgctgcggcacccctacggctacactgggcctaggtgatggcagtccatgtggctgccaggccaaggcagtcacaggggccctgaccccaggccacacagacggacatgggcccacatgggagggtgagcaggagcaaggctgtgcttgcctagggcctctgtgatggacatctcgtaggacccagccagtctcatccagcaggttgggttctagggctgaaccaggcgccaggctccagaggacgaagggactctgttgccccacactaacttgccctgtcccaatcccagaaacccaggaccaagctgtgcctgggctccaaggacaggaacactggtccccccatcacactcacccctaagtgggctgggagccaggcagggccagggcagctgggtgggggccggggctggccctgggacccccaggaacgctaagacacaggctccagtaggggctgttgcctccaataaagcagcagtgagcttt

SEQ ID NO: 181102 - DNA, 551 bp, Homo sapiens
  Payload ID: 15667
  Gene Symbol: SH3BP2
  Gene Name: SH3-domain binding protein 2
  ENST ID: ENST00000503219
  CDS Start-End: 124-551
agcgcctggcggccgagtcaagccgccgcctcgacccagggcccgcgggccaggagagcgctcggcgggctgacccttggccctctgcctgccctgctggctggctcccactcatcctgcttcatggcggctgaagagatgcattggcctgtccctatgaaggccattggtgcccagaacctgctaaccatgcctgggggcgtggccaaggctggctacctgcacaagaagggcggtacccagctgcagctgctgaaatggcccctgcgctttgtcatcatccacaaacgctgcgtctactacttcaagagtagcacctctgcctccccgcagggcgccttctccctgagtggctataaccgggtgatgcgggcggctgaggagaccacgtccaacaacgttttccccttcaagatcatccatatcagcaagaagcaccgcacgtggttcttctcggcctcctccgaggaggagcgcaagagctggatggccttgctgcgcagggagattggccacttccacgaaaagaaagacctgcccttggacaccag

SEQ ID NO: 181103 - DNA, 557 bp, Homo sapiens
  Payload ID: 15667
  Gene Symbol: SH3BP2
  Gene Name: SH3-domain binding protein 2
  ENST ID: ENST00000504294
  CDS Start-End: 41-557
actcgaggccagaaagggaagcccctttccagtgggcttcatggcggctgaagagatgcattggcctgtccctatgaaggccattggtgcccagaacctgctaaccatgcctgggggcgtggccaaggctggctacctgcacaagaagggcggtacccagctgcagctgctgaaatggcccctgcgctttgtcatcatccacaaacgctgcgtctactacttcaagagtagcacctctgcctccccgcagggcgccttctccctgagtggctataaccgggtgatgcgggcggctgaggagaccacgtccaacaacgttttccccttcaagatcatccatatcagcaagaagcaccgcacgtggttcttctcggcctcctccgaggaggagcgcaagagctggatggccttgctgcgcagggagattggccacttccacgaaaagaaagacctgcccttggacaccagcgactccagctcggacacagacagcttctacggcgcagttgagcggcctgtggatatcagcctttccccgtaccccacggacaatgaag

SEQ ID NO: 181104 - DNA, 609 bp, Homo sapiens
  Payload ID: 15667
  Gene Symbol: SH3BP2
  Gene Name: SH3-domain binding protein 2
  ENST ID: ENST00000513095
  CDS Start-End: 200-609
aaatgctgctctgtgctgggcctgacacccagggtgcaggttgtttcatggtttgctagggagaagccgagtattcagaggtggccctgcggggaggcagcagggagcttcctcccagggatgcagctgaccttgcgctggagccagagagccctggcctctgaccacaggatgggagggcaggagcagtggaagcttcatggcggctgaagagatgcattggcctgtccctatgaaggccattggtgcccagaacctgctaaccatgcctgggggcgtggccaaggctggctacctgcacaagaagggcggtacccagctgcagctgctgaaatggcccctgcgctttgtcatcatccacaaacgctgcgtctactacttcaagagtagcacctctgcctccccgcagggcgccttctccctgagtggctataaccgggtgatgcgggcggctgaggagaccacgtccaacaacgttttccccttcaagatcatccatatcagcaagaagcaccgcacgtggttcttctcggcctcctccgaggaggagcgcaagagctggatggccttgctgcgcagggagattggccacttccacgaaaagaaaga

SEQ ID NO: 181105 - DNA, 868 bp, Homo sapiens
  Payload ID: 15667
  Gene Symbol: SH3BP2
  Gene Name: SH3-domain binding protein 2
  Uniprot ID: P78314
  ENST ID: ENST00000513020
  CDS Start-End: 242-535
tcaggggtgcagcctcagcctccacccgccacccgtacccgccctgcctcaggacttcgttcctgctgtacccctgctggctgcctgtccccacaggtggctccttcctccccaccggaggagctgctcccaggcgggaccctgggggtggaatctctgaaatgccttcccctcgggaccctcaccgcgactggacttcgctcagcttcagaccctgggctgcagctgcctaatgagcttcatggcggctgaagagatgcattggcctgtccctatgaaggccattggtgcccagaacctgctaaccatgcctgggggcgtggccaaggctggctacctgcacaagaagggcggtacccagctgcagctgctgaaatggcccctgcgctttgtcatcatccacaaacgctgcgtctactacttcaagagtagcacctctgcctccccgcagggcgccttctccctgagtggctataaccggcagcccagaccccagccagcccaggccctgtcccaaacagaggctgggccctaggattccctgctccagggtcctcccaggccgggatcagtttccagcttcacgcatgtcctgggctgggctctatccagtgatgggccatgagctgccctggagggccttctgcactaacagggtgatgcgggcggctgaggagaccacgtccaacaacgttttccccttcaagatcatccatatcagcaagaagcaccgcacgtggttcttctcggcctcctccgaggaggagcgcaagagctggatggccttgctgcgcagggagattggccacttccacgaaaagaaagacctgcccttggacaccaggtgagcccgggcccagggcatacc

SEQ ID NO: 181106 - DNA, 688 bp, Homo sapiens
  Payload ID: 15667
  Gene Symbol: SH3BP2
  Gene Name: SH3-domain binding protein 2
  ENST ID: ENST00000512014
  CDS Start-End: 107-688
cttgaaattcatagaaccgggtgcaagacataacagccctctgtgtggcctcagatggcagagcagggtggcagcagctgccctggcaggaagagcatgctgcttcatggcggctgaagagatgcattggcctgtccctatgaaggccattggtgcccagaacctgctaaccatgcctgggggcgtggccaaggctggctacctgcacaagaagggcggtacccagctgcagctgctgaaatggcccctgcgctttgtcatcatccacaaacgctgcgtctactacttcaagagtagcacctctgcctccccgcagggcgccttctccctgagtggctataaccgggtgatgcgggcggctgaggagaccacgtccaacaacgttttccccttcaagatcatccatatcagcaagaagcaccgcacgtggttcttctcggcctcctccgaggaggagcgcaagagctggatggccttgctgcgcagggagattggccacttccacgaaaagaaagacctgcccttggacaccagcgactccagctcggacacagacagcttctacggcgcagttgagcggcctgtggatatcagcctttccccgtaccccacggacaatgaagactatgagcacgacgatgaggatgactcctacctggagcctgactccccggagcccggaaggctt

SEQ ID NO: 181107 - DNA, 2351 bp, Homo sapiens
  Payload ID: 15667
  Gene Symbol: SH3BP2
  Gene Name: SH3-domain binding protein 2
  Uniprot ID: P78314
  ENST ID: ENST00000511747
  CDS Start-End: 211-1896
ggggaggagccggcggctgccaggccagggccggcgggcatggcgggctccgggccgcggccgcggagctggggccggcgggaggcgggcgcccgggacgaggcggcggcggccgggggacgcggcccggggccgtgccggtgctcgcaggggaggcgggcgtggatcgccccggggaagccggccatgcccgccgcgtggacgcccttcatggcggctgaagagatgcattggcctgtccctatgaaggccattggtgcccagaacctgctaaccatgcctgggggcgtggccaaggctggctacctgcacaagaagggcggtacccagctgcagctgctgaaatggcccctgcgctttgtcatcatccacaaacgctgcgtctactacttcaagagtagcacctctgcctccccgcagggcgccttctccctgagtggctataaccgggtgatgcgggcggctgaggagaccacgtccaacaacgttttccccttcaagatcatccatatcagcaagaagcaccgcacgtggttcttctcggcctcctccgaggaggagcgcaagagctggatggccttgctgcgcagggagattggccacttccacgaaaagaaagacctgcccttggacaccagcgactccagctcggacacagacagcttctacggcgcagttgagcggcctgtggatatcagcctttccccgtaccccacggacaatgaagactatgagcacgacgatgaggatgactcctacctggagcctgactccccggagcccggaaggcttgaggatgccctgatgcacccaccggcttacccaccacccccagtgcccacgcccaggaagccagccttctctgacatgccccgggcccactcctttacctccaagggccccggtcccctactgccacccccgccccctaagcacggcctcccagatgttggcctggctgctgaggactccaagagggacccactgtgcccgaggcgggctgagccttgccccagggtacctgctaccccccgaaggatgagcgatccccctctgagcaccatgcccaccgcacccggcctccggaaacccccttgcttccgggagagtgccagccccagcccggagccctggacccctggccacggggcctgctccacttccagtgctgccatcatggccactgccacctccagaaactgtgacaaactcaagtccttccacctgtccccccgaggaccacccacatctgagcccccacctgtgccagccaacaagcccaagttcctgaagatagctgaagaggaccccccaagggaggcagccatgcccggactctttgtgccccccgtggctccccggcctcctgcgctgaagctgccagtgcctgaggccatggcgcggcccgcagtcctgcccaggccagagaagccgcagctcccgcacctccagcgatcaccccccgatgggcagagtttcaggagcttctcctttgaaaagccccggcaaccctcacaggctgacactggcggggacgactcggacgaggactatgagaaggtgccactgcccaactcggtcttcgtcaacaccacggagtcctgcgaagtggaaaggttgttcaaggctacaagcccccggggagagccccaggatggactctactgcatccggaactcctctaccaagtcggggaaggtcctggttgtgtgggacgaaacctctaacaaagtgaggaactatcgcatttttgagaaggactctaagttctacctggagggcgaggtcctgtttgtgagtgtgggcagcatggtggagcactaccacacccacgtgctgcccagccaccagagcctgctgctgcggcacccctacggctacactgggcctaggtgatggcagtccatgtggctgccaggccaaggcagtcacaggggccctgaccccaggccacacagacggacatgggcccacatgggagggtgagcaggagcaaggctgtgcttgcctagggcctctgtgatggacatctcgtaggacccagccagtctcatccagcaggttgggttctagggctgaaccaggcgccaggctccagaggacgaagggactctgttgccccacactaacttgccctgtcccaatcccagaaacccaggaccaagctgtgcctgggctccaaggacaggaacactggtccccccatcacactcacccctaagtgggctgggagccaggcagggccagggcagctgggtgggggccggggctggccctgggacccccaggaacgctaagacacaggctccagtaggggctgttgcctccaataaagcagcagtgagctttgc

SEQ ID NO: 181108 - DNA, 876 bp, Homo sapiens
  Payload ID: 15667
  Gene Symbol: SH3BP2
  Gene Name: SH3-domain binding protein 2
  ENST ID: ENST00000508385
  CDS Start-End: 313-876
acggggcctgggaaactccaaagccggcgtcaggtcatcgaggcctccgggctgattaggactaatggcgctcaggggtgcagcctcagcctccacccgccacccgtacccgccctgcctcaggacttcgttcctgctgtacccctgctggctgcctgtccccacaggtggctccttcctccccaccggaggagctgctcccaggcgggaccctgggggtggaatctctgaaatgccttcccctcgggaccctcaccgcgactggacttcgctcagcttcagaccctgggctgcagctgcctaatgagcttcatggcggctgaagagatgcattggcctgtccctatgaaggccattggtgcccagaacctgctaaccatgcctgggggcgtggccaaggctggctacctgcacaagaagggcggtacccagctgcagctgctgaaatggcccctgcgctttgtcatcatccacaaacgctgcgtctactacttcaagagtagcacctctgcctccccgcagggcgccttctccctgagtggctataaccgggtgatgcgggcggctgaggagaccacgtccaacaacgttttccccttcaagatcatccatatcagcaagaagcaccgcacgtggttcttctcggcctcctccgaggaggagcgcaagagctggatggccttgctgcgcagggagattggccacttccacgaaaagaaagacctgcccttggacaccagcgactccagctcggacacagacagcttctacggcgcagttgagcggcctgtggatatcagcctttccccgtaccccacggacaatgaagactatgagcacgacgatgaggatgactcctacctggagcctgactcc

SEQ ID NO: 181109 - DNA, 727 bp, Homo sapiens
  Payload ID: 15667
  Gene Symbol: SH3BP2
  Gene Name: SH3-domain binding protein 2
  ENST ID: ENST00000502260
  CDS Start-End: 300-727
cagaagcagcaggagtgagctgtgggcacagctgtggggcagccaggcgcgtcaggcctcacatgtctgggagatgtaggctgcctgggctggtggcccctgagccgcatggcctccctgggccccaggacaccggccccgagcaggtcacgaggacggagggccatgtgttgggtcagcaccatcagctcctgcccatgttaactcagccgacaccgcagcagcatggtgacaggtccccccagggtgtctgcctctacagaggaagggactgaagcacccagagagctggcagcttcatggcggctgaagagatgcattggcctgtccctatgaaggccattggtgcccagaacctgctaaccatgcctgggggcgtggccaaggctggctacctgcacaagaagggcggtacccagctgcagctgctgaaatggcccctgcgctttgtcatcatccacaaacgctgcgtctactacttcaagagtagcacctctgcctccccgcagggcgccttctccctgagtggctataaccgggtgatgcgggcggctgaggagaccacgtccaacaacgttttccccttcaagatcatccatatcagcaagaagcaccgcacgtggttcttctcggcctcctccgaggaggagcgcaagagctggatggccttgctgcgcagggagattggccacttccacgaaaagaaagacctgcccttggacaccag

SEQ ID NO: 181110 - DNA, 866 bp, Homo sapiens
  Payload ID: 15667
  Gene Symbol: SH3BP2
  Gene Name: SH3-domain binding protein 2
  ENST ID: ENST00000513069
  CDS Start-End: 1-571
ccgggagagtgccagccccagcccggagccctggacccctggccacggggcctgctccacttccagtgctgccatcatggccactgccacctccagaaactgtgacaaactcaagtccttccacctgtccccccgaggaccacccacatctgagcccccacctgtgccagccaacaagcccaagttcctgaagatagctgaagaggaccccccaagggaggcagccatgcccggactctttgtgccccccgtggctccccggcctcctgcgctgaagctgccagtgcctgaggccatggcgcggcccgcagtcctgcccaggccagagaagccgcagctcccgcacctccagcgatcaccccccgatgggcagagtttcaggagcttctcctttgaaaagccccggcaaccctcacaggctgacactggcggggacgactcggacgaggactatgagaaggttgttcaaggctacaagcccccggggagagccccaggatggactctactgcatccggaactcctctaccaagtcggggaaggtcctggttgtgtgggacgaaacctctaacaaagtgaggaactatcgcatttttgagaaggactctaagttctacctggagggcgaggtcctgtttgtgagtgtgggcagcatggtggagcactaccacacccacgtgctgcccagccaccagagcctgctgctgcggcacccctacggctacactgggcctaggtgatggcagtccatgtggctgccaggccaaggcagtcacaggggccctgaccccaggccacacagacggacatgggcccacatgggagggtgagcaggagcaaggctgtgcttgcctagggcctctgtg

SEQ ID NO: 181111 - DNA, 5044 bp, Homo sapiens
  Payload ID: 15668
  Gene Symbol: SH3BP4
  Gene Name: SH3-domain binding protein 4
  Uniprot ID: Q9P0V3
  ENST ID: ENST00000344528
  CDS Start-End: 321-3212
gaaacagagacaagcaccccaacagtagggtgcttcgaggtcctggaggggagccctggccctgtggagagagaccgagtcgtgcagcgtccgtggcctgcatttgaaactgaagggcaagaggctggtgagatccgagagtcatgccgctgcgtggaggaacatgctgaacctctggaggaacggctctacctccagcgtctcccttctctcctggacagaaggccgtgtcctgggacttctctgatggcgagaggctgcggctgtaccaggaagaaatatgaagccttagcggctttacccgggaagcgagtttcgagatggcggctcagcggatccgagcggccaactccaatggcctccctcgctgcaagtcagaggggaccctgattgacctgagcgaagggttttcagagacgagctttaatgacatcaaagtgccttctcccagtgccttgctcgtagacaaccccacacctttcggaaatgcaaaggaagtgattgcgatcaaggactattgccccaccaacttcaccacactgaagttctccaagggcgaccatctctacgtcttggacacatctggcggtgagtggtggtacgcacacaacaccaccgaaatgggctacatcccctcctcctatgtgcagcccttgaactaccggaactcaacactgagtgacagcggtatgattgataatcttccagacagcccagacgaggtagccaaggagctggagctgctcgggggatggacagatgacaaaaaagtaccaggcagaatgtacagtaataaccctttctggaatggggtccagaccaatccatttctgaatgggaacgtgcccgtcatgcccagcctggatgagctgaatcccaaaagtactgtggatttgctcctttttgacgcaggtacatcctccttcaccgaatccagctcagccaccacgaatagcactggcaacatcttcgatgagcttccagtcacaaacggactccacgcagagccgccggtcaggcgggacaaccccttcttcagaagcaagcgctcctacagtctctcggaactctccgtcctccaagccaagtccgatgctcccacatcgtcgagtttcttcaccggcttgaaatcacctgcccccgagcaatttcagagccgggaggattttcgaactgcctggctaaaccacaggaagctggcccggtcttgccacgacctggacttgcttggccaaagccctggttggggccagacccaagccgtggagacaaacatcgtgtgcaagctggatagctccgggggtgctgtccagcttcctgacaccagcatcagcatccacgtgcccgagggccacgtcgcccctggggagacccagcagatctccatgaaagccctgctggaccccccgctggagctcaacagtgacaggtcctgcagcatcagccctgtgctggaggtcaagctgagcaacctggaggtgaaaacctctatcatcttggagatgaaagtgtcagccgagataaaaaatgacctttttagcaaaagcacagtgggcctccagtgcctgaggagcgactcgaaggaagggccatatgtctccgtcccgctcaactgcagctgtggggacacggtccaggcacagctgcacaacctggagccctgtatgtacgtggctgtcgtggcccatggcccaagcatcctctacccttccaccgtgtgggacttcatcaataaaaaagtcacagtgggtctctacggccctaaacacatccacccatccttcaagacggtagtgaccatttttgggcatgactgtgccccaaagacgctcctggtcagcgaggtcacacgccaggcacccaaccctgccccggtggccctgcagctgtgggggaagcaccagttcgttttgtccaggccccaggatctcaaggtctgtatgttttccaatatgacgaattacgaggtcaaagccagcgagcaggccaaagtggtgcgaggattccagctgaagctgggcaaggtgagccgcctgatcttccccatcacctcccagaaccccaacgagctctctgacttcacgctgcgggttcaggtgaaggacgaccaggaggccatcctcacccagttttgtgtccagactcctcagccaccccctaaaagtgccatcaagccttccgggcaaaggaggtttctcaagaagaacgaagtcgggaaaatcatcctgtccccgtttgccaccactacaaagtacccgactttccaggaccgcccggtgtccagcctcaagtttggtaagttgctcaagactgtggtgcggcagaacaagaaccactacctgctggagtacaagaagggcgacgggatcgccctgctcagcgaggagcgggtcaggctccggggccagctgtggaccaaggagtggtacatcggctactaccagggcagggtgggcctcgtgcacaccaagaacgtgctggtggtcggcagggcccggcccagcctgtgctcgggccccgagctgagcacctcggtgctgctggagcagatcctgcggccctgcaaattcctcacgtacatctatgcctccgtgaggaccctgctcatggagaacatcagcagctggcgctccttcgctgacgccctgggctacgtgaacctgccgctcacctttttctgccgggcagagctggatagtgagcccgagcgggtggcgtccgtcctagaaaagctgaaggaggactgtaacaacactgagaacaaagaacggaagtccttccagaaggagcttgtgatggccctactgaagatggactgccagggcctggtggtcagactcatccaggactttgtgctcctgaccacggctgtagaggtggcccagcgctggcgggagctggctgagaagctggccaaggtctccaagcagcagatggacgcctacgagtctccccaccgggacaggaacggggttgtggacagcgaggccatgtggaagcctgcgtatgacttcttactcacctggagccatcagatcggggacagctaccgggatgtcatccaggagctgcacctgggcctggacaagatgaaaaaccccatcaccaagcgctggaagcacctcactgggactctgatcttggtgaactccctggacgttctgagagcagccgccttcagccctgcggaccaggacgacttcgtgatttgaatgggtcccctcccctcctgctgctctggagtgcaagccctcttctgccctgcgtgccctgctgtcaccgcggagctgaagagggaggaaggggcggctgctcagacagatttagggcccgccagctaggctacacccatcatgcgccgccctcctccatcgagggagaggcctgaagggactgcctactgcagctcgttgccaatcacatagctttctatttgttaagtataaatttaaatttaaaatcacttttttaacgaatggggggaagggatctatgagaaaggtggtatctaatttttttatggaccataaaggtttaaaagaaaataggggcacaggctgttgaggtttttatgttgttatagacctttttaaattatgttagagatgtatataggtatttaaaggtcactgggagcgtttctgattcccggccacactttgcatttcaacactcagcccggaaagatgctcgttcggttgttggacctctttcactccctgcgtgtaagaaggtgaatcacgtgggaaaaagtggcttttcagtaaacgggtacagctcattctttctgagaaggccccaggtcctgctccctcctcggatttgattgtcttccgtgctttgcctcactcgtagtaaatgaccatccatagaatatgtgaatctttggtgagcttcagtgggcagagtgaagtcccgcattagcatttaggtgccctgagctgtttctgccaatagattagaaagcagccatgagttgacagtctttagggcccctgccagtgtgcaattagtcattgacaagaacaatgccatttgagagtgaggtggtccctgctgctacgaggccattgtactgttttttccttgaggtcaaagcagtgcttcccatagagtttgctgcctcttctgtggacaggaagaaaacttcatgaccgaatcagagccttggtggccactgactctcgtgcttattgcagatgctgtggttggcctcacaagcaacgccttatgctgatgtgcagaggtgccagctgccatttgccaaactctgcatttcatttcatctaaggcttaacccctcttccttcctggtgtacctgtgtctcctcggaaggaagtcatagtttagatgaaaccattttttgtacaatgtaaagatcatctgagcaagatgagcattttgtaaaaatgaaaatgtgactcacataaaatcaggaacttgacacagtgttgcattaataactttagggtgcagacatgctgtgtgaatctcacaatgcgtcgtagatgtcgcgtgttggaagggagcaggaggaaggactgatactggcaaatcagtagagtgaggtgatccttagcaacgtgccaggacacttcctgtgtgcctgcagttgtcagggaccatttgggatcccgaatctcattctctaaaactgctttcttgaaacatgttacttccttagtataatcaatgtatactcccttactggcctgaaacgttgtatagctacttattcagatactgaagaccaacggactgaaaaaaagaacaaacattagctattttatgctgcaagaaccaggacacacaattcgccaatcatcccaccatataaccttcgattgtgcttctcaactccaccccataatttctcccagagaccatctatcaccttttccccaaagaagaaacaaaaccagttgcaccttaaaccatggatattttttcctcaggggctttaaatagtttcctatgcaacgtgtcttgtagcacaaataaaattctacaaaagttgcagtaaattttatttggatattttaa

SEQ ID NO: 181112 - DNA, 5194 bp, Homo sapiens
  Payload ID: 15668
  Gene Symbol: SH3BP4
  Gene Name: SH3-domain binding protein 4
  Uniprot ID: Q9P0V3
  ENST ID: ENST00000392011
  CDS Start-End: 405-3296
cgcccaggcgcgggaccaccctccgcccgccgaggcgggggcccagcgcgcccggcactctcggcggtccgggcccctcgccactaccgccgccgccgccgccgtgagtcccgcggagccgcgcgcgcccccggctgggccgagccgctggccgacgagcggagcctcaggagccggcggggacgccatgcgagccagcgtctcccttctctcctggacagaaggccgtgtcctgggacttctctgatggcgagaggctgcggctgtaccaggaagaaacatattgccgagtggatgccgccgcgcagcgtgtttgcttgaggcagaagcttcagcatctgctgggataactggaggaagaaatatgaagccttagcggctttacccgggaagcgagtttcgagatggcggctcagcggatccgagcggccaactccaatggcctccctcgctgcaagtcagaggggaccctgattgacctgagcgaagggttttcagagacgagctttaatgacatcaaagtgccttctcccagtgccttgctcgtagacaaccccacacctttcggaaatgcaaaggaagtgattgcgatcaaggactattgccccaccaacttcaccacactgaagttctccaagggcgaccatctctacgtcttggacacatctggcggtgagtggtggtacgcacacaacaccaccgaaatgggctacatcccctcctcctatgtgcagcccttgaactaccggaactcaacactgagtgacagcggtatgattgataatcttccagacagcccagacgaggtagccaaggagctggagctgctcgggggatggacagatgacaaaaaagtaccaggcagaatgtacagtaataaccctttctggaatggggtccagaccaatccatttctgaatgggaacgtgcccgtcatgcccagcctggatgagctgaatcccaaaagtactgtggatttgctcctttttgacgcaggtacatcctccttcaccgaatccagctcagccaccacgaatagcactggcaacatcttcgatgagcttccagtcacaaacggactccacgcagagccgccggtcaggcgggacaaccccttcttcagaagcaagcgctcctacagtctctcggaactctccgtcctccaagccaagtccgatgctcccacatcgtcgagtttcttcaccggcttgaaatcacctgcccccgagcaatttcagagccgggaggattttcgaactgcctggctaaaccacaggaagctggcccggtcttgccacgacctggacttgcttggccaaagccctggttggggccagacccaagccgtggagacaaacatcgtgtgcaagctggatagctccgggggtgctgtccagcttcctgacaccagcatcagcatccacgtgcccgagggccacgtcgcccctggggagacccagcagatctccatgaaagccctgctggaccccccgctggagctcaacagtgacaggtcctgcagcatcagccctgtgctggaggtcaagctgagcaacctggaggtgaaaacctctatcatcttggagatgaaagtgtcagccgagataaaaaatgacctttttagcaaaagcacagtgggcctccagtgcctgaggagcgactcgaaggaagggccatatgtctccgtcccgctcaactgcagctgtggggacacggtccaggcacagctgcacaacctggagccctgtatgtacgtggctgtcgtggcccatggcccaagcatcctctacccttccaccgtgtgggacttcatcaataaaaaagtcacagtgggtctctacggccctaaacacatccacccatccttcaagacggtagtgaccatttttgggcatgactgtgccccaaagacgctcctggtcagcgaggtcacacgccaggcacccaaccctgccccggtggccctgcagctgtgggggaagcaccagttcgttttgtccaggccccaggatctcaaggtctgtatgttttccaatatgacgaattacgaggtcaaagccagcgagcaggccaaagtggtgcgaggattccagctgaagctgggcaaggtgagccgcctgatcttccccatcacctcccagaaccccaacgagctctctgacttcacgctgcgggttcaggtgaaggacgaccaggaggccatcctcacccagttttgtgtccagactcctcagccaccccctaaaagtgccatcaagccttccgggcaaaggaggtttctcaagaagaacgaagtcgggaaaatcatcctgtccccgtttgccaccactacaaagtacccgactttccaggaccgcccggtgtccagcctcaagtttggtaagttgctcaagactgtggtgcggcagaacaagaaccactacctgctggagtacaagaagggcgacgggatcgccctgctcagcgaggagcgggtcaggctccggggccagctgtggaccaaggagtggtacatcggctactaccagggcagggtgggcctcgtgcacaccaagaacgtgctggtggtcggcagggcccggcccagcctgtgctcgggccccgagctgagcacctcggtgctgctggagcagatcctgcggccctgcaaattcctcacgtacatctatgcctccgtgaggaccctgctcatggagaacatcagcagctggcgctccttcgctgacgccctgggctacgtgaacctgccgctcacctttttctgccgggcagagctggatagtgagcccgagcgggtggcgtccgtcctagaaaagctgaaggaggactgtaacaacactgagaacaaagaacggaagtccttccagaaggagcttgtgatggccctactgaagatggactgccagggcctggtggtcagactcatccaggactttgtgctcctgaccacggctgtagaggtggcccagcgctggcgggagctggctgagaagctggccaaggtctccaagcagcagatggacgcctacgagtctccccaccgggacaggaacggggttgtggacagcgaggccatgtggaagcctgcgtatgacttcttactcacctggagccatcagatcggggacagctaccgggatgtcatccaggagctgcacctgggcctggacaagatgaaaaaccccatcaccaagcgctggaagcacctcactgggactctgatcttggtgaactccctggacgttctgagagcagccgccttcagccctgcggaccaggacgacttcgtgatttgaatgggtcccctcccctcctgctgctctggagtgcaagccctcttctgccctgcgtgccctgctgtcaccgcggagctgaagagggaggaaggggcggctgctcagacagatttagggcccgccagctaggctacacccatcatgcgccgccctcctccatcgagggagaggcctgaagggactgcctactgcagctcgttgccaatcacatagctttctatttgttaagtataaatttaaatttaaaatcacttttttaacgaatggggggaagggatctatgagaaaggtggtatctaatttttttatggaccataaaggtttaaaagaaaataggggcacaggctgttgaggtttttatgttgttatagacctttttaaattatgttagagatgtatataggtatttaaaggtcactgggagcgtttctgattcccggccacactttgcatttcaacactcagcccggaaagatgctcgttcggttgttggacctctttcactccctgcgtgtaagaaggtgaatcacgtgggaaaaagtggcttttcagtaaacgggtacagctcattctttctgagaaggccccaggtcctgctccctcctcggatttgattgtcttccgtgctttgcctcactcgtagtaaatgaccatccatagaatatgtgaatctttggtgagcttcagtgggcagagtgaagtcccgcattagcatttaggtgccctgagctgtttctgccaatagattagaaagcagccatgagttgacagtctttagggcccctgccagtgtgcaattagtcattgacaagaacaatgccatttgagagtgaggtggtccctgctgctacgaggccattgtactgttttttccttgaggtcaaagcagtgcttcccatagagtttgctgcctcttctgtggacaggaagaaaacttcatgaccgaatcagagccttggtggccactgactctcgtgcttattgcagatgctgtggttggcctcacaagcaacgccttatgctgatgtgcagaggtgccagctgccatttgccaaactctgcatttcatttcatctaaggcttaacccctcttccttcctggtgtacctgtgtctcctcggaaggaagtcatagtttagatgaaaccattttttgtacaatgtaaagatcatctgagcaagatgagcattttgtaaaaatgaaaatgtgactcacataaaatcaggaacttgacacagtgttgcattaataactttagggtgcagacatgctgtgtgaatctcacaatgcgtcgtagatgtcgcgtgttggaagggagcaggaggaaggactgatactggcaaatcagtagagtgaggtgatccttagcaacgtgccaggacacttcctgtgtgcctgcagttgtcagggaccatttgggatcccgaatctcattctctaaaactgctttcttgaaacatgttacttccttagtataatcaatgtatactcccttactggcctgaaacgttgtatagctacttattcagatactgaagaccaacggactgaaaaaaagaacaaacattagctattttatgctgcaagaaccaggacacacaattcgccaatcatcccaccatataaccttcgattgtgcttctcaactccaccccataatttctcccagagaccatctatcaccttttccccaaagaagaaacaaaaccagttgcaccttaaaccatggatattttttcctcaggggctttaaatagtttcctatgcaacgtgtcttgtagcacaaataaaattctacaaaagttgcagtaaattttatttggatattttaacctgttaagtgtgtgtgtgttttctgtacccaaccagactttaaataaaacaaacatgaaacctaa

SEQ ID NO: 181113 - DNA, 5231 bp, Homo sapiens
  Payload ID: 15668
  Gene Symbol: SH3BP4
  Gene Name: SH3-domain binding protein 4
  Uniprot ID: Q9P0V3
  ENST ID: ENST00000409212
  CDS Start-End: 508-3399
accttaagagggacaactgaaacagagacaagcaccccaacagtagggtgcttcgaggtcctggaggggagccctggccctgtggagagagaccgagtcgtgcagcgtccgtggcctgcatttgaaactgaagggcaagaggctggtgagatccgagagtcatgccgctgcgtggaggaacatgctgaacctctggaggaacggctctacctccaggtcaggctggaggcttttgcatttggtttggcgaggagagacagcaggatttctgggtgccggacatgcttctcggtcagagctgcgtctcccttctctcctggacagaaggccgtgtcctgggacttctctgatggcgagaggctgcggctgtaccaggaagaaacatattgccgagtggatgccgccgcgcagcgtgtttgcttgaggcagaagcttcagcatctgctgggataactggaggaagaaatatgaagccttagcggctttacccgggaagcgagtttcgagatggcggctcagcggatccgagcggccaactccaatggcctccctcgctgcaagtcagaggggaccctgattgacctgagcgaagggttttcagagacgagctttaatgacatcaaagtgccttctcccagtgccttgctcgtagacaaccccacacctttcggaaatgcaaaggaagtgattgcgatcaaggactattgccccaccaacttcaccacactgaagttctccaagggcgaccatctctacgtcttggacacatctggcggtgagtggtggtacgcacacaacaccaccgaaatgggctacatcccctcctcctatgtgcagcccttgaactaccggaactcaacactgagtgacagcggtatgattgataatcttccagacagcccagacgaggtagccaaggagctggagctgctcgggggatggacagatgacaaaaaagtaccaggcagaatgtacagtaataaccctttctggaatggggtccagaccaatccatttctgaatgggaacgtgcccgtcatgcccagcctggatgagctgaatcccaaaagtactgtggatttgctcctttttgacgcaggtacatcctccttcaccgaatccagctcagccaccacgaatagcactggcaacatcttcgatgagcttccagtcacaaacggactccacgcagagccgccggtcaggcgggacaaccccttcttcagaagcaagcgctcctacagtctctcggaactctccgtcctccaagccaagtccgatgctcccacatcgtcgagtttcttcaccggcttgaaatcacctgcccccgagcaatttcagagccgggaggattttcgaactgcctggctaaaccacaggaagctggcccggtcttgccacgacctggacttgcttggccaaagccctggttggggccagacccaagccgtggagacaaacatcgtgtgcaagctggatagctccgggggtgctgtccagcttcctgacaccagcatcagcatccacgtgcccgagggccacgtcgcccctggggagacccagcagatctccatgaaagccctgctggaccccccgctggagctcaacagtgacaggtcctgcagcatcagccctgtgctggaggtcaagctgagcaacctggaggtgaaaacctctatcatcttggagatgaaagtgtcagccgagataaaaaatgacctttttagcaaaagcacagtgggcctccagtgcctgaggagcgactcgaaggaagggccatatgtctccgtcccgctcaactgcagctgtggggacacggtccaggcacagctgcacaacctggagccctgtatgtacgtggctgtcgtggcccatggcccaagcatcctctacccttccaccgtgtgggacttcatcaataaaaaagtcacagtgggtctctacggccctaaacacatccacccatccttcaagacggtagtgaccatttttgggcatgactgtgccccaaagacgctcctggtcagcgaggtcacacgccaggcacccaaccctgccccggtggccctgcagctgtgggggaagcaccagttcgttttgtccaggccccaggatctcaaggtctgtatgttttccaatatgacgaattacgaggtcaaagccagcgagcaggccaaagtggtgcgaggattccagctgaagctgggcaaggtgagccgcctgatcttccccatcacctcccagaaccccaacgagctctctgacttcacgctgcgggttcaggtgaaggacgaccaggaggccatcctcacccagttttgtgtccagactcctcagccaccccctaaaagtgccatcaagccttccgggcaaaggaggtttctcaagaagaacgaagtcgggaaaatcatcctgtccccgtttgccaccactacaaagtacccgactttccaggaccgcccggtgtccagcctcaagtttggtaagttgctcaagactgtggtgcggcagaacaagaaccactacctgctggagtacaagaagggcgacgggatcgccctgctcagcgaggagcgggtcaggctccggggccagctgtggaccaaggagtggtacatcggctactaccagggcagggtgggcctcgtgcacaccaagaacgtgctggtggtcggcagggcccggcccagcctgtgctcgggccccgagctgagcacctcggtgctgctggagcagatcctgcggccctgcaaattcctcacgtacatctatgcctccgtgaggaccctgctcatggagaacatcagcagctggcgctccttcgctgacgccctgggctacgtgaacctgccgctcacctttttctgccgggcagagctggatagtgagcccgagcgggtggcgtccgtcctagaaaagctgaaggaggactgtaacaacactgagaacaaagaacggaagtccttccagaaggagcttgtgatggccctactgaagatggactgccagggcctggtggtcagactcatccaggactttgtgctcctgaccacggctgtagaggtggcccagcgctggcgggagctggctgagaagctggccaaggtctccaagcagcagatggacgcctacgagtctccccaccgggacaggaacggggttgtggacagcgaggccatgtggaagcctgcgtatgacttcttactcacctggagccatcagatcggggacagctaccgggatgtcatccaggagctgcacctgggcctggacaagatgaaaaaccccatcaccaagcgctggaagcacctcactgggactctgatcttggtgaactccctggacgttctgagagcagccgccttcagccctgcggaccaggacgacttcgtgatttgaatgggtcccctcccctcctgctgctctggagtgcaagccctcttctgccctgcgtgccctgctgtcaccgcggagctgaagagggaggaaggggcggctgctcagacagatttagggcccgccagctaggctacacccatcatgcgccgccctcctccatcgagggagaggcctgaagggactgcctactgcagctcgttgccaatcacatagctttctatttgttaagtataaatttaaatttaaaatcacttttttaacgaatggggggaagggatctatgagaaaggtggtatctaatttttttatggaccataaaggtttaaaagaaaataggggcacaggctgttgaggtttttatgttgttatagacctttttaaattatgttagagatgtatataggtatttaaaggtcactgggagcgtttctgattcccggccacactttgcatttcaacactcagcccggaaagatgctcgttcggttgttggacctctttcactccctgcgtgtaagaaggtgaatcacgtgggaaaaagtggcttttcagtaaacgggtacagctcattctttctgagaaggccccaggtcctgctccctcctcggatttgattgtcttccgtgctttgcctcactcgtagtaaatgaccatccatagaatatgtgaatctttggtgagcttcagtgggcagagtgaagtcccgcattagcatttaggtgccctgagctgtttctgccaatagattagaaagcagccatgagttgacagtctttagggcccctgccagtgtgcaattagtcattgacaagaacaatgccatttgagagtgaggtggtccctgctgctacgaggccattgtactgttttttccttgaggtcaaagcagtgcttcccatagagtttgctgcctcttctgtggacaggaagaaaacttcatgaccgaatcagagccttggtggccactgactctcgtgcttattgcagatgctgtggttggcctcacaagcaacgccttatgctgatgtgcagaggtgccagctgccatttgccaaactctgcatttcatttcatctaaggcttaacccctcttccttcctggtgtacctgtgtctcctcggaaggaagtcatagtttagatgaaaccattttttgtacaatgtaaagatcatctgagcaagatgagcattttgtaaaaatgaaaatgtgactcacataaaatcaggaacttgacacagtgttgcattaataactttagggtgcagacatgctgtgtgaatctcacaatgcgtcgtagatgtcgcgtgttggaagggagcaggaggaaggactgatactggcaaatcagtagagtgaggtgatccttagcaacgtgccaggacacttcctgtgtgcctgcagttgtcagggaccatttgggatcccgaatctcattctctaaaactgctttcttgaaacatgttacttccttagtataatcaatgtatactcccttactggcctgaaacgttgtatagctacttattcagatactgaagaccaacggactgaaaaaaagaacaaacattagctattttatgctgcaagaaccaggacacacaattcgccaatcatcccaccatataaccttcgattgtgcttctcaactccaccccataatttctcccagagaccatctatcaccttttccccaaagaagaaacaaaaccagttgcaccttaaaccatggatattttttcctcaggggctttaaatagtttcctatgcaacgtgtcttgtagcacaaataaaattctacaaaagttgcagtaaattttatttggatattttaa

SEQ ID NO: 181114 - DNA, 570 bp, Homo sapiens
  Payload ID: 15668
  Gene Symbol: SH3BP4
  Gene Name: SH3-domain binding protein 4
  ENST ID: ENST00000444916
  CDS Start-End: 403-570
aacagagacaagcaccccaacagtagggtgcttcgaggtcctggaggggagccctggccctgtggagagagaccgagtcgtgcagcgtccgtggcctgcatttgaaactgaagggcaagaggctggtgagatccgagagtcatgccgctgcgtggaggaacatgctgaacctctggaggaacggctctacctccagcgtctcccttctctcctggacagaaggccgtgtcctgggacttctctgatggcgagaggctgcggctgtaccaggaagaaacatattgccgagtggatgccgccgcgcagcgtgtttgcttgaggcagaagcttcagcatctgctgggataactggaggaagaaatatgaagccttagcggctttacccgggaagcgagtttcgagatggcggctcagcggatccgagcggccaactccaatggcctccctcgctgcaagtcagaggggaccctgattgacctgagcgaagggttttcagagacgagctttaatgacatcaaagtgccttctcccagtgccttgctcgtagacaaccccacacctttcggaaat

SEQ ID NO: 181115 - DNA, 593 bp, Homo sapiens
  Payload ID: 15668
  Gene Symbol: SH3BP4
  Gene Name: SH3-domain binding protein 4
  ENST ID: ENST00000416021
  CDS Start-End: 228-593
gtgagtcccgcggagccgcgcgcgcccccggctgggccgagccgctggccgacgagcggagcctcaggagccggcggggacgccatgcgagccaggaagaaacatattgccgagtggatgccgccgcgcagcgtgtttgcttgaggcagaagcttcagcatctgctgggataactggaggaagaaatatgaagccttagcggctttacccgggaagcgagtttcgagatggcggctcagcggatccgagcggccaactccaatggcctccctcgctgcaagtcagaggggaccctgattgacctgagcgaagggttttcagagacgagctttaatgacatcaaagtgccttctcccagtgccttgctcgtagacaaccccacacctttcggaaatgcaaaggaagtgattgcgatcaaggactattgccccaccaacttcaccacactgaagttctccaagggcgaccatctctacgtcttggacacatctggcggtgagtggtggtacgcacacaacaccaccgaaatgggctacatcccctcctcctatgtgcagcccttgaactaccggaactcaacactgagtgacagc

SEQ ID NO: 181116 - DNA, 500 bp, Homo sapiens
  Payload ID: 15668
  Gene Symbol: SH3BP4
  Gene Name: SH3-domain binding protein 4
  ENST ID: ENST00000454947
  CDS Start-End: 328-500
agcacagcagcaggggaagaggacagtgaggctgggatgcagcctccatgcagcctgtcgctttctccacaggagctctggcctgggccagactgccgagtcaccctgattcaggagtaggcgtctcccttctctcctggacagaaggccgtgtcctgggacttctctgatggcgagaggctgcggctgtaccaggaagaaacatattgccgagtggatgccgccgcgcagcgtgtttgcttgaggcagaagcttcagcatctgctgggataactggaggaagaaatatgaagccttagcggctttacccgggaagcgagtttcgagatggcggctcagcggatccgagcggccaactccaatggcctccctcgctgcaagtcagaggggaccctgattgacctgagcgaagggttttcagagacgagctttaatgacatcaaagtgccttctcccagtgccttgctcgtagacaaccccacacctttcggaaatgcaaa

SEQ ID NO: 181117 - DNA, 829 bp, Homo sapiens
  Payload ID: 15668
  Gene Symbol: SH3BP4
  Gene Name: SH3-domain binding protein 4
  ENST ID: ENST00000446904
  CDS Start-End: 311-829
cgcagttggctggtgtttgtttgcacaaggattctttggtaacaatctgcagtcggtttctggcggaatgtgaggtgaagtcacgactgactttcgggatggagcgtctcccttctctcctggacagaaggccgtgtcctgggacttctctgatggcgagaggctgcggctgtaccaggaagaaacatattgccgagtggatgccgccgcgcagcgtgtttgcttgaggcagaagcttcagcatctgctgggataactggaggaagaaatatgaagccttagcggctttacccgggaagcgagtttcgagatggcggctcagcggatccgagcggccaactccaatggcctccctcgctgcaagtcagaggggaccctgattgacctgagcgaagggttttcagagacgagctttaatgacatcaaagtgccttctcccagtgccttgctcgtagacaaccccacacctttcggaaatgcaaaggaagtgattgcgatcaaggactattgccccaccaacttcaccacactgaagttctccaagggcgaccatctctacgtcttggacacatctggcggtgagtggtggtacgcacacaacaccaccgaaatgggctacatcccctcctcctatgtgcagcccttgaactaccggaactcaacactgagtgacagcggtatgattgataatcttccagacagcccagacgaggtagccaaggagctggagctgctcgggggatggacagatgacaaaaaagtaccaggcagaatgtacagtaataaccctttctggaatggggtccagaccaatccatttctgaatggg

SEQ ID NO: 181118 - DNA, 2822 bp, Homo sapiens
  Payload ID: 15669
  Gene Symbol: SH3BP5
  Gene Name: SH3-domain binding protein 5 (BTK-associated)
  Uniprot ID: O60239
  ENST ID: ENST00000383791
  CDS Start-End: 222-1589
gcgctgactgccgcggcagaaagggggcggccgcgcccatttcctctgctccgccgcggccggaggtatccgcatcggcgagctgcgtctcccgggtgtcggccccggcggctccccgaccgtgcccggctgtggcgaggcggctccagcccagcctgtggcagccgcgacccccggggcgctccggagcccactgcgcggcgcgcgtgccggctgcctgcatggacgcggcactgaagcggagccgctcggaggagccagccgaaatcctgccgcctgcccgggacgaggaggaggaggaggaagaggggatggagcaggggctggaggaggaagaagaggtggatccccggatccagggagaactggagaagttaaatcagtccacggatgatatcaacagacgggagactgaacttgaggatgctcgtcagaagttccgctctgttctggttgaagcaacggtgaaactggatgaactggtgaagaaaattggcaaagctgtggaagactccaagccctactgggaggcacggagggtggcgaggcaggctcagctggaagctcagaaagccacgcaggacttccagagggccacagaggtgctccgtgccgccaaggagaccatctccctggccgagcagcggctgctggaggatgacaagcggcagttcgactccgcctggcaggagatgctgaatcacgccactcagagggtcatggaggcggagcagaccaagaccaggagcgagctggtgcataaggagacggcagccaggtacaatgccgccatgggccgcatgcgacagctggagaagaaactcaagagagccatcaacaagtccaagccttattttgaactcaaggcaaagtactatgtgcagctcgagcaactgaaaaagactgtggatgacctgcaggccaaactgaccctggcaaaaggcgagtacaagatggccctgaagaacctggagatgatctcagatgagatccacgagcggcggcgctccagtgccatggggcctcggggatgcggtgttggtgctgagggcagcagcacatctgtggaggatctgccagggagcaaacctgagcctgatgccatttctgtggcctcggaggcctttgaagatgacagctgtagcaactttgtgtctgaagatgactcggaaacccagtccgtgtccagctttagttcaggaccaacaagcccgtctgagatgcctgaccagttccctgcggttgtgaggcctggcagcctggatctgcccagccctgtgtccctgtcagagtttgggatgatgttcccagtgttgggccctcgaagtgaatgcagcggggcctcctcccctgaatgtgaagtagaacgaggagacagggcagaaggggcagagaataaaacaagtgacaaagccaacaacaaccggggcctcagcagtagcagtggcagtggtggcagcagtaagagccaaagcagcacctcccctgagggccaggccttggagaaccggatgaagcagctctccctacagtgctcaaagggaagagatggaattattgctgacataaaaatggtgcagattggctgattcatcctgggccctggccgatgtgcatatcaacatttatacatggaactggagaacattgtgccaataatcatttaatatatgccaaatcttacacgtctactctaaactgctctaatgaagtttcagtgaccttgagggctaaagattgttcttctgggtaagagctcttgggctggtttttcagagcagagttcttgttgtgggtagactgtgactaggttcacagcctttgtggaacattccgtataacggcattgtggaagcaataactagttcctatgaaagaaccagagctgggaagatggctgggaagccaggccaaagtgggggcaacagcttgcttctctttctcttctcaccctcagtttgtatgggaaaatggagatgtcctctccactttatcccacgatatctaaatgaaaaagaaagaaaacccacacacaaagcaaaaactcaagtattaagagcacatatttttgacccagtggaggcttaaaaaaaaaaaaatccaagaacacaattcattttcaccacctctggtgttcagagggggcttttaaaaaagcgtgtatgctgggatacccattaaaaccattttctagaaggctaccatgagctgcactttttggggtgggaaaggtgaatgccagtggggatgcggggggatgagggtaggagggacttatagaaggggatttgtggctgtgggggagaaggttctacagcataagccttatcctgccagccaaggggatttattctaagagaagtgcatgtgaagaatggttgccactgttattagattgacaagatgttaatttctctgtaggttgtaactttaaaaataaatgaaattatttaagggttatgctgcactagtattccttagaggaaacagttctttaaagttaggaaagggagtaggcaggcatgtgttggcaaaggctgttaatagtagttaagtgttaagactgcttttctttaacgttttcatggtaatgcatatttagagcactgtatttttgtcttgttaagaaaatttagcatttctaaaagaaaaaagcaaccctctttcaaactgttaattctgtcacagcctgtatattttagtcatttgtaaatctcttcatacaatagtgacttcttttttgactgatacagtatcttaattacaaggttattttgtacttgtcttaatacactaagtgtaataaaaacggcttgagaaaa

SEQ ID NO: 181119 - DNA, 1880 bp, Homo sapiens
  Payload ID: 15669
  Gene Symbol: SH3BP5
  Gene Name: SH3-domain binding protein 5 (BTK-associated)
  Uniprot ID: O60239
  ENST ID: ENST00000408919
  CDS Start-End: 548-1444
gagaaagccttgctatggatgtgacatttgggctgagatgtggatgatgagaaggagtcaggcagccgtgccctggaggagatagcgatgcagacagcagaagccctgaggacagagccagctgacagcccatgtggtgccagaggggagaactggagaagttaaatcagtccacggatgatatcaacagacgggagactgaacttgaggtccagtaggtgtttgcagatcccttcttaagcctcaactgtgtttcctcggtttcccctggctgcaggatgctcgtcagaagttccgctctgttctggttgaagcaacggtgaaactggatgaactggtgaagaaaattggcaaagctgtggaagactccaagccctactgggaggcacggagggtggcgaggcaggctcagctggaagctcagaaagccacgcaggacttccagagggccacagaggtgctccgtgccgccaaggagaccatctccctggccgagcagcggctgctggaggatgacaagcggcagttcgactccgcctggcaggagatgctgaatcacgccactcagagggtcatggaggcggagcagaccaagaccaggagcgagctggtgcataaggagacggcagccaggtacaatgccgccatgggccgcatgcgacagctggagaagaaactcaagagagccatcaacaagtccaagccttattttgaactcaaggcaaagtactatgtgcagctcgagcaactgaaaaagactgtggatgacctgcaggccaaactgaccctggcaaaaggcgagtacaagatggccctgaagaacctggagatgatctcagatgagatccacgagcggcggcgctccagtgccatggggcctcggggatgcggtgttggtgctgagggcagcagcacatctgtggaggatctgccagggagcaaacctgagcctgatgccatttctgtggcctcggaggcctttgaagatgacagctgtagcaactttgtgtctgaagatgactcggaaacccagtccgtgtccagctttagttcaggaccaacaagcccgtctgagatgcctgaccagttccctgcggttgtgaggcctggcagcctggatctgcccagccctgtgtccctgtcagagtttgggatgatgttcccagtgttgggccctcgaagtgaatgcagcggggcctcctcccctgaatgtgaagtagaacgaggagacagggcagaaggggcagagaataaaacaagtgacaaagccaacaacaaccggggcctcagcagtagcagtggcagtggtggcagcagtaagagccaaagcagcacctcccctgagggccaggccttggagaaccggatgaagcagctctccctacagtgctcaaagggaagagatggaattattgctgacataaaaatggtgcagattggctgattcatcctgggccctggccgatgtgcatatcaacatttatacatggaactggagaacattgtgccaataatcatttaatatatgccaaatcttacacgtctactctaaactgctctaatgaagtttcagtgaccttgagggctaaagattgttcttctgggtaagagctcttgggctggtttttcagagcagagttcttgttgtgggtagactgtgactaggttcacagcctttgtggaacattccgtataacggcattgtggaagcaataactagttcctatgaaagaaccagagctgggaagatggctgggaagccaggccaaagtgggggcaacagcttgcttctctttctcttctcaccctcagtttgtatgggaaaatggagatgtcctctccactttatcccacgatatctaaatgaaaaagaaagaaaa

SEQ ID NO: 181120 - DNA, 2190 bp, Homo sapiens
  Payload ID: 15669
  Gene Symbol: SH3BP5
  Gene Name: SH3-domain binding protein 5 (BTK-associated)
  Uniprot ID: O60239
  ENST ID: ENST00000426925
  CDS Start-End: 797-1693
aattcataaattcttggccagagtgtgcccatcaacaggggttacacttgccacctccttaaatcccagctcaatgcattctccatgctcctggctattcagggagaactggagaagttaaatcagtccacggatgatatcaacagacgggagactgaacttgaggatgctcgtcagaagttccgctctgttctggttgaagcaacggtgaaactggatgaactggtgaagaaaattggcaaagctgtggaagactccaagccctactgggaggcacggagggtggcgaggcagagatctggttctcttatttggaactcatcagatacatggcagagggtgtgaagaggtgctgggcccgtggtacagcagccacctttcagaaggccgtcaaaagagcatcttttcttgcttgaagaaataagggattcataactgaagcagagagaactgggagaagagagtttacccttaaatgttgctgaattgaaatactaaaaaattcctaaaaaggcaaatacaaatcccattttaggatcctgtgggattcatcctgtctcctggagttggtgtgaagcatatagaatttcgctcttgtcatccaggctggagtgcaatggcgtgatctcggctcactgcaacctccacctcccaggctcagctggaagctcagaaagccacgcaggacttccagagggccacagaggtgctccgtgccgccaaggagaccatctccctggccgagcagcggctgctggaggatgacaagcggcagttcgactccgcctggcaggagatgctgaatcacgccactcagagggtcatggaggcggagcagaccaagaccaggagcgagctggtgcataaggagacggcagccaggtacaatgccgccatgggccgcatgcgacagctggagaagaaactcaagagagccatcaacaagtccaagccttattttgaactcaaggcaaagtactatgtgcagctcgagcaactgaaaaagactgtggatgacctgcaggccaaactgaccctggcaaaaggcgagtacaagatggccctgaagaacctggagatgatctcagatgagatccacgagcggcggcgctccagtgccatggggcctcggggatgcggtgttggtgctgagggcagcagcacatctgtggaggatctgccagggagcaaacctgagcctgatgccatttctgtggcctcggaggcctttgaagatgacagctgtagcaactttgtgtctgaagatgactcggaaacccagtccgtgtccagctttagttcaggaccaacaagcccgtctgagatgcctgaccagttccctgcggttgtgaggcctggcagcctggatctgcccagccctgtgtccctgtcagagtttgggatgatgttcccagtgttgggccctcgaagtgaatgcagcggggcctcctcccctgaatgtgaagtagaacgaggagacagggcagaaggggcagagaataaaacaagtgacaaagccaacaacaaccggggcctcagcagtagcagtggcagtggtggcagcagtaagagccaaagcagcacctcccctgagggccaggccttggagaaccggatgaagcagctctccctacagtgctcaaagggaagagatggaattattgctgacataaaaatggtgcagattggctgattcatcctgggccctggccgatgtgcatatcaacatttatacatggaactggagaacattgtgccaataatcatttaatatatgccaaatcttacacgtctactctaaactgctctaatgaagtttcagtgaccttgagggctaaagattgttcttctgggtaagagctcttgggctggtttttcagagcagagttcttgttgtgggtagactgtgactaggttcacagcctttgtggaacattccgtataacggcattgtggaagcaataactagttcctatgaaagaaccagagctgggaagatggctgggaagccaggccaaagtgggggcaacagcttgcttctctttctcttctcaccctcagtttgtatgggaaaatggagatgtcctctccactttatcccacgatatctaaatgaaaaagaaagaaaacccacacacaaagcaaaaactcaagtattaagagcacatatttttgacccagtggaggctt

SEQ ID NO: 181121 - DNA, 763 bp, Homo sapiens
  Payload ID: 15669
  Gene Symbol: SH3BP5
  Gene Name: SH3-domain binding protein 5 (BTK-associated)
  ENST ID: ENST00000450625
  CDS Start-End: 69-278
gcctgtggcagccgcgacccccggggcgctccggagcccactgcgcggcgcgcgtgccggctgcctgcatggacgcggcactgaagcggagccgctcggaggagccagccgaaatcctgccgcctgcccgggacgaggaggaggaggaggaagaggggatggagcaggggctggaggaggaagaagaggtggatccccggatccagggagaactggagaagttaaatcagtccacggatgatatcaacagacgggagactgaacttgaggtccagtaggtgtttgcagatcccttcttaagcctcaactgtgtttcctcggtttcccctggctgcaggatgctcgtcagaagttccgctctgttctggttgaagcaacggtgaaactggatgaactggtgaagaaaattggcaaagctgtggaagactccaagccctactgggaggcacggagggtggcgaggcaggctcagctggaagctcagaaagccacgcaggacttccagagggccacagaggtgctccgtgccgccaaggagaccatctccctggccgagcagcggctgctggaggatgacaagcggcagttcgactccgcctggcaggagatgctgaatcacgccactcagagggtcatggaggcggagcagaccaagaccaggagcgagctggtgcataaggagacggcagccaggtacaatgccgccatgggccgcatgcgacagctggagaagaaactcaagagagccatcaacaagtccaag

SEQ ID NO: 181122 - DNA, 903 bp, Homo sapiens
  Payload ID: 15669
  Gene Symbol: SH3BP5
  Gene Name: SH3-domain binding protein 5 (BTK-associated)
  ENST ID: ENST00000366391
  CDS Start-End: 520-903
aggcttttttttttttttttttttttgagacagagtctcactttgttgcccaggctggagtgcagtggcacgatcttggcttgctgcaacctccacctcctggattcaagtgattctcctgcctcagcctcccgagtagctgggagtacaggctcccacaaccatgcccagctaatttttgtatttaggtagaggcggggtttcaccatgttggccaagctggtcttgaactcctggcctcaagtgatccacccgccttggccttccatagtgctgggattacaggtgtgttactgcgcccagcccataagctgccttttaaaattttctccatggagctcttcccatgaaagctgttagtgtctgtaagtcatgaaggctcagctggaagctcagaaagccacgcaggacttccagagggccacagaggtgctccgtgccgccaaggagaccatctccctggccgagcagcggctgctggaggatgacaagcggcagttcgactccgcctggcaggagatgctgaatcacgccactcagagggtcatggaggcggagcagaccaagaccaggagcgagctggtgcataaggagacggcagccaggtacaatgccgccatgggccgcatgcgacagctggagaagaaactcaagagagccatcaacaagtccaagccttattttgaactcaaggcaaagtactatgtgcagctcgagcaactgaaaaagactgtggatgacctgcaggccaaactgaccctggcaaaaggcgagtacaagatggccctgaagaacctggagatgatctcagatgagatccacgagcggcggcgctccagtgccatggggcctcggggatgcggtgttggtgctgagggcagcagcacatctgtggaggatctg

SEQ ID NO: 181123 - DNA, 1900 bp, Homo sapiens
  Payload ID: 15669
  Gene Symbol: SH3BP5
  Gene Name: SH3-domain binding protein 5 (BTK-associated)
  ENST ID: ENST00000412806
  CDS Start-End: 149-322
atcggcgagctgcgtctcccgggtgtcggccccggcggctccccgaccgtgcccggctgtggcgaggcggctccagcccagcctgtggcagccgcgacccccggggcgctccggagcccactgcgcggcgcgcgtgccggctgcctgcatggacgcggcactgaagcggagccgctcggaggagccagccgaaatcctgccgcctgcccgggacgaggaggaggaggaggaagaggggatggagcaggggctggaggaggaagaagaggtggatccccggatccagcacatctgtggaggatctgccagggagcaaacctgagcctgatgccatttctgtggcctcggaggcctttgaagatgacagctgtagcaactttgtgtctgaagatgactcggaaacccagtccgtgtccagctttagttcaggaccaacaagcccgtctgagatgcctgaccagttccctgcggttgtgaggcctggcagcctggatctgcccagccctgtgtccctgtcagagtttgggatgatgttcccagtgttgggccctcgaagtgaatgcagcggggcctcctcccctgaatgtgaagtagaacgaggagacagggcagaaggggcagagaataaaacaagtgacaaagccaacaacaaccggggcctcagcagtagcagtggcagtggtggcagcagtaagagccaaagcagcacctcccctgagggccaggccttggagaaccggatgaagcagctctccctacagtgctcaaagggaagagatggaattattgctgacataaaaatggtgcagattggctgattcatcctgggccctggccgatgtgcatatcaacatttatacatggaactggagaacattgtgccaataatcatttaatatatgccaaatcttacacgtctactctaaactgctctaatgaagtttcagtgaccttgagggctaaagattgttcttctgggtaagagctcttgggctggtttttcagagcagagttcttgttgtgggtagactgtgactaggttcacagcctttgtggaacattccgtataacggcattgtggaagcaataactagttcctatgaaagaaccagagctgggaagatggctgggaagccaggccaaagtgggggcaacagcttgcttctctttctcttctcaccctcagtttgtatgggaaaatggagatgtcctctccactttatcccacgatatctaaatgaaaaagaaagaaaacccacacacaaagcaaaaactcaagtattaagagcacatatttttgacccagtggaggcttaaaaaaaaaaaaatccaagaacacaattcattttcaccacctctggtgttcagagggggcttttaaaaaagcgtgtatgctgggatacccattaaaaccattttctagaaggctaccatgagctgcactttttggggtgggaaaggtgaatgccagtggggatgcggggggatgagggtaggagggacttatagaaggggatttgtggctgtgggggagaaggttctacagcataagccttatcctgccagccaaggggatttattctaagagaagtgcatgtgaagaatggttgccactgttattagattgacaagatgttaatttctctgtaggttgtaactttaaaaataaatgaaattatttaagggttatgctgcactagtattccttagaggaaacagttctttaaagttaggaaagggagtaggcaggcatgtgttggcaaaggctgttaatagtagttaagtgttaagactgcttttctttaacgttttcatggtaatgcatatttagagcactgtatttttgtcttgttaagaaaatttagcatttctaaaagaaaaaagcaaccctctttcaaac

SEQ ID NO: 181124 - DNA, 826 bp, Homo sapiens
  Payload ID: 15669
  Gene Symbol: SH3BP5
  Gene Name: SH3-domain binding protein 5 (BTK-associated)
  ENST ID: ENST00000417936
  CDS Start-End: 674-826
tagctgggagtacaggctcccacaaccatgcccagctaatttttgtatttaggtagaggcggggtttcaccatgttggccaagctggtcttgaactcctggcctcaagtgatccacccgccttggccttccatagtgctgggattacaggtgtgttactgcgcccagcccataagctgccttttaaaattttctccatggagctcttcccatgaaagctgttagtgtctgtaagtcatgaagagatctggttctcttatttggaactcatcagatacatggcagagggtgtgaagaggtgctgggcccgtggtacagcagccacctttcagaaggccgtcaaaagagcatcttttcttgcttgaagaaataagggattcataactgaagcagagagaactgggagaagagagtttacccttaaatgttgctgaattgaaatactaaaaaattcctaaaaaggcaaatacaaatcccattttaggatcctgtgggattcatcctgtctcctggagttggtgtgaagcatataggctcagctggaagctcagaaagccacgcaggacttccagagggccacagaggtgctccgtgccgccaaggagaccatctccctggccgagcagcggctgctggaggatgacaagcggcagttcgactccgcctggcaggagatgctgaatcacgccactcagagggtcatggaggcggagcagaccaagaccaggagcgagctggtgcataaggagacggcagccaggtacaatgccgccatgggccgcatgcgacagctggagaagaaactcaagagagccatcaacaagtcc

SEQ ID NO: 181125 - DNA, 3997 bp, Homo sapiens
  Payload ID: 15670
  Gene Symbol: SGIP1
  Gene Name: SH3-domain GRB2-like (endophilin) interacting protein 1
  Uniprot ID: Q9BQI5
  ENST ID: ENST00000237247
  CDS Start-End: 139-2718
agtttgattccagagccccactcggcggacggaatagacctcagcagcggcgtggtgaggacttagctgggacctggaatcgtatcctcctgtgttttttcagactccttggaaattaaggaatgcaattctgccaccatgatggaaggattgaaaaaacgtacaaggaaggcctttggaatacggaagaaagaaaaggacactgattctacaggttcaccagatagagatggaattcaggggaaaaaaaagacccagaagactcagcttctcctcacctcttgcttctggctcagagccctctcgttaactctgtctcagaagaaaagcaatggggcaccaaatggattttatgcggaaattgattgggaaagatataactcacctgagctggatgaagaaggctacagcatcagacccgaggaacccggctctaccaaaggaaagcacttttattcttcaagtgaatcggaagaagaagaagaatcacataagaaatttaatatcaagattaaaccattgcaatctaaagacattcttaagaatgctgcaactgtagatgaattgaaggcatcaataggcaacatcgcactttccccatcaccagtgaggaaaagtccgaggcgcagcccgggtgcaattaaaaggaacttatccagtgaagaagtggcaagacccaggcgttccacaccaactccagaacttataagcaaaaagcctccagatgacactacggcccttgctcctctctttggcccaccactagaatcagcttttgatgaacagaagacagaagttcttttagatcagcctgagatatggggttcaggccaaccaattaatccaagcatggagtcgccaaagttaacaaggccttttcccactggaacacctccaccactgcctccaaaaaatgtaccagctaccccaccccgaacaggatcccccttaacaattggaccaggaaatgaccagtcagccacagaggtcaaaattgaaaaactaccatccatcaatgacttggacagcatttttgggccagtattgtcccccaagtctgttgctgttaatgctgaagaaaagtgggtccatttttctgatacatccccggaacatgttactccggagttgactccaagggaaaaagtggtgtccccaccagctacaccagacaacccagctgactccccagctccaggccctctcggccccccaggtcccacaggccccccagggcctcctgggcctcctcgcaatgtactatcgccgctcaatttagaagaagtccagaagaaagtcgctgagcagaccttcattaaagatgattacttagaaacaatctcatctcctaaagattttgggttgggacaaagagcaactccacctcccccaccaccacccacctacaggactgtggtttcgtcccccggacctggctcgggccctggtccggggaccaccagtgatgggaaaactgaggctcagagatatcaagtaatttgcccaagtttacaagctggaggcaatgaactggattcatactcaggtgcatcatcccctgctcgaccagccactcctttggttccttgcagaagtaccactccacctccacctcctccccggcctccatcccggccaaagctacctccaggaaaacctggagttggagatgtgtccagaccttttagccctcccattcattcttccagccctcctccaatagcacccttagcgcgggctgaaagcacttcttcaatatcgtcaaccaattccttgagcgcagccaccactcccacagttgagaatgaacagccttccctcgtttggtttgacagaggaaagttttatttgacttttgaaggttcttccaggggacccagccccctaaccatgggagctcaggacactctccctgttgcagcagcatttacagaaacagtcaatgcctatttcaaaggagcagacccaagcaaatgtatcgttaagattaccggagaaatggtgttgtcatttcctgctggcatcaccagacactttgccaacaacccgtccccagctgctctgacttttcgggtgataaatttcagcaggttagaacacgtcctgccaaacccccaacttctctgctgtgataatacacaaaatgatgccaataccaaggaattctgggtaaacatgccaaatttgatgactcacctaaagaaagtgtctgaacaaaaaccccaggctacatattataacgttgacatgctcaaatatcaggtgtctgcccagggcattcagtccacacctctgaacctggcagtgaattggcgatgtgagccttcaagcactgacctgcgcatagattacaaatataatacagatgcaatgacgactgctgtggccctcaacaatgtgcagttcctggtccccatcgacggaggagtcaccaagctccaggcagtgctcccaccagcagtctggaatgctgaacaacagagaatattgtggaagattcctgatatctctcagaagtcagaaaatggaggggtgggttctttgttggcaagatttcagttatctgaaggcccaagcaaaccttctccattggttgtgcagttcacaagtgaaggaagcaccctttctggctgtgacattgaacttgttggagcagggtatcgattttcactcatcaagaaaaggtttgctgcaggaaaatacttggcagataactaatgaaatcttatgcaaggatttggaggattcatataatggagaactgatgtatgagaaacagattttaattttggtttgatgaaaacaaaccaatatctgcacttgggatatatcaggtggaaagtcaatgactttcatctgtgatttccctcacacactaccatgatgaccagtcctacagtatttacttctaggtgtaatattgttaatggttttaaaatgtaattattgtatttgtaaattgtactctcattccagtaaggcagttagacacttgagttttagcattttaccattcctgaaatggatgtaatttaaactgtggtatgtaaatttaatagtagtattgttgaatggcacaatgcttacagaggtagattgcattttgtcaatatataaaatttaaatataatattgatagctgtcataaagggggtgccacatattaaagaaacttaagtggaaccagaagaaaaagaaacaaacttacttttcttcaatgcttagtatgttttactctagtgctaaataaaaactctatcttcaaatgtttagtgggttaaattgagaaactatttcagaaaaaaattctaaggttacagcatattcaaagaaaagcattagttaccactttttaaaaagcttttttttcaaactgcaaatttcataaaaatgcaaactgtgtaaacagggcctcttatttttataacttgtgtaaaaagggaaagcaattcatatttaaagtttaagtatattaaattataatcaagagtaaagaagatgttgaagtcttaactacttgcccctctctacagtttcgcaaatgtggggattgctgaataatcagtcagactaaaaccaaaattgtgattttaagatttcaagactttccgtagttgaactggttaagaatttttgcttagttactctgaatagatgatcttactcatccagtatgggggaatgatacctcacgtcttcctctttacccacaggaatcaaaacgctgagactgagaattttagggaaaaaaaagtccactgtttagatccagaaggagagttttaatcattgtttatatcatttgagaatgaaaaaataagcttcataaatgaaattctattcacattactgtgtaataaatttccttttggatgattaggattcattgtataaaactgtaaatctttgccattcttggagaagcaaaaggagagttatcaaaaatgtatgtcgtttcatcgttgcaaggtataataaaaactgtaattattcaatc

SEQ ID NO: 181126 - DNA, 7768 bp, Homo sapiens
  Payload ID: 15670
  Gene Symbol: SGIP1
  Gene Name: SH3-domain GRB2-like (endophilin) interacting protein 1
  Uniprot ID: Q9BQI5
  ENST ID: ENST00000371037
  CDS Start-End: 78-2564
cttagctgggacctggaatcgtatcctcctgtgttttttcagactccttggaaattaaggaatgcaattctgccaccatgatggaaggattgaaaaaacgtacaaggaaggcctttggaatacggaagaaagaaaaggacactgattctacaggttcaccagatagagatggaattcagcccagcccacacgaaccaccctacaatagcaaagcagagtgtgcgcgtgaaggaggaaaaaaagtttcgaagaaaagcaatggggcaccaaatggattttatgcggaaattgattgggaaagatataactcacctgagctggatgaagaaggctacagcatcagacccgaggaacccggctctaccaaaggaaagcacttttattcttcaagtgaatcggaagaagaagaagaatcacataagaaatttaatatcaagattaaaccattgcaatctaaagacattcttaagaatgctgcaactgtagatgaattgaaggcatcaataggcaacatcgcactttccccatcaccagtgaggaaaagtccgaggcgcagcccgggtgcaattaaaaggaacttatccagtgaagaagtggcaagacccaggcgttccacaccaactccagaacttataagcaaaaagcctccagatgacactacggcccttgctcctctctttggcccaccactagaatcagcttttgatgaacagaagacagaagttcttttagatcagcctgagatatggggttcaggccaaccaattaatccaagcatggagtcgccaaagttaacaaggccttttcccactggaacacctccaccactgcctccaaaaaatgtaccagctaccccaccccgaacaggatcccccttaacaattggaccaggaaatgaccagtcagccacagaggtcaaaattgaaaaactaccatccatcaatgacttggacagcatttttgggccagtattgtcccccaagtctgttgctgttaatgctgaagaaaagtgggtccatttttctgatacatccccggaacatgttactccggagttgactccaagggaaaaagtggtgtccccaccagctacaccagacaacccagctgactccccagctccaggccctctcggccccccaggtcccacaggccccccagggcctcctgggcctcctcgcaatgtactatcgccgctcaatttagaagaagtccagaagaaagtcgctgagcagaccttcattaaagatgattacttagaaacaatctcatctcctaaagattttgggttgggacaaagagcaactccacctcccccaccaccacccacctacaggactgtggtttcgtcccccggacctggctcgggccctggtccggggaccaccagtggtgcatcatcccctgctcgaccagccactcctttggttccttgcagaagtaccactccacctccacctcctccccggcctccatcccggccaaagctacctccaggaaaacctggagttggagatgtgtccagaccttttagccctcccattcattcttccagccctcctccaatagcacccttagcgcgggctgaaagcacttcttcaatatcgtcaaccaattccttgagcgcagccaccactcccacagttgagaatgaacagccttccctcgtttggtttgacagaggaaagttttatttgacttttgaaggttcttccaggggacccagccccctaaccatgggagctcaggacactctccctgttgcagcagcatttacagaaacagtcaatgcctatttcaaaggagcagacccaagcaaatgtatcgttaagattaccggagaaatggtgttgtcatttcctgctggcatcaccagacactttgccaacaacccgtccccagctgctctgacttttcgggtgataaatttcagcaggttagaacacgtcctgccaaacccccaacttctctgctgtgataatacacaaaatgatgccaataccaaggaattctgggtaaacatgccaaatttgatgactcacctaaagaaagtgtctgaacaaaaaccccaggctacatattataacgttgacatgctcaaatatcaggtgtctgcccagggcattcagtccacacctctgaacctggcagtgaattggcgatgtgagccttcaagcactgacctgcgcatagattacaaatataatacagatgcaatgacgactgctgtggccctcaacaatgtgcagttcctggtccccatcgacggaggagtcaccaagctccaggcagtgctcccaccagcagtctggaatgctgaacaacagagaatattgtggaagattcctgatatctctcagaagtcagaaaatggaggggtgggttctttgttggcaagatttcagttatctgaaggcccaagcaaaccttctccattggttgtgcagttcacaagtgaaggaagcaccctttctggctgtgacattgaacttgttggagcagggtatcgattttcactcatcaagaaaaggtttgctgcaggaaaatacttggcagataactaatgaaatcttatgcaaggatttggaggattcatataatggagaactgatgtatgagaaacagattttaattttggtttgatgaaaacaaaccaatatctgcacttgggatatatcaggtggaaagtcaatgactttcatctgtgatttccctcacacactaccatgatgaccagtcctacagtatttacttctaggtgtaatattgttaatggttttaaaatgtaattattgtatttgtaaattgtactctcattccagtaaggcagttagacacttgagttttagcattttaccattcctgaaatggatgtaatttaaactgtggtatgtaaatttaatagtagtattgttgaatggcacaatgcttacagaggtagattgcattttgtcaatatataaaatttaaatataatattgatagctgtcataaagggggtgccacatattaaagaaacttaagtggaaccagaagaaaaagaaacaaacttacttttcttcaatgcttagtatgttttactctagtgctaaataaaaactctatcttcaaatgtttagtgggttaaattgagaaactatttcagaaaaaaattctaaggttacagcatattcaaagaaaagcattagttaccactttttaaaaagcttttttttcaaactgcaaatttcataaaaatgcaaactgtgtaaacagggcctcttatttttataacttgtgtaaaaagggaaagcaattcatatttaaagtttaagtatattaaattataatcaagagtaaagaagatgttgaagtcttaactacttgcccctctctacagtttcgcaaatgtggggattgctgaataatcagtcagactaaaaccaaaattgtgattttaagatttcaagactttccgtagttgaactggttaagaatttttgcttagttactctgaatagatgatcttactcatccagtatgggggaatgatacctcacgtcttcctctttacccacaggaatcaaaacgctgagactgagaattttagggaaaaaaaagtccactgtttagatccagaaggagagttttaatcattgtttatatcatttgagaatgaaaaaataagcttcataaatgaaattctattcacattactgtgtaataaatttccttttggatgattaggattcattgtataaaactgtaaatctttgccattcttggagaagcaaaaggagagttatcaaaaatgtatgtcgtttcatcgttgcaaggtataataaaaactgtaattattcaatctggccctgccatatgaacatttagaaagacaaacttcttcgggagtctcagttgtaaaaccttccctcattaatatctgaaaatgttagtcttcctttaagtcatagaacttatttaaacataaaccaatttctattacaggttatgctattaaatagctgtaattattaagttattatttttataattagttgttaaatttcattttacacccactcaaatttaacaaagaatctttagcccctttaaattttagaattaaattaaatttttaaagttttacttctaaaatgagattgtgactggcaattgtttatagtgaaactttttaaattaatctttgtactcctctatcagtgcttgctaccaagagaatgtccaaaatgatttgttttaccatgggaaaattcttactattcaacaaactctcagttggccccctacagcagtctggtgttgaagtttctttgaacgaactaaatatactcattttatgtaaaggtatccaatttgattttgaaaccaaaatagaaaatgcaaaattctaaattccatgaaacatggaatttatgacaccaaaatcaatggagagtaagcagcagcaaactgagaattatccagcatatgaatataacaatgtgtttttaagtaatcaattcatttaaaaaattgaatattaatacaaagcatattaaaaacatgtaaatattactggttctcatgtctttgtatttatattttattttgttttattttgtatagatctagaatgaattagtaattaaacacaagggtttttttcccaaaaaataattttactgatttttaaaaatttaattaaaaacatagattacagtaatctctaacattattcaaatctttctagggattaaattagaaactatgaagaaatcctataatctcttaactggtctttatggaacagaatgggagtcaacaatttcaaaatgattgaactatgagtaaccagaacctcaatagaaaatgtatcccttcacctttcagaaaagagatcaaataataacacaataagctggtatcagggatttgcattttgacattttgttgtttctttttaattttgtagattataatctcctgttacatctatatccacagtactgtagaataagaattcatgtcctgaaaatggtcccaggcaatgaaagagtctcagttatcaaagacattaagtcagattcatttattcattttattcccaagtcagaacaaaatgaactagtaggtaataaaactattttcagtactaggggttaaaacaaaaagaaattgttctagttaaccagaacaccatttcctgaacgttatgatctttaaaaggttctgctttagcaagataaaaagtataaatgatgctactttattttggcaacatggaaattttgtttttcttttccaataaaatccatattttcgtgaaatttttaaaaataaatttgtatcaaggattagtctgaattttatcataatagaaatttataattactaagaattaaatttttaatcatttttaaagctgtgttcttctctacacccacagccaaaatggaaattcactgtatggtatttgggaatatatttcacctgtaaaagaaagaatgtccacaattcaaacggttttgagttaatagataggaatccctcagtcaaactacagaattttttttgttttatatattcttagtcagcagagtgtttgagctataattacaagtatttccacttctaaatcttcttttagaaaagcagataactataataccttggctctgccactgactcctgccgtatgatattggacaaatcactgcccttttcagtttctcatctttagaatggggagttgggattgccagtggttttcaagcttttcttaacagcagggctttttttctaataaaattgcacatggaatcctggtaggcaaaacagctcaaagcaatgcaggagtttctccaacagtttaaattggggctccccagagcatggtttaaataccataacagtacacaatgatctatcatgtgtcttccaactctgaagttccacagttgtaatttactcagataaaccaccttttgaggctttataagcaaacttgtaaaaacacagtaattgaatgatatacaataaaaactgacagagtgtttaccatgtaccagtcactagagatattagctcatttaattctcttatcaatcaaaaaattgtaagtactctttttaattcctgttttacaagtgatgacactgaggcttaaatagaataatctccccaaaatgacacggcagctgaaagtaacccagctattctgactgcaaaggaaacgccttaattgctttgtccaccctgaacaaaacaatctgttttatgtcactatacgtactccatttgaatgccaaggtagaaggcaccatgaaaaaccattaccaaaataaggataattccaataacaaaactgtcaaaaaagaatcactgcttctcaaaatatgattggtatcatcacttattaatgttttgtatcatcacttattaatgattttggcttggtcaccactatgcctggaagatagtaggcactgataaacattgttaaacaccgtaacaacacaaaatgatctaccacatatcaatgtcttccatctctgaaattccatgattctactttactcagatataccaccttttgtggcattataaggaaacatgtataatcaagttcatacaagctatacacagtaggcatcgataaatttgtattgacagcataaacttctagggatgagatttgggaatatacattttgataagtgctccaaatttgagaatcattgctctagtagatctctaaggtccttcttagttctgacattatatcagattttaagcattaaattctaagatgaaaaccatttttctagtcagtttatttttcattcagtccacttaatttcctccaatcttaaaaaatttttttccctaggaaaatccctatctttttcttaaagttactctgttatactatctcagtctcaaagtagcctgaaatgcattttctcattttcatatttctgtccttttcttcaatgtcttaaaagacttgaagtagaagggaagttgcaagctgttatttattcaaatacaaaatcctaatcaatgtttccttctttgcaagggacattcagatctctaacttgtgagttgaacctatttattttgtaagcttttgactttacaaacatgtggtagcctcattctaaaagagttgcacgaatattttttctcaaaataaccacaggctgtaaattaaattgaacaatacagtagaatatgcagatacatactaaacagatgagtgtgtgtgtatgtgtctgtgtttaagcttttccttttccaaaagattatacatttgagcaaaatcccattcagtctaaatgtactcattttgccacatggttttctgatcagcaatttttttaaaaaatggaagtgttacattatatttaataatatcaaaacaagagtgatctctaaatatagctttgaaagttaatataatatgatgtgtccatgcaatgagtcaaattagattgttgatataaatgaacaaatcaatccaagttacattgattaaagggactatttggatgaccagcctcaccatcttttactgtgtgcactttcctcttaaggttttattgtattttccctgctcctttaggcttttttttcatgtggaaaacagtatctaaatgccattctctcacttatgaattaaatatggctaccattaatgttcctttttgtcagtggagtgtatggaaggaaaatgagataggagtacattgcttaagtctctaaatattaaaaacaacaacaaaac

SEQ ID NO: 181127 - DNA, 4080 bp, Homo sapiens
  Payload ID: 15670
  Gene Symbol: SGIP1
  Gene Name: SH3-domain GRB2-like (endophilin) interacting protein 1
  Uniprot ID: Q9BQI5
  ENST ID: ENST00000371039
  CDS Start-End: 195-2090
ggagaaagagagacggagagagagagagacgcacagatgtgcacggaggccacagacactgacatttggaattccttcaggcggacggaatagacctcagcagcggcgtggtgaggacttagctgggacctggaatcgtatcctcctgtgttttttcagactccttggaaattaaggaatgcaattctgccaccatgatggaaggattgaaaaaacgtacaaggaaggcctttggaatacggaagaaagaaaaggacactgattctacaggttcaccagatagagatggaattaagaaaagcaatggggcaccaaatggattttatgcggaaattgattgggaaagatataactcacctgagctggatgaagaaggctacagcatcagacccgaggaacccggctctaccaaaggaaagcacttttattcttcaagtgaatcggaagaagaagaagaatcacataagaaatttaatatcaagattaaaccattgcaatctaaagacattcttaagaatgctgcaactgtagatgaattgaaggcatcaataggcaacatcgcactttccccatcaccagtgggtgcaattaaaaggaacttatccagtgaagaagtggcaagacccaggcgttccacaccaactccagaacttataagcaaaaagcctccagatgacactacggcccttgctcctctctttggcccaccactagaatcagcttttgatgaacagaagacagaagttcttttagatcagcctgagatatggggttcaggccaaccaattaatccaagcatggagtcgccaaagttaacaaggccttttcccactggaacacctccaccactgcctccaaaaaatgtaccagctaccccaccccgaacaggatcccccttaacaattggaccaggtgcatcatcccctgctcgaccagccactcctttggttccttgcagaagtaccactccacctccacctcctccccggcctccatcccggccaaagctacctccaggaaaacctggagttggagatgtgtccagaccttttagccctcccattcattcttccagccctcctccaatagcacccttagcgcgggctgaaagcacttcttcaatatcgtcaaccaattccttgagcgcagccaccactcccacagttgtgtcagaagacgatgttttttatgacaaactgccctcgtttgaaaggcgctgtgaaacgcctgcaggttcttccaggggacccagccccctaaccatgggagctcaggacactctccctgttgcagcagcatttacagaaacagtcaatgcctatttcaaaggagcagacccaagcaaatgtatcgttaagattaccggagaaatggtgttgtcatttcctgctggcatcaccagacactttgccaacaacccgtccccagctgctctgacttttcgggtgataaatttcagcaggttagaacacgtcctgccaaacccccaacttctctgctgtgataatacacaaaatgatgccaataccaaggaattctgggtaaacatgccaaatttgatgactcacctaaagaaagtgtctgaacaaaaaccccaggctacatattataacgttgacatgctcaaatatcaggtgtctgcccagggcattcagtccacacctctgaacctggcagtgaattggcgatgtgagccttcaagcactgacctgcgcatagattacaaatataatacagatgcaatgacgactgctgtggccctcaacaatgtgcagttcctggtccccatcgacggaggagtcaccaagctccaggcagtgctcccaccagcagtctggaatgctgaacaacagagaatattgtggaagattcctgatatctctcagaagtcagaaaatggaggggtgggttctttgttggcaagatttcagttatctgaaggcccaagcaaaccttctccattggttgtgcagttcacaagtgaaggaagcaccctttctggctgtgacattgaacttgttggagcagggtatcgattttcactcatcaagaaaaggtttgctgcaggaaaatacttggcagataactaatgaaatcttatgcaaggatttggaggattcatataatggagaactgatgtatgagaaacagattttaattttggtttgatgaaaacaaaccaatatctgcacttgggatatatcaggtggaaagtcaatgactttcatctgtgatttccctcacacactaccatgatgaccagtcctacagtatttacttctaggtgtaatattgttaatggttttaaaatgtaattattgtatttgtaaattgtactctcattccagtaaggcagttagacacttgagttttagcattttaccattcctgaaatggatgtaatttaaactgtggtatgtaaatttaatagtagtattgttgaatggcacaatgcttacagaggtagattgcattttgtcaatatataaaatttaaatataatattgatagctgtcataaagggggtgccacatattaaagaaacttaagtggaaccagaagaaaaagaaacaaacttacttttcttcaatgcttagtatgttttactctagtgctaaataaaaactctatcttcaaatgtttagtgggttaaattgagaaactatttcagaaaaaaattctaaggttacagcatattcaaagaaaagcattagttaccactttttaaaaagcttttttttcaaactgcaaatttcataaaaatgcaaactgtgtaaacagggcctcttatttttataacttgtgtaaaaagggaaagcaattcatatttaaagtttaagtatattaaattataatcaagagtaaagaagatgttgaagtcttaactacttgcccctctctacagtttcgcaaatgtggggattgctgaataatcagtcagactaaaaccaaaattgtgattttaagatttcaagactttccgtagttgaactggttaagaatttttgcttagttactctgaatagatgatcttactcatccagtatgggggaatgatacctcacgtcttcctctttacccacaggaatcaaaacgctgagactgagaattttagggaaaaaaaagtccactgtttagatccagaaggagagttttaatcattgtttatatcatttgagaatgaaaaaataagcttcataaatgaaattctattcacattactgtgtaataaatttccttttggatgattaggattcattgtataaaactgtaaatctttgccattcttggagaagcaaaaggagagttatcaaaaatgtatgtcgtttcatcgttgcaaggtataataaaaactgtaattattcaatctggccctgccatatgaacatttagaaagacaaacttcttcgggagtctcagttgtaaaaccttccctcattaatatctgaaaatgttagtcttcctttaagtcatagaacttatttaaacataaaccaatttctattacaggttatgctattaaatagctgtaattattaagttattatttttataattagttgttaaatttcattttacacccactcaaatttaacaaagaatctttagcccctttaaattttagaattaaattaaatttttaaagttttacttctaaaatgagattgtgactggcaattgtttatagtgaaactttttaaattaatctttgtactcctctatcagtgcttgctaccaagagaatgtccaaaatgatttgttttaccatgggaaaattcttactattcaacaaactctcagttggccccctacagcagtctggtgttgaagtttctttgaacgaactaaatatactcattttatgtaaaggtatccaatttgattttgaaaccaaaatagaaaatgcaaaattctaaattccatgaaacatggaatttatgacaccaaaatcaatggagagtaagcagcagcaaactgagaattatccagcatatgaatataacaatgtgtttttaagtaatcaattcatttaaaaaattgaatattaatacaaagcatattaaaaacatgtaaatatta

SEQ ID NO: 181128 - DNA, 3646 bp, Homo sapiens
  Payload ID: 15670
  Gene Symbol: SGIP1
  Gene Name: SH3-domain GRB2-like (endophilin) interacting protein 1
  ENST ID: ENST00000435165
  CDS Start-End: 656-1657
aaaaacagcaggttgcatgacagtttctcagtgaagaggttcaaaaaaggtgagatgctattgctttgtgaatttacaaaggaaagaataatttaactgctcagaattacatgtccggtcactgctttttaatttaaaaaataatagagcatcattagtaatcttgttttctctttgatacataggtaaagggtgttttgtgtctggatgcctaaggtgattccaagggaggggatggaagatatgtgacatcttccctgaaatttatattgatatgcaatgctttgtcatttaaaacctaagctaatgttttctacaatccataactctgagtttatctttttggaaacatagaaggggatgacattgaagatgaaatggatacagcaattgctgaatgacagtttgcccaaattagtgcagttaaaatatgctgacgcccctgcatggccaggaagacttctgctccatgcacacaagcaccaagtatcaagcgaccaccaacacattcccattcctttaggcctccatagctttgcttttgctttctgtttcctgaactaaaaaaaaaaaaaaaagtgtagattgccagccttccctttttcctgcacgctaatggcatgtagtgcctccacccttccctatagtgagattaatgacctgctctgtaactcacattgtgtccttctctctccctttccttaacccttcccatcccgcttcaactcctggccatacagagaatgaacagccttccctcgtttggtttgacagaggaaagttttatttgacttttgaaggttcttccaggggacccagccccctaaccatgggagctcaggacactctccctgttgcagcagcatttacagaaacagtcaatgcctatttcaaaggagcagacccaagcaaatgtatcgttaagattaccggagaaatggtgttgtcatttcctgctggcatcaccagacactttgccaacaacccgtccccagctgctctgacttttcgggtgataaatttcagcaggttagaacacgtcctgccaaacccccaacttctctgctgtgataatacacaaaatgatgccaataccaaggaattctgggtaaacatgccaaatttgatgactcacctaaagaaagtgtctgaacaaaaaccccaggctacatattataacgttgacatgctcaaatatcaggtgtctgcccagggcattcagtccacacctctgaacctggcagtgaattggcgatgtgagccttcaagcactgacctgcgcatagattacaaatataatacagatgcaatgacgactgctgtggccctcaacaatgtgcagttcctggtccccatcgacggaggagtcaccaagctccaggcagtgctcccaccagcagtctggaatgctgaacaacagagaatattgtggaagattcctgatatctctcagaagtcagaaaatggaggggtgggttctttgttggcaagatttcagttatctgaaggcccaagcaaaccttctccattggttgtgcagttcacaagtgaaggaagcaccctttctggctgtgacattgaacttgttggagcagggtatcgattttcactcatcaagaaaaggtttgctgcaggaaaatacttggcagataactaatgaaatcttatgcaaggatttggaggattcatataatggagaactgatgtatgagaaacagattttaattttggtttgatgaaaacaaaccaatatctgcacttgggatatatcaggtggaaagtcaatgactttcatctgtgatttccctcacacactaccatgatgaccagtcctacagtatttacttctaggtgtaatattgttaatggttttaaaatgtaattattgtatttgtaaattgtactctcattccagtaaggcagttagacacttgagttttagcattttaccattcctgaaatggatgtaatttaaactgtggtatgtaaatttaatagtagtattgttgaatggcacaatgcttacagaggtagattgcattttgtcaatatataaaatttaaatataatattgatagctgtcataaagggggtgccacatattaaagaaacttaagtggaaccagaagaaaaagaaacaaacttacttttcttcaatgcttagtatgttttactctagtgctaaataaaaactctatcttcaaatgtttagtgggttaaattgagaaactatttcagaaaaaaattctaaggttacagcatattcaaagaaaagcattagttaccactttttaaaaagcttttttttcaaactgcaaatttcataaaaatgcaaactgtgtaaacagggcctcttatttttataacttgtgtaaaaagggaaagcaattcatatttaaagtttaagtatattaaattataatcaagagtaaagaagatgttgaagtcttaactacttgcccctctctacagtttcgcaaatgtggggattgctgaataatcagtcagactaaaaccaaaattgtgattttaagatttcaagactttccgtagttgaactggttaagaatttttgcttagttactctgaatagatgatcttactcatccagtatgggggaatgatacctcacgtcttcctctttacccacaggaatcaaaacgctgagactgagaattttagggaaaaaaaagtccactgtttagatccagaaggagagttttaatcattgtttatatcatttgagaatgaaaaaataagcttcataaatgaaattctattcacattactgtgtaataaatttccttttggatgattaggattcattgtataaaactgtaaatctttgccattcttggagaagcaaaaggagagttatcaaaaatgtatgtcgtttcatcgttgcaaggtataataaaaactgtaattattcaatctggccctgccatatgaacatttagaaagacaaacttcttcgggagtctcagttgtaaaaccttccctcattaatatctgaaaatgttagtcttcctttaagtcatagaacttatttaaacataaaccaatttctattacaggttatgctattaaatagctgtaattattaagttattatttttataattagttgttaaatttcattttacacccactcaaatttaacaaagaatctttagcccctttaaattttagaattaaattaaatttttaaagttttacttctaaaatgagattgtgactggcaattgtttatagtgaaactttttaaattaatctttgtactcctctatcagtgcttgctaccaagagaatgtccaaaatgatttgttttaccatgggaaaattcttactattcaacaaactctcagttggccccctacagcagtctggtgttgaagtttctttgaacgaactaaatatactcattttatgtaaaggtatccaatttgattttgaaaccaaaatagaaaatgcaaaattctaaattccatgaaacatggaatttatgacaccaaaatcaatggagagtaagcagcagcaaactgagaattatccagcatatgaatataacaatgtgtttttaagtaatcaattcatttaaaaaattgaatattaatacaaagcatattaaaaacatgtaaatatt

SEQ ID NO: 181129 - DNA, 951 bp, Homo sapiens
  Payload ID: 15670
  Gene Symbol: SGIP1
  Gene Name: SH3-domain GRB2-like (endophilin) interacting protein 1
  ENST ID: ENST00000424320
  CDS Start-End: 172-951
gagagacgcacagatgtgcacggaggccacagacactgacatttggaattccttcaggcggacggaatagacctcagcagcggcgtggtgaggacttagctgggacctggaatcgtatcctcctgtgttttttcagactccttggaaattaaggaatgcaattctgccaccatgatggaaggattgaaaaaacgtacaaggaaggcctttggaatacggaagaaagaaaaggacactgattctacaggttcaccagatagagatggaattcagcccagcccacacgaaccaccctacaatagcaaagcagagtgtgcgcgtgaaggaggaaaaaaagtttcgaagaaaagcaatggggcaccaaatggattttatgcggaaattgattgggaaagatataactcacctgagctggatgaagaaggctacagcatcagacccgaggaacccggctctaccaaaggaaagcacttttattcttcaagtgaatcggaagaagaagaagaatcacataagaaatttaatatcaagattaaaccattgcaatctaaagacattcttaagaatgctgcaactgtagatgaattgaaggcatcaataggcaacatcgcactttccccatcaccagtgggtgcaattaaaaggaacttatccagtgaagaagtggcaagacccaggcgttccacaccaactccagaacttataagcaaaaagcctccagatgacactacggcccttgctcctctctttggcccaccactagaatcagcttttgatgaacagaagacagaagttcttttagatcagcctgagatatggggttcaggccaaccaattaatccaagcatggagtcgccaaagttaacaaggccttttcccactggaacacctccaccactgcctccaaaaaatgtaccagctaccccaccccgaacaggatcccccttaaca

SEQ ID NO: 181130 - DNA, 2516 bp, Homo sapiens
  Payload ID: 15671
  Gene Symbol: SH3GL1
  Gene Name: SH3-domain GRB2-like 1
  Uniprot ID: Q99961
  ENST ID: ENST00000269886
  CDS Start-End: 180-1286
aatatcctggccgcgcgggcgcgcgagcggctgaggcggcgccggggcgggcgcggagctggcaagcgggtggcggaggcggcgccgacggggactgctgaggcgcgcagagggtcggcggcgcccgggagcctgtcgctggcgcggtccgggcgggaggctcggcggcgggcggcagcatgtcggtggcggggctgaagaagcagttctacaaggcgagccagctggtcagtgagaaggtcggaggggccgaggggaccaagctggatgatgacttcaaagagatggagaagaaggtggatgtcaccagcaaggcggtgacagaagtgctggccaggaccatcgagtacctgcagcccaacccagcctcgcgggctaagctgaccatgctcaacacggtgtccaagatccggggccaggtgaagaaccccggctacccgcagtcggaggggcttctgggcgagtgcatgatccgccacgggaaggagctgggcggcgagtccaactttggtgacgcattgctggatgccggcgagtccatgaagcgcctggcagaggtgaaggactccctggacatcgaggtcaagcagaacttcattgaccccctccagaacctgtgcgagaaagacctgaaggagatccagcaccacctgaagaaactggagggccgccgcctggactttgactacaagaagaagcggcagggcaagatccccgatgaggagctacgccaggcgctggagaagttcgaggagtccaaggaggtggcagaaaccagcatgcacaacctcctggagactgacatcgagcaggtgagtcagctctcggccctggtggatgcacagctggactaccaccggcaggccgtgcagatcctggacgagctggcggagaagctcaagcgcaggatgcgggaagcttcctcacgccctaagcgggagtataagcccaagccccgggagccctttgaccttggagagcctgagcagtccaacgggggcttcccctgcaccacagcccccaagatcgcagcttcatcgtctttccgatcttccgacaagcccatccggacccctagccggagcatgccgcccctggaccagccgagctgcaaggcgctgtacgacttcgagcccgagaacgacggggagctgggcttccatgagggcgacgtcatcacgctgaccaaccagatcgatgagaactggtacgagggcatgctggacggccagtcgggcttcttcccgctcagctacgtggaggtgcttgtgcccctgccgcagtgactcacccgtgtccccgccccgcccctccgtccacactggccggcaccccctgctgggtctcctgcattccacggagcccctgctgccagggcggtgtctgagcctgccggcgccacctgggccccggcccttgaggtactccctgagcaggaccccacacttgggtgggggggcttatctgggtgggtggggatgcctgtttacactagcgctgactcccaacggtgacggctcccttccccactccatggcgccagcctcctcccccgctccccaacttctcgcccagctggccgaggcggggcaacactaaggtgctcttagaaacactaatgttcctctggggcagcccccacctccgtcctgacccgacgggggcccggcccactgcctaccctcgagtcccgcagccttaacaggatgggatcgagggtccccatggggtggctcagagataggaccctggttttaaatccctcccagcctggtgctggtgatgggccctggccctactccagggccaatgcacccccgcctcacacacgcactccttctcctcaaggccagggcagagggcctcaccgcctcccgggcctgctgtcagcttgcagcccggggacagaggccagctgggatctgcctgaggacagagaacatggtctcctgcagggccctgcctcccaagccccgccctcagaaagccaagtaccttttcagctttttaactgcccccatcccaacccagggaggcctgtgtcactctggcacaagctgccaccaccagccacccacacccaccccagcacacctcacacgggaccacagccgcgctgccgagggccaagcacaaaggttccagtgagcgcatgtcccagcccctggtggccaggctccccttgctgagccgctgccacttcaccctgtgggaagtggccccagccatctcctctagaccaaggcaggcagccccgacatctgcttcctctatcgcccaatgcaaaatcgatgaaatggggagttctctgggccaggccacattcacattcccctccccctgtggtccagtgaagcctccggaccccaggctctgctctgccctgccctgcacccccctcgtcagaagtacatgaggggcgcagagatgagcacacagctttgggcacggtccagggcaaactgaaatgtacgcctgaattttgtaaacagaagtattaaatgtctctttctaca

SEQ ID NO: 181131 - DNA, 1404 bp, Homo sapiens
  Payload ID: 15671
  Gene Symbol: SH3GL1
  Gene Name: SH3-domain GRB2-like 1
  Uniprot ID: Q99961
  ENST ID: ENST00000417295
  CDS Start-End: 158-1120
gcgagcggctgaggcggcgccggggcgggcgcggagctggcaagcgggtggcggaggcggcgccgacggggactgctgaggcgcgcagagggtcggcggcgcccgggagcctgtcgctggcgcggtccgggcgggaggctcggcggcgggcggcagcatgtcggtggcggggctgaagaagcagttctacaaggcgagccagctggtcagtgagaaggtcggaggggccgaggggaccaagctggatgatgacttcaaagagatggagaagaaggtggatgtcaccagcaaggcggtgacagaagtgctggccaggaccatcgagtacctgcagcccaacccaggtgacgcattgctggatgccggcgagtccatgaagcgcctggcagaggtgaaggactccctggacatcgaggtcaagcagaacttcattgaccccctccagaacctgtgcgagaaagacctgaaggagatccagcaccacctgaagaaactggagggccgccgcctggactttgactacaagaagaagcggcagggcaagatccccgatgaggagctacgccaggcgctggagaagttcgaggagtccaaggaggtggcagaaaccagcatgcacaacctcctggagactgacatcgagcaggtgagtcagctctcggccctggtggatgcacagctggactaccaccggcaggccgtgcagatcctggacgagctggcggagaagctcaagcgcaggatgcgggaagcttcctcacgccctaagcgggagtataagcccaagccccgggagccctttgaccttggagagcctgagcagtccaacgggggcttcccctgcaccacagcccccaagatcgcagcttcatcgtctttccgatcttccgacaagcccatccggacccctagccggagcatgccgcccctggaccagccgagctgcaaggcgctgtacgacttcgagcccgagaacgacggggagctgggcttccatgagggcgacgtcatcacgctgaccaaccagatcgatgagaactggtacgagggcatgctggacggccagtcgggcttcttcccgctcagctacgtggaggtgcttgtgcccctgccgcagtgactcacccgtgtccccgccccgcccctccgtccacactggccggcaccccctgctgggtctcctgcattccacggagcccctgctgccagggcggtgtctgagcctgccggcgccacctgggccccggcccttgaggtactccctgagcaggaccccacacttgggtgggggggcttatctgggtgggtggggatgcctgtttacactagcgctgactcccaacggtgacggctcccttccccactccatggcgccagcctcctcccccgctccccaacttctcg

SEQ ID NO: 181132 - DNA, 577 bp, Homo sapiens
  Payload ID: 15671
  Gene Symbol: SH3GL1
  Gene Name: SH3-domain GRB2-like 1
  ENST ID: ENST00000598230
  CDS Start-End: 192-577
ccactgtacctggcacaggtaaatactcattcagcctgacttggacctcagtgatggctccagaccgtggctttgaagaatgggcagaatttggatgtaggaagaagcaaggaaaggagggagagtttccgctggtcagtgagaaggtcggaggggccgaggggaccaagctggatgatgacttcaaagagatggagaagaaggtggatgtcaccagcaaggcggtgacagaagtgctggccaggaccatcgagtacctgcagcccaacccagcctcgcgggctaagctgaccatgctcaacacggtgtccaagatccggggccaggtgaagaaccccggctacccgcagtcggaggggcttctgggcgagtgcatgatccgccacgggaaggagctgggcggcgagtccaactttggtgacgcattgctggatgccggcgagtccatgaagcgcctggcagaggtgaaggactccctggacatcgaggtcaagcagaacttcattgaccccctccagaacctgtgcgagaaagacctgaaggagatccagcaccacctgaagaaactggagggccg

SEQ ID NO: 181133 - DNA, 2194 bp, Homo sapiens
  Payload ID: 15671
  Gene Symbol: SH3GL1
  Gene Name: SH3-domain GRB2-like 1
  Uniprot ID: Q99961
  ENST ID: ENST00000598564
  CDS Start-End: 51-965
agcctgtcgctggcgcggtccgggcgggaggctcggcggcgggcggcagcatgtcggtggcggggctgaagaagcagttctacaaggcgagccagctggtcagtgagaaggtcggaggggccgaggggaccaagctggatgatgacttcaaagagatggagaagaaggtggatgtcaccagcaaggcggtgacagaagtgctggccaggaccatcgagtacctgcagcccaacccagcctcgcgggctaagctgaccatgctcaacacggtgtccaagatccggggccagaacctgtgcgagaaagacctgaaggagatccagcaccacctgaagaaactggagggccgccgcctggactttgactacaagaagaagcggcagggcaagatccccgatgaggagctacgccaggcgctggagaagttcgaggagtccaaggaggtggcagaaaccagcatgcacaacctcctggagactgacatcgagcaggtgagtcagctctcggccctggtggatgcacagctggactaccaccggcaggccgtgcagatcctggacgagctggcggagaagctcaagcgcaggatgcgggaagcttcctcacgccctaagcgggagtataagcccaagccccgggagccctttgaccttggagagcctgagcagtccaacgggggcttcccctgcaccacagcccccaagatcgcagcttcatcgtctttccgatcttccgacaagcccatccggacccctagccggagcatgccgcccctggaccagccgagctgcaaggcgctgtacgacttcgagcccgagaacgacggggagctgggcttccatgagggcgacgtcatcacgctgaccaaccagatcgatgagaactggtacgagggcatgctggacggccagtcgggcttcttcccgctcagctacgtggaggtgcttgtgcccctgccgcagtgactcacccgtgtccccgccccgcccctccgtccacactggccggcaccccctgctgggtctcctgcattccacggagcccctgctgccagggcggtgtctgagcctgccggcgccacctgggccccggcccttgaggtactccctgagcaggaccccacacttgggtgggggggcttatctgggtgggtggggatgcctgtttacactagcgctgactcccaacggtgacggctcccttccccactccatggcgccagcctcctcccccgctccccaacttctcgcccagctggccgaggcggggcaacactaaggtgctcttagaaacactaatgttcctctggggcagcccccacctccgtcctgacccgacgggggcccggcccactgcctaccctcgagtcccgcagccttaacaggatgggatcgagggtccccatggggtggctcagagataggaccctggttttaaatccctcccagcctggtgctggtgatgggccctggccctactccagggccaatgcacccccgcctcacacacgcactccttctcctcaaggccagggcagagggcctcaccgcctcccgggcctgctgtcagcttgcagcccggggacagaggccagctgggatctgcctgaggacagagaacatggtctcctgcagggccctgcctcccaagccccgccctcagaaagccaagtaccttttcagctttttaactgcccccatcccaacccagggaggcctgtgtcactctggcacaagctgccaccaccagccacccacacccaccccagcacacctcacacgggaccacagccgcgctgccgagggccaagcacaaaggttccagtgagcgcatgtcccagcccctggtggccaggctccccttgctgagccgctgccacttcaccctgtgggaagtggccccagccatctcctctagaccaaggcaggcagccccgacatctgcttcctctatcgcccaatgcaaaatcgatgaaatggggagttctctgggccaggccacattcacattcccctccccctgtggtccagtgaagcctccggaccccaggctctgctctgccctgccctgcacccccctcgtcagaagtacatgaggggcgcagagatgagcacacagctttgggcacggtccagggcaaactgaaatgtacgcctgaattttgtaaacagaagtattaaatgtctctttctac

SEQ ID NO: 181134 - DNA, 1036 bp, Homo sapiens
  Payload ID: 15671
  Gene Symbol: SH3GL1
  Gene Name: SH3-domain GRB2-like 1
  ENST ID: ENST00000593591
  CDS Start-End: 620-1036
ctggaaagcggatgaaagaatgtggtggccagggctgcagcgggtttccctctctcccttctctcccctcctctccctatctctcccccctcttcttcctctctttctgttctcactcttcccttgtctttctctctgtctctcccttcttttgccctctcacctcttcttcctctctctctgtctgtcctctccacaccttcttcctgtctgtctgcctgcctgtctctctctttctctatctctcgccttttgcagggctggatttggcaagcacttttcctgagcactgcagcttggtgcgtttctgctcatttcctgttaagcagtacccagggctccctgaactcaggctctgggaggacggccctgtcttccttttcctctccactcctagaaaaacctgctgaccaggccctgagagcagggtcacggggagacctcctcaccacagcaggaagatagacggacagtttcctccattggacctgactcagcagcggcccactgaccgcctgggagggggctcccgcctagcgggccgcagttccacacctggctggtcagtgagaaggtcggaggggccgaggggaccaagctggatgatgacttcaaagagatggagaagaaggtggatgtcaccagcaaggcggtgacagaagtgctggccaggaccatcgagtacctgcagcccaacccagcctcgcgggctaagctgaccatgctcaacacggtgtccaagatccggggccaggtgaagaaccccggctacccgcagtcggaggggcttctgggcgagtgcatgatccgccacgggaaggagctgggcggcgagtccaactttggtgacgcattgctggatgccggcgagtccatgaagcgcctggcagaggtgaaggactccctggacatcgaggtcaagcagaacttcattgaccccctccagaacctgtgcgagaaagacctgaaggagatccagcaccacctgaagaaactggagggccgccgcctggactttgactacaagaagaagcgg

SEQ ID NO: 181135 - DNA, 619 bp, Homo sapiens
  Payload ID: 15671
  Gene Symbol: SH3GL1
  Gene Name: SH3-domain GRB2-like 1
  ENST ID: ENST00000598219
  CDS Start-End: 540-619
atctgggcttcttttttaggggggagctagatccaccataaacattttatgtgtatatgtacaccgtttatcatatacatattgtgacaactgtatatatatatatatattttgagacagagtcttgctctgtcacccaggctggagtgcagtggcgcaatcttggcttactgagaccaacctccgcctcccgggttcaagcgattctcttgcctcagcctcctgagtagctgggattacaggtgcgccaccacacccggctaattttttttgtatttttagtagagacagggtttcaccatgttggtcaggctggtgttgaactcctgacctcatgatctgcccgcctcagcctcccaaagtgctgggattacaggtgtgagccaccgtgcctggcctaaacaacttgtatgtatacatacactgtttatcatatatacgtattgtggcaaccatatgtatgaataagccttcaaaagctggtcagtgagaaggtcggaggggccgaggggaccaagctggatgatgacttcaaagagatggagaagaaggtggatgtcaccagcaaggcggtgacagaagtgctggccaggaccatcgagtacctgcagcccaaccc

SEQ ID NO: 181136 - DNA, 2565 bp, Homo sapiens
  Payload ID: 15672
  Gene Symbol: SH3GL2
  Gene Name: SH3-domain GRB2-like 2
  Uniprot ID: Q99962
  ENST ID: ENST00000380607
  CDS Start-End: 121-1179
atagccccggcggcggcacgaccagaggcggccaggggagcgcgccgccccgctcggccctccagtccccctccgcctcctccctcccgcacagcagccgccagcgcggcctcctgcaccatgtcggtggccggcctcaagaagcagttccataaagccactcagaaagtgagtgagaaggttggaggagctgaaggaaccaagctagatgatgacttcaaagagatggaaaggaaagtggatgtcaccagcagggctgtgatggaaataatgactaaaacaattgaataccttcaacccaatccagcttccagagctaagctcagcatgatcaacaccatgtcaaaaatccgtggccaggagaaggggccaggctatcctcaggcagaggcgctgctggcagaggccatgctcaaatttggaagagagcttggagatgattgcaactttggcccagcacttggtgaggtcggggaggccatgcgggaactgtcggaggtcaaagactctttggacatagaagtgaagcagaacttcattgaccctcttcagaatcttcatgacaaagatcttagggaaattcaacatcatctaaagaagttggagggtcgacgcctggattttgattataagaagaaacgacaaggcaagattccggatgaagagcttcgtcaagctctagagaaatttgatgagtctaaggaaattgctgagtcaagcatgttcaatctcttggagatggatattgaacaagtgagccagctctctgcacttgtgcaagctcagctggagtaccacaagcaggcagtccagatcctgcagcaagtcacggtcagactggaagaaagaataagacaggcttcatctcagcctagaagggaatatcaacctaaaccacgaatgagcctggagtttccaactggagacagtactcagcccaatgggggtctctcccacacaggcactcccaaaccttcaggtgtccaaatggatcagccctgctgccgagctctgtacgactttgaacctgaaaatgaaggggagttgggatttaaagagggcgatatcatcacactcactaaccaaattgatgagaactggtatgaggggatgctgcatggccattcaggcttcttccccatcaattatgtggaaattctggttgccctgccccattaggatgttatgctggctggctcgcctcctcttgacccagatagttacggttaaccactgctttggcaatgctgcttataacacatcccaagtgcaggccgcagtggtccacgtcatccagccccaccaagtgactttggttgacttgtgggctcccacaggagtcatggtgatggatgatatcctcttagcctggtgggcgtggcatgtgctttttaaaacatcatctgagaccagccagtagtcacagaactgctgtttacacagttctcaggaggctgtggtttcttagaatatgaccatgagccatttcacagaaaaaccatcccaccgaagatattgtctatcaccccaggggccatctgaaggtctctttgcatttctccatgcaaagaggagaaagcttttgctttcacactgtcccttcccaaatatgtgagtcatggaattgtcaaagtaagccttccctcaccagcaaattgtctcctgatctgaatgaatttgtctcttaatgcatccatagaaaagtgttaattgtgggttcaaagcattctctgcaaataggcatctcagctcctcacacttatggctatttctgacgtatagccagttttcttccctccttgctattaaagccagagcggtaattccaaattatttttcagtaagacagttaatcagcattattgtgagagggactgaaaagaaattctccattatgaggaattgggaagaaatctggtatccaagcttaaatttcttgctatacagaaactatgtatgtatttaggctatttctgaagggcacagggaagggggaacaaatatcttcacttcagttttatttgtgaattacatgtttcatgaatccatttggcacagagacacaaggaagaaaacactagtaaccatctttccactagttcatatactgagaaacagtaaatacctttcctttccacttttaccctgtgttctttgaacatcatttgtgcagattctgccctcaatgaggaccaaataaagatgatttttgtgcttagcagtttaaggtatatggctgcatatgcaaaactctttcccaattcagtcgctacttttacttctgccctttctatccatcgtcttcattttgtgtgtacagtgctgtgtgtaagcttatcagtgtgtttttttatttgtatcagtcatgaaagtcctgttaggtatgcagagttctatttatctagctgtacagactctttcagaggtttaacgtgctgcttccgatgtgccacctgcagtagtggatcatgtggagtgaaaggcaaatcttactgcttaatgtataaactctcaccacaggaagcatcgctgtttccaataaatattgctgaagacagaaccaaa

SEQ ID NO: 181137 - DNA, 2012 bp, Homo sapiens
  Payload ID: 15673
  Gene Symbol: SH3GL3
  Gene Name: SH3-domain GRB2-like 3
  Uniprot ID: Q99963
  ENST ID: ENST00000324537
  CDS Start-End: 493-1560
gcgatgtcggtggccgggctgaagaagcagttccacaaagccagccagtagagatgggtttcaccatgttggccaatatggtctcgatctcctgacctcgtgatccgcctgcctcggcctcccagagtgctgggattacaggtgtgagccactgtgcccagcctcttctctcactatccgtttctgacaaatgaaaaaaatggatgtgggtcctgcagaacctgaggccagctctaaccagtctttcatggatgcatacacctgcctgcaggcgctgctcccaggttatgaggctggttcttgggtttgactctgggaatcatgctcattgatctgcttttcctaatcatgtcagtgaatacctacacgtgaagaaaactcaagctgcaccataaagctaaaggaagaaggagcttttaagtgaataagaccattttcccaatgagcagtgtcataaacattgaggactctcttaaatcagaagatgaatgaatggatggaatctttgctgggataatatgcaatcaagctaataggtgccttacctggacctcccaacagctatttagtgaaaaaataagtggtgctgaaggaactaaactagacgatgaatttcttgacatggaaaggaaaatagatgttaccaataaagttgttgcagaaattctttcaaaaaccactgaatatcttcagccaaatccagcatacagagctaagctaggaatgctgaacactgtgtcgaagatccgagggcaggtgaagaccacaggatacccgcagacggaaggcttgctgggggactgtatgctgaaatacgggaaggagctcggggaagactccacctttggcaatgcattgatagaagttggtgaatccatgaagctaatggctgaggtgaaagactctcttgatattaatgtaaagcaaacttttattgatccacttcagttactacaagataaagatttaaaagagatcgggcatcacctgaaaaagctggaaggccgccgcctggattacgattataaaaagaaacgagtaggtaagataccagacgaagaagtcagacaagcggtagaaaaatttgaagagtcaaaggagttggctgaaagaagcatgtttaactttttagaaaatgatgtagaacaagtcagccagttggctgtgttcatagaggcagcattagactatcacagacagtccacagagattctgcaggagctgcagagcaagctacagatgcgaatatcagctgcatccagtgtccccagacgagaatacaagccaaggcctgtgaaaaggagttctagtgagctcaatggagtttccaccacctctgtagtgaagacgacaggttctaacattcccatggaccagccctgctgtcgtggtctctatgactttgagccagaaaaccaaggagaattaggatttaaagaaggggacatcattacattaaccaatcaaatagatgaaaactggtatgaaggaatgatacacggagaatcgggattcttccccattaattacgtggaagtgatcgtgcctttacctcagtaaatgtgtaacacaaactctggacatactttcgtaactgaaatgaattcacaccagtgtgctctcagtgcggtgttctgtgacatcctttgctctctgaccaacttaatgacttttgtatgtgtgctctctttataatgtattttatatcactttaatttgtataaatgattttcttgtccttgctacatgaaaatattttcttttttgcttcctgtcctaaaagtcattggttaaatgtatttgcttcctgtggctaaaaataagtctcacccattgcagttatgtcaacgaatggcctatattcctcagctgcaatgaaatggtaacatttgaaactaagaaatgctaaatattttgtttctcgacattcctgatgacgtctggtcttttcttttcattgtattttaagcttacctgtgaatagcccaataaacatgacacactgtgttggc

SEQ ID NO: 181138 - DNA, 1806 bp, Homo sapiens
  Payload ID: 15673
  Gene Symbol: SH3GL3
  Gene Name: SH3-domain GRB2-like 3
  Uniprot ID: Q99963
  ENST ID: ENST00000427482
  CDS Start-End: 307-1350
gcggctcaagtagcccaggtctccacgcaacaatgaagcgtgggcggccccagcagcttcatttgcatatcgccgcggcttggccaatgggctgcgcaggggctttggaacgcagtgttgccatcggcgtgcgcgcgtgtgtgcgagtgtgacagcggctgtggctgtggccgtggccgtgggaggcgggcccggcggagcccagccgcggggggaccggcccgggctcccgctccccgagcgcgtcgcggccgcgtggcccagccgagccttgagaccaccccgcccctgccggtcgcagtcgcgatgtcggtggccgggctgaagaagcagttccacaaagccagccagctatttagtgaaaaaataagtggtgctgaaggaactaaactagacgatgaatttcttgacatggaaaggaaaatagatgttaccaataaagttgttgcagaaattctttcaaaaaccactgaatatcttcagccaaatccagcatacagagctaagctaggaatgctgaacactgtgtcgaagatccgagggcaggtgaagaccacaggatacccgcagacggaaggcttgctgggggactgtatgctgaaatacgggaaggagctcggggaagactccacctttggcaatgcattgatagaagttggtgaatccatgaagctaatggctgaggtgaaagactctcttgatattaatgtaaagcaaacttttattgatccacttcagttactacaagataaagatttaaaagagatcgggcatcacctgaaaaagctggaaggccgccgcctggattacgattataaaaagaaacgagtaggtaagataccagacgaagaagtcagacaagcggtagaaaaatttgaagagtcaaaggagttggctgaaagaagcatgtttaactttttagaaaatgatgtagaacaagtcagccagttggctgtgttcatagaggcagcattagactatcacagacagtccacagagattctgcaggagctgcagagcaagctacagatgcgaatatcagctgcatccagtgtccccagacgagaatacaagccaaggcctgtgaaaaggagttctagtgagctcaatggagtttccaccacctctgtagtgaagacgacaggttctaacattcccatggaccagccctgctgtcgtggtctctatgactttgagccagaaaaccaaggagaattaggatttaaagaaggggacatcattacattaaccaatcaaatagatgaaaactggtatgaaggaatgatacacggagaatcgggattcttccccattaattacgtggaagtgatcgtgcctttacctcagtaaatgtgtaacacaaactctggacatactttcgtaactgaaatgaattcacaccagtgtgctctcagtgcggtgttctgtgacatcctttgctctctgaccaacttaatgacttttgtatgtgtgctctctttataatgtattttatatcactttaatttgtataaatgattttcttgtccttgctacatgaaaatattttcttttttgcttcctgtcctaaaagtcattggttaaatgtatttgcttcctgtggctaaaaataagtctcacccattgcagttatgtcaacgaatggcctatattcctcagctgcaatgaaatggtaacatttgaaactaagaaatgctaaatattttgtttctcgacattcctgatgacgtctggtcttttcttttcattgtattttaagcttacctgtgaatagcccaataaacatgacacactgtgttggcaaaa

SEQ ID NO: 181139 - DNA, 1647 bp, Homo sapiens
  Payload ID: 15673
  Gene Symbol: SH3GL3
  Gene Name: SH3-domain GRB2-like 3
  ENST ID: ENST00000563901
  CDS Start-End: 159-356
gtgacagcggctgtggctgtggccgtggccgtgggaggcgggcccggcggagcccagccgcggggggaccggcccgggctcccgctccccgagcgcgtcgcggccgcgtggcccagccgagccttgagaccaccccgcccctgccggtcgcagtcgcgatgtcggtggccgggctgaagaagcagttccacaaagccagccagctatttagtgaaaaaataagtggtgctgaaggaactaaactagacgatgaatttcttgacatggaaaggaaaatagatgttaccaataaagttgttgcagaaattctttcaaaaaccactgaatatcttcagccaaatccagagctaagctaggaatgctgaacactgtgtcgaagatccgagggcaggtgaagaccacaggatacccgcagacggaaggcttgctgggggactgtatgctgaaatacgggaaggagctcggggaagactccacctttggcaatgcattgatagaagttggtgaatccatgaagctaatggctgaggtgaaagactctcttgatattaatgtaaagcaaacttttattgatccacttcagttactacaagataaagatttaaaagagatcgggcatcacctgaaaaagctggaaggccgccgcctggattacgattataaaaagaaacgagtaggtaagataccagacgaagaagtcagacaagcggtagaaaaatttgaagagtcaaaggagttggctgaaagaagcatgtttaactttttagaaaatgatgtagaacaagtcagccagttggctgtgttcatagaggcagcattagactatcacagacagtccacagagattctgcaggagctgcagagcaagctacagatgcgaatatcagctgcatccagtgtccccagacgagaatacaagccaaggcctgtgaaaaggagttctagtgagctcaatggagtttccaccacctctgtagtgaagacgacaggttctaacattcccatggaccagccctgctgtcgtggtctctatgactttgagccagaaaaccaaggagaattaggatttaaagaaggggacatcattacattaaccaatcaaatagatgaaaactggtatgaaggaatgatacacggagaatcgggattcttccccattaattacgtggaagtgatcgtgcctttacctcagtaaatgtgtaacacaaactctggacatactttcgtaactgaaatgaattcacaccagtgtgctctcagtgcggtgttctgtgacatcctttgctctctgaccaacttaatgacttttgtatgtgtgctctctttataatgtattttatatcactttaatttgtataaatgattttcttgtccttgctacatgaaaatattttcttttttgcttcctgtcctaaaagtcattggttaaatgtatttgcttcctgtggctaaaaataagtctcacccattgcagttatgtcaacgaatggcctatattcctcagctgcaatgaaatggtaacatttgaaactaagaaatgctaaatattttgtttctcgacattcctgatgacgtctggtcttttcttttcattgtattttaagcttacctgtgaatagcccaataaacatgacacactgtgttggc

SEQ ID NO: 181140 - DNA, 1199 bp, Homo sapiens
  Payload ID: 15674
  Gene Symbol: SH3GLB1
  Gene Name: SH3-domain GRB2-like endophilin B1
  Uniprot ID: Q9Y371
  ENST ID: ENST00000482504
  CDS Start-End: 6-1166
ctaggatgaatatcatggacttcaacgtgaagaagctggcggccgacgcaggcaccttcctcagtcgcgccgtgcagttcacagaagaaaagcttggccaggctgagaagacagaattggatgctcacttagagaacctccttagcaaagctgaatgtaccaaaatatggacagaaaaaataatgaaacaaactgaagtgttattgcagccaaatccaaatgccaggatagaagaatttgtttatgagaaactggatagaaaagctccaagtcgtataaacaacccagaacttttgggacaatatatgattgatgcagggactgagtttggcccaggaacagcttatggtaatgcccttattaaatgtggagaaacccaaaaaagaattggaacagcagacagagaactgattcaaacgtcagccttaaattttcttactcctttaagaaactttatagaaggagattacaaaacaattgctaaagaaaggaaactattgcaaaataagagactggatttggatgctgcaaaaacgagactaaaaaaggcaaaagctgcagaaactagaaattcacaactaaactcagctcgccttgaaggagataacattatgatttgggcagaggaggtgacaaaatctgaacaggaattaagaataactcaaagtgaatttgatcgtcaagcagagattaccagacttctgctagagggaatcagcagtacacatgcccatcaccttcgctgtctgaatgactttgtagaagcccagatgacttactatgcacagtgttaccagtatatgttggacctccagaaacaactgggaagttttccatccaattatcttagtaacaacaatcagacttctgtgacacctgtaccatcagttttaccaaatgcgattggttcttctgccatggcttcaacaagtggcctagtaatcacctctccttccaacctcagtgaccttaaggagtgtagtggcagcagaaaggccagggttctctatgattatgatgcagcaaacagtactgaattatcacttctggcagatgaggtgatcactgtgttcagtgttgttggaatggattcagactggctaatgggggaaaggggaaaccagaagggcaaggtgccaattacctacttagaactgctcaattaagtaggtggactatggaaaggttgcccatcatga

SEQ ID NO: 181141 - DNA, 6227 bp, Homo sapiens
  Payload ID: 15674
  Gene Symbol: SH3GLB1
  Gene Name: SH3-domain GRB2-like endophilin B1
  Uniprot ID: Q9Y371
  ENST ID: ENST00000535010
  CDS Start-End: 489-1286
gcgcttgtttttcccttgggacccgggtccacacggcggggtcgcccgtccatctccggctcgcccgcggggcccatcgtcgacgttagcggccgttctccgagccgactgacccatccttggcgctgccgccgcgcgcttgttctcctccctcgccccgccttcatcctccccgttcacggaaacgacagctgcggctgcggggctggcgccgcctccctccacctaccacgtctgccctcgccgctctagccctgcgccccagcccggccgcggcacctccgcctcgccgccgctaggtcggccggctccgcccggctgccgcctaggatgaatatcatggacttcaacgtgaagaagctggcggccgacgcaggcaccttcctcagtcgcgccgtgcagatgccaggatagaagaatttgtttatgagaaactggatagaaaagctccaagtcgtataaacaacccagaacttttgggacaatatatgattgatgcagggactgagtttggcccaggaacagcttatggtaatgcccttattaaatgtggagaaacccaaaaaagaattggaacagcagacagagaactgattcaaacgtcagccttaaattttcttactcctttaagaaactttatagaaggagattacaaaacaattgctaaagaaaggaaactattgcaaaataagagactggatttggatgctgcaaaaacgagactaaaaaaggcaaaagctgcagaaactagaaattcatctgaacaggaattaagaataactcaaagtgaatttgatcgtcaagcagagattaccagacttctgctagagggaatcagcagtacacatgcccatcaccttcgctgtctgaatgactttgtagaagcccagatgacttactatgcacagtgttaccagtatatgttggacctccagaaacaactgggaagttttccatccaattatcttagtaacaacaatcagacttctgtgacacctgtaccatcagttttaccaaatgcgattggttcttctgccatggcttcaacaagtggcctagtaatcacctctccttccaacctcagtgaccttaaggagtgtagtggcagcagaaaggccagggttctctatgattatgatgcagcaaacagtactgaattatcacttctggcagatgaggtgatcactgtgttcagtgttgttggaatggattcagactggctaatgggggaaaggggaaaccagaagggcaaggtgccaattacctacttagaactgctcaattaagtaggtggactatggaaaggttgcccatcatgactttgtatttatatacaattaactctaaataaagcaggttaagtatcttccatgttaatgtgttaagagactgaaaataccagccatcagaaactggcctttctgccaataaagttgcatggtaaatatttcattacagaatttatgttagagctttcatgccaagaatgttttcttacaaaattctctttttattgaggtttcactaataagcagcttctacttttgagcctcaacttaaagcagaactgttttctactggatttttcattaacagcaagctttttcttttatgtaaaataaatctattgtgaattgatatcagcgactcatttattaggtataaataatagccaaagaataaaattaaaatttattttaaactttcggtcttaaaaagagctgtaggatataaacctcttttgtgaaaagtagaattttctgaatgctttcatagacaaaaacgcatttaaactatgtttacctggttttccaacagaaatcaaatgattttaatattatgttttgatgggttattttcagagttgtttggttttttaaacactactgaatggtttcttttaaatttaagaacaactagttcttgaaaagcaataccgtatttctctgataaatttgtagttaaggttctagaaaatctaggacaaatttacttcattaaacataaagtttttaagattattcagttggcacaatttaatgcataattgggattggatccatttactgtactgtggtacagtaaagagaatgtgttcttattgaacagcagatttgtatacaaatacggaataatgcaactacattataaattgtatacgaacaaaataaattgggtcactctgagcttactattaaaacattgaaaatttattaatgaacacaggctatcttgatgaggatctctgcttatgaaacacatactaatgaaattattagtgacacattggaagctagaaaattgctgttggggccattgctataaatcattgtttccatgttaagacttctgttctaattcattcattcaacaaacatttgttgagggccagatactgtgctggtcaactggggatactgtcctgaacaatatgcacacagttcttgcccctgcagagcttaaagaccattaaaggatacagaaaattaagcaattatcctatagtaggattcgtggtgtgatggggaaaatacaaggtactgtatttgggagtcatgtaactccagttttgggagtgagagagggtctggggaagaactgttccagataaaaagatgtgtaaccaagatagcatagcacattctgacaactaaagcaatttactctaacttaagcatgaagtacaaaagtatagttcatttattgagggaatgttaagctattaaaatgatactttttggtacttttaaaaaaatgaatacttaaacaccgttttaaaattttgtgttaagagctcctaataagaacttggtaaacatgttgacaatttaactcacagtctaaactttaaaagtagtagttacccttttatttctgtgccatgagacaaattcttctgcagttttatagttgtacaagatgttttgactcactctcaattgccatattcttaaagaaaccctgaaaagctgctcaagctggtcagttttctgtaaaaccaagtaaatgaaattttctctcccctcagaaaggaagttctacagcctagagtaccatctattgtgttttataagtccagatttaggctttgaaagatcataccaaaacttcagatcgacttaaacagcaactatgaattaggtttatgggaaatgtagtaatacaggggaaagaatatcggtaatggagtgaaatggtcctgggttcaaatccagtcttcctcacatattgtgctctttaagcttcaaatgagatgtataactgccttttccttaccagtaaaatgaggacaataattatgacaccatagggtggttgtgaggattagcaaatgttatcttgtatttcaggtgcctttcagggaaaggcttggcacatagtaaacacatcctgtaaatatcagtttccccttgttagcccctgtagcatcctgacctaccaagtctataggccttgcatatcactgtgcaccagagatacctcttttacatctgggctctgttttctctctatcaatcctatcctccaccctctttaaatcagaccccaggtttaaccttcccacagtcagtataaatcatttttcagaactttcagctttccatcaagtgaaagttgattttagttacccagtaatgtacagaaaccttcaataatgttaagcttcaaaggcttctggtacgtttgtctaccacagaaccaccacaatatatatgcttgttcttaggtttattgctttttattttaatggggtttggttgtttgggttttattttggttttggcttattttaaagtcaagtttagtttttactcaggtaaaggcctgaagtttcttgggcgtggaagaaaaagcttgggaagcctattaattcatggtgcagttcagaattgtttaaataagctctgtgccactgagcttaatctgaaagtatagtgacatgtgaaggatgcacatatgaatgaaaaactaaaataattgtaggctcttctataaatgaaaaaaaaagtgattggattgtgtctacctttttcctcaaagtaatctaacctaaacggtcatggtgttaaaactttttatggtgctaatcagaaaaattgatgttgcaagaaatgaggtctcaaaaatgggaatgtgcctcctcactctgcgtcacatgggaaataaatcctgaggccaggatcaccagtggggtagagtcatcttcatagtctcctgttatcctccccctgaacaaagaacaaagtgagactgggaagctagtgttggggaaacatttctgggataaactgtggagtggagaagacaatggagggcaaggcaaaaacccacagacttgtttacccatagaggccccactcacctccatgctgacagaattccagaaaaattccttccctatctcccaaacacctgaaattctgaaatattgccctactatttagcactttaagcttcagtgaggtgctgtaatggagagatagcttcatagtttagcctatagccaactttgcctcaagacctccagataagatgaagtggcttttacctcatgtgagtctcaaacgctggagagagagttccacaaccacccctgccctttctcccatattacgctcattagaaagtctactcagggctgggtgccgtggctcatgcctgtaatcccagcactttggaggctgaggcgggtggatcatctgaggtcaggagttcgagaccagcctggccaacatggggaaaccctgtctctactgaaaatataaaaattagccgggcatggtggcgtgcacctgtaattccagctactcgggaggctgaggcaggagaatcacttgaaccccagaggcagaggctacagtgagccaagattgcaccactgcactccaacctgggtgatagaataagactcttgtctcaaggaaagaaaaaatgtctactcagtagagcagtgattggcaaagtgtgagaccccagaccggcaatattggcatctcctggagacttgtttaaaatgctgattactattttcaagaactttctaccttcatttttacttattttttgttttcaagggctcatggaatcagtcttccatgtgacagctttttaaatattttaagacaaaaactgagtcttctaatcttaattgtgttctagcagtagtcattgtaattatagttatttttataatttatttgtttagtgtatatctgtcactctagaatgtaggctccctgagataaaaactataattcttttgatggcagttacattcccaactcttagcacaagatctaggacatagtatgaactcaataaatttttgttgaatgaaagaaaaatgcaaatttataagccttttcagagacctactgaatcaaactctgagagtggagcccagcaatctgttgtaaaagctgtttgagtaatactgttgcactctaagcttgagaaccactgcaatagaactaagagaacattcatttcaccttcaggcctattctctgacatcacttgaaaaatcctctctgccttctgtaacccttaaccaacaacagtgccctgtccatgtaggggaaacttctgggctgtattacaagtgggtaggaaggtataaggatatcatagtgggaagtattgcttagaatgccagtacttgtttgctgtggaaggtttctaggaatggattgcttagtctaaagtaagcactaccaccatccacgttttcactcaacacagtgccttttaattggtgactaacatcaaaacaccttgacaaaccgttaaaacagtatcagaaaccatgtgtacatccctgtgcctcttagattgctaagttctgctctcattcttacttcaaaggacactttttaaagaattgttaatgcttttttataatacaagtcatagccctgttggcaaaaagaaaaaagattcagtgagaaagaaaaatcactgataattccatcatccagggagaaccactgttatttaagtatatggccttccagacttttctgtgcatttatagatatttttaatgggatcaaagtgtacatactgttttgtaactttttttcactcaacaataccatgactgtcttgctgtgtcaagtatatttctacatctcttaatggctgcatgatattccatcatatgtgccacattttattaaactactgttcaatttttaggtttccaactttcattaataaagtgcttt

SEQ ID NO: 181142 - DNA, 6371 bp, Homo sapiens
  Payload ID: 15674
  Gene Symbol: SH3GLB1
  Gene Name: SH3-domain GRB2-like endophilin B1
  Uniprot ID: Q9Y371
  ENST ID: ENST00000370558
  CDS Start-End: 325-1422
gtttttcccttgggacccgggtccacacggcggggtcgcccgtccatctccggctcgcccgcggggcccatcgtcgacgttagcggccgttctccgagccgactgacccatccttggcgctgccgccgcgcgcttgttctcctccctcgccccgccttcatcctccccgttcacggaaacgacagctgcggctgcggggctggcgccgcctccctccacctaccacgtctgccctcgccgctctagccctgcgccccagcccggccgcggcacctccgcctcgccgccgctaggtcggccggctccgcccggctgccgcctaggatgaatatcatggacttcaacgtgaagaagctggcggccgacgcaggcaccttcctcagtcgcgccgtgcagttcacagaagaaaagcttggccaggctgagaagacagaattggatgctcacttagagaacctccttagcaaagctgaatgtaccaaaatatggacagaaaaaataatgaaacaaactgaagtgttattgcagccaaatccaaatgccaggatagaagaatttgtttatgagaaactggatagaaaagctccaagtcgtataaacaacccagaacttttgggacaatatatgattgatgcagggactgagtttggcccaggaacagcttatggtaatgcccttattaaatgtggagaaacccaaaaaagaattggaacagcagacagagaactgattcaaacgtcagccttaaattttcttactcctttaagaaactttatagaaggagattacaaaacaattgctaaagaaaggaaactattgcaaaataagagactggatttggatgctgcaaaaacgagactaaaaaaggcaaaagctgcagaaactagaaattcatctgaacaggaattaagaataactcaaagtgaatttgatcgtcaagcagagattaccagacttctgctagagggaatcagcagtacacatgcccatcaccttcgctgtctgaatgactttgtagaagcccagatgacttactatgcacagtgttaccagtatatgttggacctccagaaacaactgggaagttttccatccaattatcttagtaacaacaatcagacttctgtgacacctgtaccatcagttttaccaaatgcgattggttcttctgccatggcttcaacaagtggcctagtaatcacctctccttccaacctcagtgaccttaaggagtgtagtggcagcagaaaggccagggttctctatgattatgatgcagcaaacagtactgaattatcacttctggcagatgaggtgatcactgtgttcagtgttgttggaatggattcagactggctaatgggggaaaggggaaaccagaagggcaaggtgccaattacctacttagaactgctcaattaagtaggtggactatggaaaggttgcccatcatgactttgtatttatatacaattaactctaaataaagcaggttaagtatcttccatgttaatgtgttaagagactgaaaataccagccatcagaaactggcctttctgccaataaagttgcatggtaaatatttcattacagaatttatgttagagctttcatgccaagaatgttttcttacaaaattctctttttattgaggtttcactaataagcagcttctacttttgagcctcaacttaaagcagaactgttttctactggatttttcattaacagcaagctttttcttttatgtaaaataaatctattgtgaattgatatcagcgactcatttattaggtataaataatagccaaagaataaaattaaaatttattttaaactttcggtcttaaaaagagctgtaggatataaacctcttttgtgaaaagtagaattttctgaatgctttcatagacaaaaacgcatttaaactatgtttacctggttttccaacagaaatcaaatgattttaatattatgttttgatgggttattttcagagttgtttggttttttaaacactactgaatggtttcttttaaatttaagaacaactagttcttgaaaagcaataccgtatttctctgataaatttgtagttaaggttctagaaaatctaggacaaatttacttcattaaacataaagtttttaagattattcagttggcacaatttaatgcataattgggattggatccatttactgtactgtggtacagtaaagagaatgtgttcttattgaacagcagatttgtatacaaatacggaataatgcaactacattataaattgtatacgaacaaaataaattgggtcactctgagcttactattaaaacattgaaaatttattaatgaacacaggctatcttgatgaggatctctgcttatgaaacacatactaatgaaattattagtgacacattggaagctagaaaattgctgttggggccattgctataaatcattgtttccatgttaagacttctgttctaattcattcattcaacaaacatttgttgagggccagatactgtgctggtcaactggggatactgtcctgaacaatatgcacacagttcttgcccctgcagagcttaaagaccattaaaggatacagaaaattaagcaattatcctatagtaggattcgtggtgtgatggggaaaatacaaggtactgtatttgggagtcatgtaactccagttttgggagtgagagagggtctggggaagaactgttccagataaaaagatgtgtaaccaagatagcatagcacattctgacaactaaagcaatttactctaacttaagcatgaagtacaaaagtatagttcatttattgagggaatgttaagctattaaaatgatactttttggtacttttaaaaaaatgaatacttaaacaccgttttaaaattttgtgttaagagctcctaataagaacttggtaaacatgttgacaatttaactcacagtctaaactttaaaagtagtagttacccttttatttctgtgccatgagacaaattcttctgcagttttatagttgtacaagatgttttgactcactctcaattgccatattcttaaagaaaccctgaaaagctgctcaagctggtcagttttctgtaaaaccaagtaaatgaaattttctctcccctcagaaaggaagttctacagcctagagtaccatctattgtgttttataagtccagatttaggctttgaaagatcataccaaaacttcagatcgacttaaacagcaactatgaattaggtttatgggaaatgtagtaatacaggggaaagaatatcggtaatggagtgaaatggtcctgggttcaaatccagtcttcctcacatattgtgctctttaagcttcaaatgagatgtataactgccttttccttaccagtaaaatgaggacaataattatgacaccatagggtggttgtgaggattagcaaatgttatcttgtatttcaggtgcctttcagggaaaggcttggcacatagtaaacacatcctgtaaatatcagtttccccttgttagcccctgtagcatcctgacctaccaagtctataggccttgcatatcactgtgcaccagagatacctcttttacatctgggctctgttttctctctatcaatcctatcctccaccctctttaaatcagaccccaggtttaaccttcccacagtcagtataaatcatttttcagaactttcagctttccatcaagtgaaagttgattttagttacccagtaatgtacagaaaccttcaataatgttaagcttcaaaggcttctggtacgtttgtctaccacagaaccaccacaatatatatgcttgttcttaggtttattgctttttattttaatggggtttggttgtttgggttttattttggttttggcttattttaaagtcaagtttagtttttactcaggtaaaggcctgaagtttcttgggcgtggaagaaaaagcttgggaagcctattaattcatggtgcagttcagaattgtttaaataagctctgtgccactgagcttaatctgaaagtatagtgacatgtgaaggatgcacatatgaatgaaaaactaaaataattgtaggctcttctataaatgaaaaaaaaagtgattggattgtgtctacctttttcctcaaagtaatctaacctaaacggtcatggtgttaaaactttttatggtgctaatcagaaaaattgatgttgcaagaaatgaggtctcaaaaatgggaatgtgcctcctcactctgcgtcacatgggaaataaatcctgaggccaggatcaccagtggggtagagtcatcttcatagtctcctgttatcctccccctgaacaaagaacaaagtgagactgggaagctagtgttggggaaacatttctgggataaactgtggagtggagaagacaatggagggcaaggcaaaaacccacagacttgtttacccatagaggccccactcacctccatgctgacagaattccagaaaaattccttccctatctcccaaacacctgaaattctgaaatattgccctactatttagcactttaagcttcagtgaggtgctgtaatggagagatagcttcatagtttagcctatagccaactttgcctcaagacctccagataagatgaagtggcttttacctcatgtgagtctcaaacgctggagagagagttccacaaccacccctgccctttctcccatattacgctcattagaaagtctactcagggctgggtgccgtggctcatgcctgtaatcccagcactttggaggctgaggcgggtggatcatctgaggtcaggagttcgagaccagcctggccaacatggggaaaccctgtctctactgaaaatataaaaattagccgggcatggtggcgtgcacctgtaattccagctactcgggaggctgaggcaggagaatcacttgaaccccagaggcagaggctacagtgagccaagattgcaccactgcactccaacctgggtgatagaataagactcttgtctcaaggaaagaaaaaatgtctactcagtagagcagtgattggcaaagtgtgagaccccagaccggcaatattggcatctcctggagacttgtttaaaatgctgattactattttcaagaactttctaccttcatttttacttattttttgttttcaagggctcatggaatcagtcttccatgtgacagctttttaaatattttaagacaaaaactgagtcttctaatcttaattgtgttctagcagtagtcattgtaattatagttatttttataatttatttgtttagtgtatatctgtcactctagaatgtaggctccctgagataaaaactataattcttttgatggcagttacattcccaactcttagcacaagatctaggacatagtatgaactcaataaatttttgttgaatgaaagaaaaatgcaaatttataagccttttcagagacctactgaatcaaactctgagagtggagcccagcaatctgttgtaaaagctgtttgagtaatactgttgcactctaagcttgagaaccactgcaatagaactaagagaacattcatttcaccttcaggcctattctctgacatcacttgaaaaatcctctctgccttctgtaacccttaaccaacaacagtgccctgtccatgtaggggaaacttctgggctgtattacaagtgggtaggaaggtataaggatatcatagtgggaagtattgcttagaatgccagtacttgtttgctgtggaaggtttctaggaatggattgcttagtctaaagtaagcactaccaccatccacgttttcactcaacacagtgccttttaattggtgactaacatcaaaacaccttgacaaaccgttaaaacagtatcagaaaccatgtgtacatccctgtgcctcttagattgctaagttctgctctcattcttacttcaaaggacactttttaaagaattgttaatgcttttttataatacaagtcatagccctgttggcaaaaagaaaaaagattcagtgagaaagaaaaatcactgataattccatcatccagggagaaccactgttatttaagtatatggccttccagacttttctgtgcatttatagatatttttaatgggatcaaagtgtacatactgttttgtaactttttttcactcaacaataccatgactgtcttgctgtgtcaagtatatttctacatctcttaatggctgcatgatattccatcatatgtgccacattttattaaactactgttcaatttttaggtttccaactttcattaataaagtgctttaaagaaca

SEQ ID NO: 181143 - DNA, 6456 bp, Homo sapiens
  Payload ID: 15674
  Gene Symbol: SH3GLB1
  Gene Name: SH3-domain GRB2-like endophilin B1
  ENST ID: ENST00000616170
  CDS Start-End: 331-1515
gcgcttgtttttcccttgggacccgggtccacacggcggggtcgcccgtccatctccggctcgcccgcggggcccatcgtcgacgttagcggccgttctccgagccgactgacccatccttggcgctgccgccgcgcgcttgttctcctccctcgccccgccttcatcctccccgttcacggaaacgacagctgcggctgcggggctggcgccgcctccctccacctaccacgtctgccctcgccgctctagccctgcgccccagcccggccgcggcacctccgcctcgccgccgctaggtcggccggctccgcccggctgccgcctaggatgaatatcatggacttcaacgtgaagaagctggcggccgacgcaggcaccttcctcagtcgcgccgtgcagttcacagaagaaaagcttggccaggctgagaagacagaattggatgctcacttagagaacctccttagcaaagctgaatgtaccaaaatatggacagaaaaaataatgaaacaaactgaagtgttattgcagccaaatccaaatgccaggatagaagaatttgtttatgagaaactggatagaaaagctccaagtcgtataaacaacccagaacttttgggacaatatatgattgatgcagggactgagtttggcccaggaacagcttatggtaatgcccttattaaatgtggagaaacccaaaaaagaattggaacagcagacagagaactgattcaaacgtcagccttaaattttcttactcctttaagaaactttatagaaggagattacaaaacaattgctaaagaaaggaaactattgcaaaataagagactggatttggatgctgcaaaaacgagactaaaaaaggcaaaagctgcagaaactagaaattcacaactaaactcagctcgccttgaaggagataacattatggtaaatttctcttacatgctcaacttcctgcatgtaaaatggctgaagtctgaacaggaattaagaataactcaaagtgaatttgatcgtcaagcagagattaccagacttctgctagagggaatcagcagtacacatgcccatcaccttcgctgtctgaatgactttgtagaagcccagatgacttactatgcacagtgttaccagtatatgttggacctccagaaacaactgggaagttttccatccaattatcttagtaacaacaatcagacttctgtgacacctgtaccatcagttttaccaaatgcgattggttcttctgccatggcttcaacaagtggcctagtaatcacctctccttccaacctcagtgaccttaaggagtgtagtggcagcagaaaggccagggttctctatgattatgatgcagcaaacagtactgaattatcacttctggcagatgaggtgatcactgtgttcagtgttgttggaatggattcagactggctaatgggggaaaggggaaaccagaagggcaaggtgccaattacctacttagaactgctcaattaagtaggtggactatggaaaggttgcccatcatgactttgtatttatatacaattaactctaaataaagcaggttaagtatcttccatgttaatgtgttaagagactgaaaataccagccatcagaaactggcctttctgccaataaagttgcatggtaaatatttcattacagaatttatgttagagctttcatgccaagaatgttttcttacaaaattctctttttattgaggtttcactaataagcagcttctacttttgagcctcaacttaaagcagaactgttttctactggatttttcattaacagcaagctttttcttttatgtaaaataaatctattgtgaattgatatcagcgactcatttattaggtataaataatagccaaagaataaaattaaaatttattttaaactttcggtcttaaaaagagctgtaggatataaacctcttttgtgaaaagtagaattttctgaatgctttcatagacaaaaacgcatttaaactatgtttacctggttttccaacagaaatcaaatgattttaatattatgttttgatgggttattttcagagttgtttggttttttaaacactactgaatggtttcttttaaatttaagaacaactagttcttgaaaagcaataccgtatttctctgataaatttgtagttaaggttctagaaaatctaggacaaatttacttcattaaacataaagtttttaagattattcagttggcacaatttaatgcataattgggattggatccatttactgtactgtggtacagtaaagagaatgtgttcttattgaacagcagatttgtatacaaatacggaataatgcaactacattataaattgtatacgaacaaaataaattgggtcactctgagcttactattaaaacattgaaaatttattaatgaacacaggctatcttgatgaggatctctgcttatgaaacacatactaatgaaattattagtgacacattggaagctagaaaattgctgttggggccattgctataaatcattgtttccatgttaagacttctgttctaattcattcattcaacaaacatttgttgagggccagatactgtgctggtcaactggggatactgtcctgaacaatatgcacacagttcttgcccctgcagagcttaaagaccattaaaggatacagaaaattaagcaattatcctatagtaggattcgtggtgtgatggggaaaatacaaggtactgtatttgggagtcatgtaactccagttttgggagtgagagagggtctggggaagaactgttccagataaaaagatgtgtaaccaagatagcatagcacattctgacaactaaagcaatttactctaacttaagcatgaagtacaaaagtatagttcatttattgagggaatgttaagctattaaaatgatactttttggtacttttaaaaaaatgaatacttaaacaccgttttaaaattttgtgttaagagctcctaataagaacttggtaaacatgttgacaatttaactcacagtctaaactttaaaagtagtagttacccttttatttctgtgccatgagacaaattcttctgcagttttatagttgtacaagatgttttgactcactctcaattgccatattcttaaagaaaccctgaaaagctgctcaagctggtcagttttctgtaaaaccaagtaaatgaaattttctctcccctcagaaaggaagttctacagcctagagtaccatctattgtgttttataagtccagatttaggctttgaaagatcataccaaaacttcagatcgacttaaacagcaactatgaattaggtttatgggaaatgtagtaatacaggggaaagaatatcggtaatggagtgaaatggtcctgggttcaaatccagtcttcctcacatattgtgctctttaagcttcaaatgagatgtataactgccttttccttaccagtaaaatgaggacaataattatgacaccatagggtggttgtgaggattagcaaatgttatcttgtatttcaggtgcctttcagggaaaggcttggcacatagtaaacacatcctgtaaatatcagtttccccttgttagcccctgtagcatcctgacctaccaagtctataggccttgcatatcactgtgcaccagagatacctcttttacatctgggctctgttttctctctatcaatcctatcctccaccctctttaaatcagaccccaggtttaaccttcccacagtcagtataaatcatttttcagaactttcagctttccatcaagtgaaagttgattttagttacccagtaatgtacagaaaccttcaataatgttaagcttcaaaggcttctggtacgtttgtctaccacagaaccaccacaatatatatgcttgttcttaggtttattgctttttattttaatggggtttggttgtttgggttttattttggttttggcttattttaaagtcaagtttagtttttactcaggtaaaggcctgaagtttcttgggcgtggaagaaaaagcttgggaagcctattaattcatggtgcagttcagaattgtttaaataagctctgtgccactgagcttaatctgaaagtatagtgacatgtgaaggatgcacatatgaatgaaaaactaaaataattgtaggctcttctataaatgaaaaaaaaagtgattggattgtgtctacctttttcctcaaagtaatctaacctaaacggtcatggtgttaaaactttttatggtgctaatcagaaaaattgatgttgcaagaaatgaggtctcaaaaatgggaatgtgcctcctcactctgcgtcacatgggaaataaatcctgaggccaggatcaccagtggggtagagtcatcttcatagtctcctgttatcctccccctgaacaaagaacaaagtgagactgggaagctagtgttggggaaacatttctgggataaactgtggagtggagaagacaatggagggcaaggcaaaaacccacagacttgtttacccatagaggccccactcacctccatgctgacagaattccagaaaaattccttccctatctcccaaacacctgaaattctgaaatattgccctactatttagcactttaagcttcagtgaggtgctgtaatggagagatagcttcatagtttagcctatagccaactttgcctcaagacctccagataagatgaagtggcttttacctcatgtgagtctcaaacgctggagagagagttccacaaccacccctgccctttctcccatattacgctcattagaaagtctactcagggctgggtgccgtggctcatgcctgtaatcccagcactttggaggctgaggcgggtggatcatctgaggtcaggagttcgagaccagcctggccaacatggggaaaccctgtctctactgaaaatataaaaattagccgggcatggtggcgtgcacctgtaattccagctactcgggaggctgaggcaggagaatcacttgaaccccagaggcagaggctacagtgagccaagattgcaccactgcactccaacctgggtgatagaataagactcttgtctcaaggaaagaaaaaatgtctactcagtagagcagtgattggcaaagtgtgagaccccagaccggcaatattggcatctcctggagacttgtttaaaatgctgattactattttcaagaactttctaccttcatttttacttattttttgttttcaagggctcatggaatcagtcttccatgtgacagctttttaaatattttaagacaaaaactgagtcttctaatcttaattgtgttctagcagtagtcattgtaattatagttatttttataatttatttgtttagtgtatatctgtcactctagaatgtaggctccctgagataaaaactataattcttttgatggcagttacattcccaactcttagcacaagatctaggacatagtatgaactcaataaatttttgttgaatgaaagaaaaatgcaaatttataagccttttcagagacctactgaatcaaactctgagagtggagcccagcaatctgttgtaaaagctgtttgagtaatactgttgcactctaagcttgagaaccactgcaatagaactaagagaacattcatttcaccttcaggcctattctctgacatcacttgaaaaatcctctctgccttctgtaacccttaaccaacaacagtgccctgtccatgtaggggaaacttctgggctgtattacaagtgggtaggaaggtataaggatatcatagtgggaagtattgcttagaatgccagtacttgtttgctgtggaaggtttctaggaatggattgcttagtctaaagtaagcactaccaccatccacgttttcactcaacacagtgccttttaattggtgactaacatcaaaacaccttgacaaaccgttaaaacagtatcagaaaccatgtgtacatccctgtgcctcttagattgctaagttctgctctcattcttacttcaaaggacactttttaaagaattgttaatgcttttttataatacaagtcatagccctgttggcaaaaagaaaaaagattcagtgagaaagaaaaatcactgataattccatcatccagggagaaccactgttatttaagtatatggccttccagacttttctgtgcatttatagatatttttaatgggatcaaagtgtacatactgttttgtaactttttttcactcaacaataccatgactgtcttgctgtgtcaagtatatttctacatctcttaatggctgcatgatattccatcatatgtgccacattttattaaactactgttcaatttttaggtttccaactttcattaataaagtgcttt

SEQ ID NO: 181144 - DNA, 1985 bp, Homo sapiens
  Payload ID: 15675
  Gene Symbol: SH3GLB2
  Gene Name: SH3-domain GRB2-like endophilin B2
  Uniprot ID: Q9NR46
  ENST ID: ENST00000372554
  CDS Start-End: 126-1340
cggcaggcgggtgcgcggagggctggtgccccgcagcaggtgggcggggtgcggttggcggcggcggctgggccgggggctgccggctgcgctcgggccgtgcgcggcggccgtgcgggcacgccatggacttcaacatgaagaagctggcgtcggacgcgggcatcttcttcacccgggcggtgcagttcacggaggagaaatttggccaggctgagaagactgagcttgatgcccactttgaaaaccttctggcccgggcagacagcaccaagaactggacagagaagatcttgaggcagacagaggtgctgctgcagcccaaccccagtgcccgagtggaggagttcctgtatgagaagctggacaggaaggtcccctcaagggtcaccaacggggagctgctggctcagtacatggcagacgcggccagtgagctggggccgaccaccccctatgggaagacactgatcaaggtggcagaagctgaaaagcaactgggagccgcggagagggattttatccacacggcctccatcagcttcctcacacccttgcgcaacttcctggagggggactggaagaccatctcgaaggagaggcggctcctccaaaaccggcgtctggacttggatgcctgcaaagcgaggctgaagaaggccaaggctgcagaagccaaagccacgtgtgagggagatacggtgcctgactttcaggagactagacctcgtaattacattctctcggccagcgcctccgcgctctggaatgatgaagtggacaaggccgagcaggagctccgcgtggcccagacagagtttgaccggcaagcagaagtgacccgtctcttgctggagggaatcagtagcactcacgtgaaccacctgcgctgcctccacgagttcgtcaagtctcagacaacctactacgcacagtgctaccgccacatgctggacttgcagaagcagctgggcagctcccagggtgccatatttcccggcaccttcgtgggcaccacagagcccgcctccccacccctgagcagcacctcacccaccactgctgcggccactatgcctgtggtgccctctgtggccagcctggcccctccgggggaggcctcgctctgcctggaagaggtggccccccctgccagtgggacccgcaaagctcgggtgctctatgactacgaggcagccgacagcagtgagctggccctgctggctgatgagctcatcactgtctacagcctgcctggcatggaccctgactggctcattggcgagagaggcaacaagaagggcaaggtccctgtcacctacttggaactgctcagctaggcaggtgcccccatcccccccgcattctggcctaggcaggagaggatgggcgcagccctgccacttaacttgtttgttggtgacacagttgttcagagtggggagaattcaccccattctgtccctgcccctagtcacctagctgtgagggtgcctgaggctgaatggctccacccctcccccagccctgcttctgacctgtggctctggagcccctgcccctgcctgcatccccgagcaccccaccctccaggctccactaaggagggaggggctgtctgcagcagctgcactcagcacctaggccagggtggggccgccgcagatgggctcaggaagccccaggtgcactcagcgagagccctgcctttcagttgccaaaagctgcatcaggggaatgcggcaaggcacacagggctctggcagcccctggggactgggcgctgcccctgggaggggagagcctggccagggctggtgttgggcccggagcagcatcttccggtgctatcctcccctcccacccctcacagctcaagccaagtccagcggccgcagtcttcacctctccacactcactttttatctggtgtttttacttctgcctgcgtttgctctctagccaataaaccgtccttgtgtgcg

SEQ ID NO: 181145 - DNA, 1365 bp, Homo sapiens
  Payload ID: 15675
  Gene Symbol: SH3GLB2
  Gene Name: SH3-domain GRB2-like endophilin B2
  Uniprot ID: Q9NR46
  ENST ID: ENST00000372559
  CDS Start-End: 61-1248
ggctgggccgggggctgccggctgcgctcgggccgtgcgcggcggccgtgcgggcacgccatggacttcaacatgaagaagctggcgtcggacgcgggcatcttcttcacccgggcggtgcagttcacggaggagaaatttggccaggctgagaagactgagcttgatgcccactttgaaaaccttctggcccgggcagacagcaccaagaactggacagagaagatcttgaggcagacagaggtgctgctgcagcccaaccccagtgcccgagtggaggagttcctgtatgagaagctggacaggaaggtcccctcaagggtcaccaacggggagctgctggctcagtacatggcagacgcggccagtgagctggggccgaccaccccctatgggaagacactgatcaaggtggcagaagctgaaaagcaactgggagccgcggagagggattttatccacacggcctccatcagcttcctcacacccttgcgcaacttcctggagggggactggaagaccatctcgaaggagaggcggctcctccaaaaccggcgtctggacttggatgcctgcaaagcgaggctgaagaaggccaaggctgcagaagccaaagccacgacggtgcctgactttcaggagactagacctcgtaattacattctctcggccagcgcctccgcgctctggaatgatgaagtggacaaggccgagcaggagctccgcgtggcccagacagagtttgaccggcaagcagaagtgacccgtctcttgctggagggaatcagtagcactcacgtgaaccacctgcgctgcctccacgagttcgtcaagtctcagacaacctactacgcacagtgctaccgccacatgctggacttgcagaagcagctgggcagatttcccggcaccttcgtgggcaccacagagcccgcctccccacccctgagcagcacctcacccaccactgctgcggccactatgcctgtggtgccctctgtggccagcctggcccctccgggggaggcctcgctctgcctggaagaggtggccccccctgccagtgggacccgcaaagctcgggtgctctatgactacgaggcagccgacagcagtgagctggccctgctggctgatgagctcatcactgtctacagcctgcctggcatggaccctgactggctcattggcgagagaggcaacaagaagggcaaggtccctgtcacctacttggaactgctcagctagctcaagccaagtccagcggccgcagtcttcacctctccacactcactttttatctggtgtttttacttctgcctgcgtttgctctctagccaataaaccgtccttgtgtgcgagtca

SEQ ID NO: 181146 - DNA, 2982 bp, Homo sapiens
  Payload ID: 15675
  Gene Symbol: SH3GLB2
  Gene Name: SH3-domain GRB2-like endophilin B2
  Uniprot ID: Q9NR46
  ENST ID: ENST00000372564
  CDS Start-End: 147-1334
cgggcgggcaggcgggcaggccggcaggcgggtgcgcggagggctggtgccccgcagcaggtgggcggggtgcggttggcggcggcggctgggccgggggctgccggctgcgctcgggccgtgcgcggcggccgtgcgggcacgccatggacttcaacatgaagaagctggcgtcggacgcgggcatcttcttcacccgggcggtgcagttcacggaggagaaatttggccaggctgagaagactgagcttgatgcccactttgaaaaccttctggcccgggcagacagcaccaagaactggacagagaagatcttgaggcagacagaggtgctgctgcagcccaaccccagtgcccgagtggaggagttcctgtatgagaagctggacaggaaggtcccctcaagggtcaccaacggggagctgctggctcagtacatggcagacgcggccagtgagctggggccgaccaccccctatgggaagacactgatcaaggtggcagaagctgaaaagcaactgggagccgcggagagggattttatccacacggcctccatcagcttcctcacacccttgcgcaacttcctggagggggactggaagaccatctcgaaggagaggcggctcctccaaaaccggcgtctggacttggatgcctgcaaagcgaggctgaagaaggccaaggctgcagaagccaaagccacgacggtgcctgactttcaggagactagacctcgtaattacattctctcggccagcgcctccgcgctctggaatgatgaagtggacaaggccgagcaggagctccgcgtggcccagacagagtttgaccggcaagcagaagtgacccgtctcttgctggagggaatcagtagcactcacgtgaaccacctgcgctgcctccacgagttcgtcaagtctcagacaacctactacgcacagtgctaccgccacatgctggacttgcagaagcagctgggcagatttcccggcaccttcgtgggcaccacagagcccgcctccccacccctgagcagcacctcacccaccactgctgcggccactatgcctgtggtgccctctgtggccagcctggcccctccgggggaggcctcgctctgcctggaagaggtggccccccctgccagtgggacccgcaaagctcgggtgctctatgactacgaggcagccgacagcagtgagctggccctgctggctgatgagctcatcactgtctacagcctgcctggcatggaccctgactggctcattggcgagagaggcaacaagaagggcaaggtccctgtcacctacttggaactgctcagctaggcaggtgcccccatcccccccgcattctggcctaggcaggagaggatgggcgcagccctgccacttaacttgtttgttggtgacacagttgttcagagtggggagaattcaccccattctgtccctgcccctagtcacctagctgtgagggtgcctgaggctgaatggctccacccctcccccagccctgcttctgacctgtggctctggagcccctgcccctgcctgcatccccgagcaccccaccctccaggctccactaaggagggaggggctgtctgcagcagctgcactcagcacctaggccagggtggggccgccgcagatgggctcaggaagccccaggtgcactcagcgagagccctgcctttcagttgccaaaagctgcatcaggggaatgcggcaaggcacacagggctctggcagcccctggggactgggcgctgcccctgggaggggagagcctggccagggctggtgttgggcccggagcagcatcttccggtgctatcctcccctcccacccctcacagctcaagccaagtccagcggccgcagtcttcacctctccacactcactttttatctggtgtttttacttctgcctgcgtttgctctctagccaataaaccgtccttgtgtgcgagtcacctgggctcctgtcagggcctggccctgagggtggtaaagggaaaggtagactcaccctctgccccactcttccacagagtgagcaggggccctgtggctgccccggcccccagctctctagttgggaagaagtgcagccctccctgtcttctgcggggcctgtgcctctcagagggcagtgctgttcctggacatgaagccgcacaaggaacgttttattcctaagaaaaagtttcctaaatttggattgtggagcggactgtagaatgcgtctgacagttcagttcaagcacaagaagtgggtagcggtcagtgctgtctgcaggtcgggcgtttcacccagcatgtgcccccgtgccatgggttctcatgccgtcctcagtgtccacatttcacagatgagatcagcaagacagtcagctcctcaagggaccacagttggcaagtggccaagcagggactgaagcccaggcagcctgattctagaaaccctaagtgatgtctgtgttttagatggcccctagcaggacctagcattctgacttcagtcctgagaaggccaacagccagtaggccccactgttggggcttctgaagaggggatcgggggatgacgggggcacggggctataaataggaaggcacagagcttcaagaaaggctcacccagggatgagctcagcccactgggccaatgaaagcagggtcaaggacaggaccagcgcaggccaaggaagggaatatctgacagcgcccacccagccaaaccctcagcccaaggacaggaatgaggagatgctggtgaactagccatccatcagtacctgccttcccccgaggctgcagccccactcccaggcgcctggccaggggagttttctaggttctgagagccacgttgtcatccctgggctttgaagttaaacatcacacagctgtctataaacaagattttaatatctgtataaatagaccacagaattaccaaaactgcaaa

SEQ ID NO: 181147 - DNA, 1415 bp, Homo sapiens
  Payload ID: 15675
  Gene Symbol: SH3GLB2
  Gene Name: SH3-domain GRB2-like endophilin B2
  ENST ID: ENST00000416629
  CDS Start-End: 57-1181
gggccgggggctgccggctgcgctcgggccgtgcgcggcggccgtgcgggcacgccatggacttcaacatgaagaagctggcgtcggacgcgggcatcttcttcacccgggcggtgcagttcacggaggagaaatttggccaggctgagaagactgagcttgatgcccactttgaaaaccttctggcccgggcagacagcaccaagaactggacagagaagatcttgaggcagacagaggtgctgctgcagcccaaccccagtgcccgagtggaggagttcctgtatgagaagctggacaggaaggtcccctcaagggtcaccaacggggagctgctggctcagtacatggcagacgcggccagtgagctggggccgaccaccccctatgggaagacactgatcaaggtggcagaagctgaaaagcaactgggagccgcggagagggattttatccacacggcctccatcagcttcctcacacccttgcgcaacttcctggagggggactggaagaccatctcgaaggagaggcggctcctccaaaaccggcgtctggacttggatgcctgcaaagcgaggctgaagaaggccaaggctgcagaagccaaagccacgctctggaatgatgaagtggacaaggccgagcaggagctccgcgtggcccagacagagtttgaccggcaagcagaagtgacccgtctcttgctggagggaatcagtagcactcacgtgaaccacctgcgctgcctccacgagttcgtcaagtctcagacaacctactacgcacagtgctaccgccacatgctggacttgcagaagcagctgggcagatttcccggcaccttcgtgggcaccacagagcccgcctccccacccctgagcagcacctcacccaccactgctgcggccactatgcctgtggtgccctctgtggccagcctggcccctccgggggaggcctcgctctgcctggaagaggtggccccccctgccagtgggacccgcaaagctcgggtgctctatgactacgaggcagccgacagcagtgagctggccctgctggctgatgagctcatcactgtctacagcctgcctggcatggaccctgactggctcattggcgagagaggcaacaagaagggcaaggtccctgtcacctacttggaactgctcagctaggcaggtgcccccatcccccccgcattctggcctaggcaggagaggatgggcgcagccctgccacttaacttgtttgttggtgacacagttgttcagagtggggagaattcaccccattctgtccctgcccctagtcacctagctgtgagggtgcctgaggctgaatggctccacccctcccccagccctgcttctgacctgtggctctggagcccctgcccctgcctgcatccc

SEQ ID NO: 181148 - DNA, 837 bp, Homo sapiens
  Payload ID: 15675
  Gene Symbol: SH3GLB2
  Gene Name: SH3-domain GRB2-like endophilin B2
  ENST ID: ENST00000455407
  CDS Start-End: 150-224
cggcgggcgggcaggcgggcaggccggcaggcgggtgcgcggagggctggtgccccgcagcaggtgggcggggtgcggttggcggcggcggctgggccgggggctgccggctgcgctcgggccgtgcgcggcggccgtgcgggcacgccatggacttcaacatgaagaagctggcgtcggacgcgggcatcttcttcacccgggcggtgcagggaagacactgatcaaggtggcagaagctgaaaagcaactgggagccgcggagagggattttatccacacggcctccatcagcttcctcacacccttgcgcaacttcctggagggggactggaagaccatctcgaaggagaggcggctcctccaaaaccggcgtctggacttggatgcctgcaaagcgaggctgaagaaggccaaggctgcagaagccaaagccacgacggtgcctgactttcaggagactagacctcgtaattacattctctcggccagcgcctccgcgctctggaatgatgaagtggacaaggccgagcaggagctccgcgtggcccagacagagtttgaccggcaagcagaagtgacccgtctcttgctggagggaatcagtagcactcacgtgaaccacctgcgctgcctccacgagttcgtcaagtctcagacaacctactacgcacagtgctaccgccacatgctggacttgcagaagcagctgggcagatttcccggcaccttcgtgggcaccacagagcccgcctccccacccctgagcagcacctcacccaccactgctgcggccactatgcctgtggtgccctctgtggccagcctggcccctcc

SEQ ID NO: 181149 - DNA, 720 bp, Homo sapiens
  Payload ID: 15675
  Gene Symbol: SH3GLB2
  Gene Name: SH3-domain GRB2-like endophilin B2
  ENST ID: ENST00000416230
  CDS Start-End: 45-428
gccggctgcgctcgggccgtgcgcggcggccgtgcgggcacgccatggacttcaacatgaagaagctggcgtcggacgcgggcatcttcttcacccgggcggtgcagttcacggaggagaaatttggccaggctgagaagactgagcttgatgcccactttgaaaaccttctggcccgggcagacagcaccaagaactggacagagaagatcttgaggcagacagaggtgctgctgcagcccaaccccagtgcccgagtggaggagttcctgtatgagaagctggacaggaaggtcccctcaagggtcaccaacggggagctgctggctcagtacatggcagacgcggccagtgagctggggccgaccaccccctatgacaggatcttgctgtgtcacccagactggagtgcagtggtgcaatcatagcttactactatagcctcaaactcctgggttcaaatgatccttccgcctgggcctcccagagtattgggattacagggaagacactgatcaaggtggcagaagctgaaaagcaactgggagccgcggagagggattttatccacacggcctccatcagcttcctcacacccttgcgcaacttcctggagggggactggaagaccatctcgaaggagaggcggctcctccaaaaccggcgtctggacttggatgcctgcaaagcgaggctgaagaaggccaaggctgcagaagc

SEQ ID NO: 181150 - DNA, 1468 bp, Homo sapiens
  Payload ID: 15675
  Gene Symbol: SH3GLB2
  Gene Name: SH3-domain GRB2-like endophilin B2
  ENST ID: ENST00000417224
  CDS Start-End: 32-1234
gggccgtgcgcggcggccgtgcgggcacgccatggacttcaacatgaagaagctggcgtcggacgcgggcatcttcttcacccgggcggtgcagttcacggaggagaaatttggccaggctgagaagactgagcttgatgcccactttgaaaaccttctggcccgggcagacagcaccaagaactggacagagaagatcttgaggcagacagaggtgctgctgcagcccaaccccagtgcccgagtggaggagttcctgtatgagaagctggacaggaaggtcccctcaagggtcaccaacggggagctgctggctcagtacatggcagacgcggccagtgagctggggccgaccaccccctatgggaagacactgatcaaggtggcagaagctgaaaagcaactgggagccgcggagagggattttatccacacggcctccatcagcttcctcacacccttgcgcaacttcctggagggggactggaagaccatctcgaaggagaggcggctcctccaaaaccggcgtctggacttggatgcctgcaaagcgaggctgaagaaggccaaggctgcagaagccaaagccacgacggtgcctgactttcaggagactagacctcgtaattacattctctcggccagcgcctccgcgctctggaatgatgaagtggacaaggccgagcaggagctccgcgtggcccagacagagtttgaccggcaagcagaagtgacccgtctcttgctggagggaatcagtagcactcacgtgaaccacctgcgctgcctccacgagttcgtcaagtctcagacaacctactacgcacagtgctaccgccacatgctggacttgcagaagcagctgggcagctcccagggtgccatatttcccggcaccttcgtgggcaccacagagcccgcctccccacccctgagcagcacctcacccaccactgctgcggccactatgcctgtggtgccctctgtggccagcctggcccctccgggggaggcctcgctctgcctggaagaggtggccccccctgccagtgggacccgcaaagctcgggtgctctatgactacgaggcagccgacagcagtgagctggccctgctggctgatgagctcatcactgtctacagcctgcctggcatggaccctgactggctcattggcgagagaggcaacaagaagggcaaggtccctgtcacctacttggaactgctcagctaggcaggtgcccccatcccccccgcattctggcctaggcaggagaggatgggcgcagccctgccacttaacttgtttgttggtgacacagttgttcagagtggggagaattcaccccattctgtccctgcccctagtcacctagctgtgagggtgcctgaggctgaatggctccacccctcccccagccctgcttctgacctgtggctctggagcccctgcccctgcctgcatccc

SEQ ID NO: 181151 - DNA, 538 bp, Homo sapiens
  Payload ID: 15675
  Gene Symbol: SH3GLB2
  Gene Name: SH3-domain GRB2-like endophilin B2
  ENST ID: ENST00000425236
  CDS Start-End: 1-180
gtggaggagttcctgtatgagaagctggacaggaaggtcccctcaagggtcaccaacggggagctgctggctcagtacatggcagacgcggccagtgagctggggccgaccaccccctatggatcttgctgtgtcacccagactggagtgcagtggtgcaatcatagcttactactatagcctcaaactcctgggttcaaatgatccttccgcctgggcctcccagagtattgggattacagggaagacactgatcaaggtggcagaagctgaaaagcaactgggagccgcggagagggattttatccacacggcctccatcagcttcctcacacccttgcgcaacttcctggagggggactggaagaccatctcgaaggagaggcggctcctccaaaaccggcgtctggacttggatgcctgcaaagcgaggctgaagaaggccaaggctgcagaagccaaagccacgacggtgcctgactttcaggagactagacctcgtaattacattctctcggccagcgcctccgcggtaagc

SEQ ID NO: 181152 - DNA, 1944 bp, Homo sapiens
  Payload ID: 15676
  Gene Symbol: SH3KBP1
  Gene Name: SH3-domain kinase binding protein 1
  ENST ID: ENST00000379697
  CDS Start-End: 150-1811
gccgccactgaggaagaagccggcccagccgccgccgcgtccggaccctcgcgcctggatcccagcgccccgatcccggcgccccaacccccacgcccgcctccgccaactttcacgctgcctcggcggcccggcccggctcgacgccaatggtggaggccatagtggagtttgactaccaggcccagcacgatgatgagctgacgatcagcgtgggtgaaatcatcaccaacatcaggaaggaggatggaggctggtgggagggacagatcaacggcaggagaggtttgttccctgacaactttgtaagagaaataaagaaagagatgaagaaagaccctctcaccaacaaagctccagaaaagcccctgcacgaagtgcccagtggaaactctttgctgtcttctgaaacgattttaagaaccaataagagaggcgagcgacggaggcgccggtgccaggtggcattcagctacctgccccagaatgacgatgaacttgagctgaaagttggcgacatcatagaggtggtaggagaggtagaggaaggatggtgggaaggtgttctcaacgggaagactggaatgtttccttccaacttcatcaaggagctgtcaggggagtcggatgagcttggcatttcccaggatgagcagctatccaagtcaaggcctgaaggtctccctccagcttctctgctgccctttccagctcacggagcaaaaggaaagactacctttgaagggacaattctgtaccgagctgcaccgggaaagacggagggccacagacgctattacagtttaagggaaaccacaggctccgagagtgatgggggtgactcaagcagcaccaagtctgaaggtgccaacgggacagtggcaactgcagcaatccagcccaagaaagttaagggagtgggctttggagacattttcaaagacaagccaatcaaactaagaccaaggtcaattgaagtagaaaatgactttctgccggtagaaaagactattgggaagaagttacctgcaactacagcaactccagactcatcaaaaacagaaatggacagcaggacaaagagcaaggattactgcaaagtaatatttccatatgaggcacagaatgatgatgaattgacaatcaaagaaggagatatagtcactctcatcaataaggactgcatcgacgtaggctggtgggaaggagagctgaacggcagacgaggcgtgttccccgataacttcgtgaagttacttccaccggactttgaaaaggaagggaatagacccaagaagccaccgcctccatccgctcctgtcatcaaacaaggggcaggcaccactgagagaaaacatgaaattaaaaagatacctcctgaaagaccagaaatgcttccaaacagaacagaagaaaaagaaagaccagagagagagccaaaactggatttacagaagccctccgttcctgccataccgccaaaaaagcctcggccacctaagaccaattctctcagcagacctggcgcactgcccccgagaaggccggagagaccggtgggtccgctgacacacaccaggtactgctgtgctctcacctccggggcgggtgtggggtggctatggaaggaacacaggaggggaactgactgccacagaccttgggaggaagggagaggagaagggggtgctcaagcttccctcttacatcctccagcaaaattatctgaagacaccggccacttctgtccttgctcctgcactcaggcaggagtgagtgtgaggttgaggggtgcggtgtgggtttcatgaggactgggtacccagcatttaggccctgctcacacacaggggtttttcctgggccttattagaagcaaggccaactgcccttcagcctggaaatgcaggtggcgtgtccctctttgtccccctggatgttgtg

SEQ ID NO: 181153 - DNA, 2678 bp, Homo sapiens
  Payload ID: 15676
  Gene Symbol: SH3KBP1
  Gene Name: SH3-domain kinase binding protein 1
  Uniprot ID: Q96B97
  ENST ID: ENST00000379698
  CDS Start-End: 68-1954
gagcacggaacttattcctgcccagagttcagacacagccagaaattaccatttcatacttcacagaatggaggtttcagcagccaaagccccaagtgccgcagacttgtctgagattgaaataaagaaagagatgaagaaagaccctctcaccaacaaagctccagaaaagcccctgcacgaagtgcccagtggaaactctttgctgtcttctgaaacgattttaagaaccaataagagaggcgagcgacggaggcgccggtgccaggtggcattcagctacctgccccagaatgacgatgaacttgagctgaaagttggcgacatcatagaggtggtaggagaggtagaggaaggatggtgggaaggtgttctcaacgggaagactggaatgtttccttccaacttcatcaaggagctgtcaggggagtcggatgagcttggcatttcccaggatgagcagctatccaagtcaagtttaagggaaaccacaggctccgagagtgatgggggtgactcaagcagcaccaagtctgaaggtgccaacgggacagtggcaactgcagcaatccagcccaagaaagttaagggagtgggctttggagacattttcaaagacaagccaatcaaactaagaccaaggtcaattgaagtagaaaatgactttctgccggtagaaaagactattgggaagaagttacctgcaactacagcaactccagactcatcaaaaacagaaatggacagcaggacaaagagcaaggattactgcaaagtaatatttccatatgaggcacagaatgatgatgaattgacaatcaaagaaggagatatagtcactctcatcaataaggactgcatcgacgtaggctggtgggaaggagagctgaacggcagacgaggcgtgttccccgataacttcgtgaagttacttccaccggactttgaaaaggaagggaatagacccaagaagccaccgcctccatccgctcctgtcatcaaacaaggggcaggcaccactgagagaaaacatgaaattaaaaagatacctcctgaaagaccagaaatgcttccaaacagaacagaagaaaaagaaagaccagagagagagccaaaactggatttacagaagccctccgttcctgccataccgccaaaaaagcctcggccacctaagaccaattctctcagcagacctggcgcactgcccccgagaaggccggagagaccggtgggtccgctgacacacaccaggggtgacagtccaaagattgacttggccggcagttcgctatctggcatcctggacaaagatctctcggaccgcagcaatgacattgacttagaaggttttgactccgtggtatcatctactgagaaactcagtcatccgaccacaagcagaccaaaagctacagggaggcggcctccgtcccagtccctcacatcttcatccctttcaagccctgatatcttcgactccccaagtcccgaagaggataaggaggaacacatttcacttgcgcacagaggagtggacgcgtcaaagaaaacttccaagactgttaccatatcccaagtgtctgacaacaaagcatccctgccgcccaagccggggaccatggcagcaggtggcggtgggccagcccctctgtcctcagcggcgccctcccccctgtcatcctctttgggaacagctggacacagagccaactccccgtctctgttcggcacggaaggaaaaccaaagatggagcctgcggccagcagccaggcggccgtggaggagctaaggacacaggtccgcgagctgaggagcatcatcgagaccatgaaggaccagcagaaacgagagattaaacagttattgtctgagttggatgaagagaagaaaatccggcttcggttgcagatggaagtgaacgacataaagaaagctctacaatcaaaatgaatacttgatcaatgaaatgtcacattattcatcctgagtccgagactcaaattttctgccccagccaaaataatcttgtgccaaaagattaaaggtttgcctcaaaatgtccctgtttgaaagattagcacaaaagtcttgatagcacaacacaaattccatccaagaggagaatcttccccagggtttagtcctggggctggcactcgttgtgacttacacagagcaaaattgtgctaaaggcttttctactctgagatctcaatgcgaaatgaaaactcaggcagtttagtccatagtggtactattttgatgatattttccattaataaaatgtaatttcagattattcgtttacaagctttataattttatgattttttaatcgtgttttgtcacagacttccctagtgtttgtactacacgtagtcagaagcgagtgtccttttcttttgcttcaggctaagagctgcctcgctctttgtccccccattaggattctattacatatgcaattgtaggttcaacctgtccctttccctgccagcaaaccccaccaccctaagagaaattttagcttatatatgacggtatatttacaaaaagagaaagagaaaatctggtatttgcaatgatctgtgccttctttttaccaccctcttgattggagcttttgtgatgcagctaccatgattcaaaaaaattaaaaattaaaaaaaaaaaa

SEQ ID NO: 181154 - DNA, 3819 bp, Homo sapiens
  Payload ID: 15676
  Gene Symbol: SH3KBP1
  Gene Name: SH3-domain kinase binding protein 1
  Uniprot ID: Q96B97
  ENST ID: ENST00000379716
  CDS Start-End: 126-1409
tttggtcccaagtatgactcagggttaggctgggtcctcaggctccgtgctgttggaaggaagtgggaggattccaggggagttctgggaccttttcaaactgaagagaggaggctggctgcatcatgggagaagagactattgggaagaagttacctgcaactacagcaactccagactcatcaaaaacagaaatggacagcaggacaaagagcaaggattactgcaaagtaatatttccatatgaggcacagaatgatgatgaattgacaatcaaagaaggagatatagtcactctcatcaataaggactgcatcgacgtaggctggtgggaaggagagctgaacggcagacgaggcgtgttccccgataacttcgtgaagttacttccaccggactttgaaaaggaagggaatagacccaagaagccaccgcctccatccgctcctgtcatcaaacaaggggcaggcaccactgagagaaaacatgaaattaaaaagatacctcctgaaagaccagaaatgcttccaaacagaacagaagaaaaagaaagaccagagagagagccaaaactggatttacagaagccctccgttcctgccataccgccaaaaaagcctcggccacctaagaccaattctctcagcagacctggcgcactgcccccgagaaggccggagagaccggtgggtccgctgacacacaccaggggtgacagtccaaagattgacttggccggcagttcgctatctggcatcctggacaaagatctctcggaccgcagcaatgacattgacttagaaggttttgactccgtggtatcatctactgagaaactcagtcatccgaccacaagcagaccaaaagctacagggaggcggcctccgtcccagtccctcacatcttcatccctttcaagccctgatatcttcgactccccaagtcccgaagaggataaggaggaacacatttcacttgcgcacagaggagtggacgcgtcaaagaaaacttccaagactgttaccatatcccaagtgtctgacaacaaagcatccctgccgcccaagccggggaccatggcagcaggtggcggtgggccagcccctctgtcctcagcggcgccctcccccctgtcatcctctttgggaacagctggacacagagccaactccccgtctctgttcggcacggaaggaaaaccaaagatggagcctgcggccagcagccaggcggccgtggaggagctaaggacacaggtccgcgagctgaggagcatcatcgagaccatgaaggaccagcagaaacgagagattaaacagttattgtctgagttggatgaagagaagaaaatccggcttcggttgcagatggaagtgaacgacataaagaaagctctacaatcaaaatgaatacttgatcaatgaaatgtcacattattcatcctgagtccgagactcaaattttctgccccagccaaaataatcttgtgccaaaagattaaaggtttgcctcaaaatgtccctgtttgaaagattagcacaaaagtcttgatagcacaacacaaattccatccaagaggagaatcttccccagggtttagtcctggggctggcactcgttgtgacttacacagagcaaaattgtgctaaaggcttttctactctgagatctcaatgcgaaatgaaaactcaggcagtttagtccatagtggtactattttgatgatattttccattaataaaatgtaatttcagattattcgtttacaagctttataattttatgattttttaatcgtgttttgtcacagacttccctagtgtttgtactacacgtagtcagaagcgagtgtccttttcttttgcttcaggctaagagctgcctcgctctttgtccccccattaggattctattacatatgcaattgtaggttcaacctgtccctttccctgccagcaaaccccaccaccctaagagaaattttagcttatatatgacggtatatttacaaaaagagaaagagaaaatctggtatttgcaatgatctgtgccttctttttaccaccctcttgattggagcttttgtgatgcagctaccatgattcaaaaaaattaaaaattaaaaaaaaaaaatctgccacttatccaagtccactagaggccactgtcttcaaagcttctctcaccctagccaaaggtcctaagaggagacagctgtgaagttgggcgtgctctgtggtaccagctgtgacttttctatttctcctagttttaggttgttcatgaaactagaaatgtcatcctgcttgatttttcatcagccaagttaaacccctgctttctgtcctttgcaccttttgcgtgaacagaatatgcattattaaagcaaaaataaataaaagtaaaatgcaaatgaaaacaagggagggaaagttgtattatttcctgcactgggttacccgtgtgtgttatcgtttaaactgtattcacataatgtcatttgccttgctcacttgtaaccccttcctcaggtccaagagaatgggaggagggtcatgttgaagtgtagccactggaactttcttgcatttatggagttgctttttctttcccaaggaaactgatgtttgcctgtccgctttatctttgtagtacatgaacagttcagccttagactatgtaactgttttctcatccttagctgaaaatgaggggcctactgtattgcgagactgttcaggggtaggggtggagggggtggtcccttaatggcccctgaagatgttggatgtgtttctcaaaagctgctttgtctctttcctgagtttaatagtgaaactactaaacattaatagatttgcacagccacaaagaatgagagttgataataccgaagaagtgatgcaaaaacaaaaaatcacattactgatcattgatagtattacaaataaatgtctcttcctttctcttcctcccttcctccccctgccttcctcttaacctatgtgctcatccttgctacttgaggctgttatttccctccgagtatttaaggagcccaaacaccttggtcttcctgggtgggggcataattaagggaagggagtgtataaggaaggaaacctcataccctccattcccatccctggatatattgccttttcagcagcctcgggttcagtgtgcttggggtcaggagtgccaggttcccaagagcagcgtaaaacatccctgtaccccttgacagttataagcatttctgcgttaaacttgaagattccagagattccccacgacctaatgatctaagaatgcagattggattctttgatgttcaaatttctcatttacttatgaaaatccctaattatatagttttatataatgtgtatacagagtaggattgttgatgaaattgagcggttggaacaccctcatggaacactggcaacatggaatgtagagagctgatgtcttccccctcatagaggccattggcttcctttgtataaggagagggagaagtgattctggaaggagaagttggtatgtctagcttcattgcggcccctcgggctacccagcaagaggattctgcatcaaggaactggacgagccgctacccaaactgccaccatctttactctttacaaaatggacccatcgagaatgttgaaaagcttggaagtatcacttttgaaaaaaaaaaaaattattttgcattcagcatggactcgaccaggcatctatggagattatttttttgcttcattttataaagttgtatttagaaaagtcttaagtattgtgctttgtaaa

SEQ ID NO: 181155 - DNA, 1941 bp, Homo sapiens
  Payload ID: 15676
  Gene Symbol: SH3KBP1
  Gene Name: SH3-domain kinase binding protein 1
  ENST ID: ENST00000379726
  CDS Start-End: 1-1938
ctcaccaacaaagctccagaaaagcccctgcacgaagtgcccagtggaaactctttgctgtcttctgaaacgattttaagaaccaataagagaggcgagcgacggaggcgccggtgccaggtggcattcagctacctgccccagaatgacgatgaacttgagctgaaagttggcgacatcatagaggtggtaggagaggtagaggaaggatggtgggaaggtgttctcaacgggaagactggaatgtttccttccaacttcatcaaggagctgtcaggggagtcggatgagcttggcatttcccaggatgagcagctatccaagtcaaggcctgaaggtctccctccagcttctctgctgccctttccagctcacggagcaaaaggaaagactacctttgaagggacaattctgtaccgagctgcaccgggaaagacggagggccacagacgctattacagtttaagggaaaccacaggctccgagagtgatgggggtgactcaagcagcaccaagtctgaaggtgccaacgggacagtggcaactgcagcaatccagcccaagaaagttaagggagtgggctttggagacattttcaaagacaagccaatcaaactaagaccaaggtcaattgaagtagaaaatgactttctgccggtagaaaagactattgggaagaagttacctgcaactacagcaactccagactcatcaaaaacagaaatggacagcaggacaaagagcaaggattactgcaaagtaatatttccatatgaggcacagaatgatgatgaattgacaatcaaagaaggagatatagtcactctcatcaataaggactgcatcgacgtaggctggtgggaaggagagctgaacggcagacgaggcgtgttccccgataacttcgtgaagttacttccaccggactttgaaaaggaagggaatagacccaagaagccaccgcctccatccgctcctgtcatcaaacaaggggcaggcaccactgagagaaaacatgaaattaaaaagatacctcctgaaagaccagaaatgcttccaaacagaacagaagaaaaagaaagaccagagagagagccaaaactggatttacagaagccctccgttcctgccataccgccaaaaaagcctcggccacctaagaccaattctctcagcagacctggcgcactgcccccgagaaggccggagagaccggtgggtccgctgacacacaccaggggtgacagtccaaagattgacttggccggcagttcgctatctggcatcctggacaaagatctctcggaccgcagcaatgacattgacttagaaggttttgactccgtggtatcatctactgagaaactcagtcatccgaccacaagcagaccaaaagctacagggaggcggcctccgtcccagtccctcacatcttcatccctttcaagccctgatatcttcgactccccaagtcccgaagaggataaggaggaacacatttcacttgcgcacagaggagtggacgcgtcaaagaaaacttccaagactgttaccatatcccaagtgtctgacaacaaagcatccctgccgcccaagccggggaccatggcagcaggtggcggtgggccagcccctctgtcctcagcggcgccctcccccctgtcatcctctttgggaacagctggacacagagccaactccccgtctctgttcggcacggaaggaaaaccaaagatggagcctgcggccagcagccaggcggccgtggaggagctaaggacacaggtccgcgagctgaggagcatcatcgagaccatgaaggaccagcagaaacgagagattaaacagttattgtctgagttggatgaagagaagaaaatccggcttcggttgcagatggaagtgaacgacataaagaaagctctacaatcaaaatgaata

SEQ ID NO: 181156 - DNA, 4731 bp, Homo sapiens
  Payload ID: 15676
  Gene Symbol: SH3KBP1
  Gene Name: SH3-domain kinase binding protein 1
  Uniprot ID: Q96B97
  ENST ID: ENST00000397821
  CDS Start-End: 292-2289
cgcaatttccactcgcggggagcaggaaacccggcgcagccgggcgcattgggccgcgatgcaacagcagcagcaggagtcgccccggggcagcagcggcagcagcagcagaggcagcagcgggcggcgctgagccgccgccgccgccactgaggaagaagccggcccagccgccgccgcgtccggaccctcgcgcctggatcccagcgccccgatcccggcgccccaacccccacgcccgcctccgccaactttcacgctgcctcggcggcccggcccggctcgacgccaatggtggaggccatagtggagtttgactaccaggcccagcacgatgatgagctgacgatcagcgtgggtgaaatcatcaccaacatcaggaaggaggatggaggctggtgggagggacagatcaacggcaggagaggtttgttccctgacaactttgtaagagaaataaagaaagagatgaagaaagaccctctcaccaacaaagctccagaaaagcccctgcacgaagtgcccagtggaaactctttgctgtcttctgaaacgattttaagaaccaataagagaggcgagcgacggaggcgccggtgccaggtggcattcagctacctgccccagaatgacgatgaacttgagctgaaagttggcgacatcatagaggtggtaggagaggtagaggaaggatggtgggaaggtgttctcaacgggaagactggaatgtttccttccaacttcatcaaggagctgtcaggggagtcggatgagcttggcatttcccaggatgagcagctatccaagtcaagtttaagggaaaccacaggctccgagagtgatgggggtgactcaagcagcaccaagtctgaaggtgccaacgggacagtggcaactgcagcaatccagcccaagaaagttaagggagtgggctttggagacattttcaaagacaagccaatcaaactaagaccaaggtcaattgaagtagaaaatgactttctgccggtagaaaagactattgggaagaagttacctgcaactacagcaactccagactcatcaaaaacagaaatggacagcaggacaaagagcaaggattactgcaaagtaatatttccatatgaggcacagaatgatgatgaattgacaatcaaagaaggagatatagtcactctcatcaataaggactgcatcgacgtaggctggtgggaaggagagctgaacggcagacgaggcgtgttccccgataacttcgtgaagttacttccaccggactttgaaaaggaagggaatagacccaagaagccaccgcctccatccgctcctgtcatcaaacaaggggcaggcaccactgagagaaaacatgaaattaaaaagatacctcctgaaagaccagaaatgcttccaaacagaacagaagaaaaagaaagaccagagagagagccaaaactggatttacagaagccctccgttcctgccataccgccaaaaaagcctcggccacctaagaccaattctctcagcagacctggcgcactgcccccgagaaggccggagagaccggtgggtccgctgacacacaccaggggtgacagtccaaagattgacttggccggcagttcgctatctggcatcctggacaaagatctctcggaccgcagcaatgacattgacttagaaggttttgactccgtggtatcatctactgagaaactcagtcatccgaccacaagcagaccaaaagctacagggaggcggcctccgtcccagtccctcacatcttcatccctttcaagccctgatatcttcgactccccaagtcccgaagaggataaggaggaacacatttcacttgcgcacagaggagtggacgcgtcaaagaaaacttccaagactgttaccatatcccaagtgtctgacaacaaagcatccctgccgcccaagccggggaccatggcagcaggtggcggtgggccagcccctctgtcctcagcggcgccctcccccctgtcatcctctttgggaacagctggacacagagccaactccccgtctctgttcggcacggaaggaaaaccaaagatggagcctgcggccagcagccaggcggccgtggaggagctaaggacacaggtccgcgagctgaggagcatcatcgagaccatgaaggaccagcagaaacgagagattaaacagttattgtctgagttggatgaagagaagaaaatccggcttcggttgcagatggaagtgaacgacataaagaaagctctacaatcaaaatgaatacttgatcaatgaaatgtcacattattcatcctgagtccgagactcaaattttctgccccagccaaaataatcttgtgccaaaagattaaaggtttgcctcaaaatgtccctgtttgaaagattagcacaaaagtcttgatagcacaacacaaattccatccaagaggagaatcttccccagggtttagtcctggggctggcactcgttgtgacttacacagagcaaaattgtgctaaaggcttttctactctgagatctcaatgcgaaatgaaaactcaggcagtttagtccatagtggtactattttgatgatattttccattaataaaatgtaatttcagattattcgtttacaagctttataattttatgattttttaatcgtgttttgtcacagacttccctagtgtttgtactacacgtagtcagaagcgagtgtccttttcttttgcttcaggctaagagctgcctcgctctttgtccccccattaggattctattacatatgcaattgtaggttcaacctgtccctttccctgccagcaaaccccaccaccctaagagaaattttagcttatatatgacggtatatttacaaaaagagaaagagaaaatctggtatttgcaatgatctgtgccttctttttaccaccctcttgattggagcttttgtgatgcagctaccatgattcaaaaaaattaaaaattaaaaaaaaaaaatctgccacttatccaagtccactagaggccactgtcttcaaagcttctctcaccctagccaaaggtcctaagaggagacagctgtgaagttgggcgtgctctgtggtaccagctgtgacttttctatttctcctagttttaggttgttcatgaaactagaaatgtcatcctgcttgatttttcatcagccaagttaaacccctgctttctgtcctttgcaccttttgcgtgaacagaatatgcattattaaagcaaaaataaataaaagtaaaatgcaaatgaaaacaagggagggaaagttgtattatttcctgcactgggttacccgtgtgtgttatcgtttaaactgtattcacataatgtcatttgccttgctcacttgtaaccccttcctcaggtccaagagaatgggaggagggtcatgttgaagtgtagccactggaactttcttgcatttatggagttgctttttctttcccaaggaaactgatgtttgcctgtccgctttatctttgtagtacatgaacagttcagccttagactatgtaactgttttctcatccttagctgaaaatgaggggcctactgtattgcgagactgttcaggggtaggggtggagggggtggtcccttaatggcccctgaagatgttggatgtgtttctcaaaagctgctttgtctctttcctgagtttaatagtgaaactactaaacattaatagatttgcacagccacaaagaatgagagttgataataccgaagaagtgatgcaaaaacaaaaaatcacattactgatcattgatagtattacaaataaatgtctcttcctttctcttcctcccttcctccccctgccttcctcttaacctatgtgctcatccttgctacttgaggctgttatttccctccgagtatttaaggagcccaaacaccttggtcttcctgggtgggggcataattaagggaagggagtgtataaggaaggaaacctcataccctccattcccatccctggatatattgccttttcagcagcctcgggttcagtgtgcttggggtcaggagtgccaggttcccaagagcagcgtaaaacatccctgtaccccttgacagttataagcatttctgcgttaaacttgaagattccagagattccccacgacctaatgatctaagaatgcagattggattctttgatgttcaaatttctcatttacttatgaaaatccctaattatatagttttatataatgtgtatacagagtaggattgttgatgaaattgagcggttggaacaccctcatggaacactggcaacatggaatgtagagagctgatgtcttccccctcatagaggccattggcttcctttgtataaggagagggagaagtgattctggaaggagaagttggtatgtctagcttcattgcggcccctcgggctacccagcaagaggattctgcatcaaggaactggacgagccgctacccaaactgccaccatctttactctttacaaaatggacccatcgagaatgttgaaaagcttggaagtatcacttttgaaaaaaaaaaaaattattttgcattcagcatggactcgaccaggcatctatggagattatttttttgcttcattttataaagttgtatttagaaaagtcttaagtattgtgctttgtaaagaagatgattaaaatgaaattttgtgagaata

SEQ ID NO: 181157 - DNA, 663 bp, Homo sapiens
  Payload ID: 15676
  Gene Symbol: SH3KBP1
  Gene Name: SH3-domain kinase binding protein 1
  ENST ID: ENST00000432234
  CDS Start-End: 38-663
gctgctgtgaacagaggcagcaactggggaattggatatggaaataaagaaagagatgaagaaagaccctctcaccaacaaagctccagaaaagcccctgcacgaagtgcccagtggaaactctttgctgtcttctgaaacgattttaagaaccaataagagaggcgagcgacggaggcgccggtgccaggtggcattcagctacctgccccagaatgacgatgaacttgagctgaaagttggcgacatcatagaggtggtaggagaggtagaggaaggatggtgggaaggtgttctcaacgggaagactggaatgtttccttccaacttcatcaaggagctgtcaggggagtcggatgagcttggcatttcccaggatgagcagctatccaagtcaagtttaagggaaaccacaggctccgagagtgatgggggtgactcaagcagcaccaagtctgaaggtgccaacgggacagtggcaactgcagcaatccagcccaagaaagttaagggagtgggctttggagacattttcaaagacaagccaatcaaactaagaccaaggtcaattgaagtagaaaatgactttctgccggtagaaaagactattgggaagaagttacctgcaactacagcaactccagactcatcaaaaacagaaat

SEQ ID NO: 181158 - DNA, 518 bp, Homo sapiens
  Payload ID: 15676
  Gene Symbol: SH3KBP1
  Gene Name: SH3-domain kinase binding protein 1
  ENST ID: ENST00000431164
  CDS Start-End: 70-518
cgccaaggcggtggcgtggatcttgataggccgtgagctctttggcagaaatgaaactgttaacaaaggatggaaagaagcgagcgacggaggcgccggtgccaggtggcattcagctacctgccccagaatgacgatgaacttgagctgaaagttggcgacatcatagaggtggtaggagaggtagaggaaggatggtgggaaggtgttctcaacgggaagactggaatgtttccttccaacttcatcaaggagctgtcaggggagtcggatgagcttggcatttcccaggatgagcagctatccaagtcaagtttaagggaaaccacaggctccgagagtgatgggggtgactcaagcagcaccaagtctgaaggtgccaacgggacagtggcaactgcagcaatccagcccaagaaagttaagggagtgggctttggagacattttcaaagacaagccaatcaaactaagaccaaggtcaattgaagtagaaaatgactttctgccggtagaaaa

SEQ ID NO: 181159 - DNA, 2363 bp, Homo sapiens
  Payload ID: 15677
  Gene Symbol: SHKBP1
  Gene Name: SH3KBP1 binding protein 1
  Uniprot ID: Q8TBC3
  ENST ID: ENST00000291842
  CDS Start-End: 50-2173
gggtgcacacccggaagtgggtgcgggccagccggctcgcccgggggccatggcagcagcggctactgcagccgagggggtccccagtcgggggcctcccggggaagtcattcatctgaatgtgggaggcaagagattcagtacctctcgccagactctcacctggatcccagactccttcttctccagtcttctgagcggacgcatctcgacgctgaaagatgagaccggagcaatcttcatcgacagggaccctacagtcttcgcccccatcctcaacttcctgcgcaccaaagagttggatcccaggggtgtccacggttccagcctcctccatgaagcccagttctatgggctcactcctctggttcgtcgcctgcagcttcgagaggagttggatcgatcttcttgtggaaacgtcctcttcaatggttacctgccgccaccagtgttcccagtgaagcggcggaaccggcacagcctagtggggcctcagcagctaggaggacggccagcccctgtccgacggagcaacacgatgccccccaaccttggcaatgcagggctgctgggccgaatgctggatgagaaaacccctccctcaccctcaggacaacctgaggagccggggatggtgcgcctggtgtgtggacaccataattggatcgctgtggcctatacccagtttctagtctgctacaggttgaaggaagcctctggctggcagctggtgttttccagcccccgcctggactggcccatcgaacgactggcgctcacagcccgggtgcatggtggggctttgggtgaacatgacaagatggtggcagcagccaccggcagcgagatcctgctatgggctctgcaggcggaaggcggtggctccgagataggggtctttcatctgggggtgcctgtggaggccttgttcttcgtcgggaaccagctcattgctacaagccacacagggcgcatcggggtgtggaatgccgtcaccaagcactggcaggtccaggaggtgcagcccatcaccagttatgacgcggcaggctccttcctcctcctgggctgcaacaacggctccatttactacgtggatgtgcagaagttccccttgcgcatgaaagacaacgacctccttgtcagcgagctctatcgggacccagcggaggatggggtcaccgccctcagtgtctacctcacccccaagaccagtgacagtgggaactggatcgagatcgcctatggcaccagctcagggggcgtgcgggtcatcgtgcagcacccggagactgtgggctcggggcctcagctcttccagaccttcactgtgcaccgcagccctgtcaccaagatcatgctgtcggagaagcacctcatctcagtctgtgccgacaacaaccacgtgcggacatggtctgtgactcgcttccgcggcatgatttccacccagcccggctccaccccactcgcttcctttaagatcctggctctggagtcggcagatgggcatggcggctgcagtgctggcaatgacattggcccctacggtgagcgggacgaccagcaagtgttcatccagaaggtggtgcccagtgccagccagctcttcgtgcgtctctcatctactgggcagcgggtgtgctccgtgcgctccgtggacggctcacccacgacagccttcacagtgctggagtgcgagggctcccggcggctcggctctcggccccggcgctacctgctcactggccaggccaacggcagcttggccatgtgggacctaaccaccgccatggacggcctcggccaggcccctgcaggtggcctgacggagcaagagctgatggaacagctggaacactgtgagctggccccgccggctccttcagctccctcatggggctgtctccccagcccctcaccccgcatctccctcaccagcctccactcagcctccagcaacacctccttgtctggccaccgtgggagcccaagccccccgcaggctgaggcccggcgccgtggtgggggcagctttgtggaacgctgccaggaactggtgcggagtgggccagacctccgacggccacccacaccagccccgtggccctccagcggtctcggcactcccctcacacctcccaagatgaagctcaatgaaacttccttttgaacaacgcagctgccatgatgccttgggatgccctggtcctgggggactcaggtgcctccctgattcctgtgggaaccccgggttcagggccagggcctccttggaataaatggttattgttactaggtccccaccttccctcttttctggaagccaaagtcaccctccccaataaagtcctcactgccaa

SEQ ID NO: 181160 - DNA, 575 bp, Homo sapiens
  Payload ID: 15677
  Gene Symbol: SHKBP1
  Gene Name: SH3KBP1 binding protein 1
  ENST ID: ENST00000595523
  CDS Start-End: 142-255
gcattcctcacccgctcctcttcatctcttgcgtccgtttaccttccccgcccagattcagtacctctcgccagactctcacctggatcccagactccttcttctccagtcttctgagcggacgcatctcgacgctgaaagatgagaccggagcaatcttcatcgacagggaccctacagtcttcgcccccatcctcaacttcctgcgcaccaaagagttggatcccagcattctctgttcacccccacacctagaccctgacctctagtcaattctactacccaggggtgtccacggttccagcctcctccatgaagcccagttctatgggctcactcctctggttcgtcgcctgcagcttcgagaggagttggatcgatcttcttgtggaaacgtcctcttcaatggttacctgccgccaccagtgttcccagtgaagcggcggaaccggcacagcctagtggggcctcagcagctaggaggacggccagcccctgtccgacggagcaacacgatgccccccaaccttggcaatgcagggctgctgggccgaatgctggatgagaaaacccct

SEQ ID NO: 181161 - DNA, 552 bp, Homo sapiens
  Payload ID: 15677
  Gene Symbol: SHKBP1
  Gene Name: SH3KBP1 binding protein 1
  ENST ID: ENST00000595631
  CDS Start-End: 160-552
atcctgcgggagggggacgcattcctcacccgctcctcttcatctcttgcgtccgtttaccttccccgcccagattcagtacctctcgccagactctcacctggatcccagactccttcttctccagtcttctgagcggacgcatctcgacgctgaaagatgagaccggagcaatcttcatcgacagggaccctacagtcttcgcccccatcctcaacttcctgcgcaccaaagagttggatcccagttcgtcgcctgcagcttcgagaggagttggatcgatcttcttgtggaaacgtcctcttcaatggttacctgccgccaccagtgttcccagtgaagcggcggaaccggcacagcctagtggggcctcagcagctaggaggacggccagcccctgtccgacggagcaacacgatgccccccaaccttggcaatgcagggctgctgggccgaatgctggatgagaaaacccctccctcaccctcaggacaacctgaggagccggggatggtgcgcctggtgtgtggacaccataattggatcgctgtg

SEQ ID NO: 181162 - DNA, 913 bp, Homo sapiens
  Payload ID: 15677
  Gene Symbol: SHKBP1
  Gene Name: SH3KBP1 binding protein 1
  ENST ID: ENST00000600320
  CDS Start-End: 1-752
gcgagctctatcgggacccagcggaggatggggtcaccgccctcagtgtctacctcacccccaagaccagtgacagtgggaactggatcgagatcgcctatggcaccagctcagggggcgtgcgggtcatcgtgcagcacccggagactgtgggctcggggcctcagctcttccagaccttcactgtgcaccgcagccctgtcaccaagatcatgctgtcggagaagcacctcatctcagtctgtgccgacaacaaccacgtgcggacatggtctgtgactcgcttccgcggcatgatttccacccagcccggctccaccccactcgcttcctttaagatcctggctctggagtcggcagatgggcatggcggctgcagtgctggcaatgacattgcaggtggcctgacggagcaagagctgatggaacagctggaacactgtgagctggccccgccggctccttcagctccctcatggggctgtctccccagcccctcaccccgcatctccctcaccagcctccactcagcctccagcaacacctccttgtctggccaccgtgggagcccaagccccccgcaggctgaggcccggcgccgtggtgggggcagctttgtggaacgctgccaggaactggtgcggagtgggccagacctccgacggccacccacaccagccccgtggccctccagcggtctcggcactcccctcacacctcccaagatgaagctcaatgaaacttccttttgaacaacgcagctgccatgatgccttgggatgccctggtcctgggggactcaggtgcctccctgattcctgtgggaaccccgggttcagggccagggcctccttggaataaatggttattgttactaggtccccaccttccctcttttctggaagccaaagtc

SEQ ID NO: 181163 - DNA, 823 bp, Homo sapiens
  Payload ID: 15677
  Gene Symbol: SHKBP1
  Gene Name: SH3KBP1 binding protein 1
  ENST ID: ENST00000595945
  CDS Start-End: 36-461
aagtgggtgcgggccagccggctcgcccgggggccatggcagcagcggctactgcagccgagggggtccccagtcgggggcctcccggggaagtcattcatctgaatgtgggaggcaagagattcagtacctctcgccagactctcacctggatcccagactccttcttctccagtcttctgagcggacgcatctcgacgctgaaagatgagaccggagcaatcttcatcgacagggaccctacagtcttcgcccccatcctcaacttcctgcgcaccaaagagttggatcccaggggtgtccacggttccagcctcctccatgaagcccagttctatgggctcactcctctggtcctcctgttgcagttcgtcgcctgcagcttcgagaggagttggatcgatcttcttgtggaaacgtcctcttcaatggttacctgccgccaccagtgttcccagtgaagcggcggaaccggcacagcctagtggggcctcagcagctaggaggacggccagcccctgtccgacggagcaacacgatgccccccaaccttggcaatgcagggctgctgggccgaatgctggatgagaaaacccctccctcaccctcaggacaacctgaggagccggggatggtgcgcctggtgtgtggacaccataattggatcgctgtggcctatacccagtttctagtctgctacaggttgaaggaagcctctggctggcagctggtgttttccagcccccgcctggactggcccatcgaacgactggcgctcacagcccgggtgcatggtggggctttgggtgaacatgacaagatg

SEQ ID NO: 181164 - DNA, 684 bp, Homo sapiens
  Payload ID: 15677
  Gene Symbol: SHKBP1
  Gene Name: SH3KBP1 binding protein 1
  ENST ID: ENST00000595726
  CDS Start-End: 1-494
ggcagatgggcatggcggctgcagtgctggcaatgacattggcccctacggtgagcgggacgaccagcaagtgttcatccagaaggtggtgcccagtgccagccagctcttcgtgcgtctctcatctactgggcagcgcaggtggcctgacggagcaagagctgatggaacagctggaacactgtgagctggccccgccggctccttcagctccctcatggggctgtctccccagcccctcaccccgcatctccctcaccagcctccactcagcctccagcaacacctccttgtctggccaccgtgggagcccaagccccccgcaggctgaggcccggcgccgtggtgggggcagctttgtggaacgctgccaggaactggtgcggagtgggccagacctccgacggccacccacaccagccccgtggccctccagcggtctcggcactcccctcacacctcccaagatgaagctcaatgaaacttccttttgaacaacgcagctgccatgatgccttgggatgccctggtcctgggggactcaggtgcctccctgattcctgtgggaaccccgggttcagggccagggcctccttggaataaatggttattgttactaggtccccaccttccctcttttctggaagccaaagtcaccctccccaataaagtcctcactgccaa

SEQ ID NO: 181165 - DNA, 773 bp, Homo sapiens
  Payload ID: 15677
  Gene Symbol: SHKBP1
  Gene Name: SH3KBP1 binding protein 1
  ENST ID: ENST00000595803
  CDS Start-End: 48-356
gtgcacacccggaagtgggtgcgggccagccggctcgcccgggggccatggcagcagcggctactgcagccgagggggtccccagtcgggggcctcccggggaagtcattcatctgaatgtgggaggcaagagattcagtacctctcgccagactctcacctggatcccagactccttcttctccagtcttctgagcggacgcatctcgacgctgaaagatgagaccggagcaatcttcatcgacagggaccctacagtcttcgcccccatcctcaacttcctgcgcaccaaagagttggatcccaggttggcatggaaaaaggggagggagtccctcactgtcttcagtccctgaggagttctttcacctcctctgaatgtccacgggtgtccacggttccagcctcctccatgaagcccagttctatgggctcactcctctggttcgtcgcctgcagcttcgagaggagttggatcgatcttcttgtggaaacgtcctcttcaatggttacctgccgccaccagtgttcccagtgaagcggcggaaccggcacagcctagtggggcctcagcagctaggaggacggccagcccctgtccgacggagcaacacgatgccccccaaccttggcaatgcagggctgctgggccgaatgctggatgagaaaacccctccctcaccctcaggacaacctgaggagccggggatggtgcgcctggtgtgtggacaccataattggatcgctgtggcctatacccagtttctagtctg

SEQ ID NO: 181166 - DNA, 897 bp, Homo sapiens
  Payload ID: 15677
  Gene Symbol: SHKBP1
  Gene Name: SH3KBP1 binding protein 1
  ENST ID: ENST00000602011
  CDS Start-End: 1-897
cggctccatttactacgtggatgtgcagaagttccccttgcgcatgaaagacaacgacctccttgtcagcgagctctatcgggacccagcggaggatggggtcaccgccctcagtgtctacctcacccccaagaccatctgtgccgacaacaaccacgtgcggacatggtctgtgactcgcttccgcggcatgatttccacccagcccggctccaccccactcgcttcctttaagatcctggctctggagtcggcagatgggcatggcggctgcagtgctggcaatgacattggcccctacggtgagcgggacgaccagcaagtgttcatccagaaggtggtgcccagtgccagccagctcttcgtgcgtctctcatctactgggcagcgggtgtgctccgtgcgctccgtggacggctcacccacgacagccttcacagtgctggagtgcgagggctcccggcggctcggctctcggccccggcgctacctgctcactggccaggccaacggcagcttggccatgtgggacctaaccaccgccatggacggcctcggccaggcccctgcaggtggcctgacggagcaagagctgatggaacagctggaacactgtgagctggccccgccggctccttcagctccctcatggggctgtctccccagcccctcaccccgcatctccctcaccagcctccactcagcctccagcaacacctccttgtctggccaccgtgggagcccaagccccccgcaggctgaggcccggcgccgtggtgggggcagctttgtggaacgctgccaggaactggtgcggagtgggccagacctccgacggccacccacaccagccccgtggccctccagcggtctcggcactcccctcacacctcccaa

SEQ ID NO: 181167 - DNA, 870 bp, Homo sapiens
  Payload ID: 15677
  Gene Symbol: SHKBP1
  Gene Name: SH3KBP1 binding protein 1
  ENST ID: ENST00000593764
  CDS Start-End: 1-789
aagttccccttgcgcatgaaagacaacgacctccttgtcagcgagctctatcgggacccagcggaggatggggtcaccgccctcagtgtctacctcacccccaagaccagtgacagtgggaactggatcgagatcgcctatggcaccagctcagggggcgtgcgggtcatcgtgcagcacccggagactgtgggctcggggcctcagctcttccagaccttcactgtgcaccgcagccctgtcaccaagatcatgctgtcggagaagcacctcatctcagtctgtgccgacaacaaccacgtgcggacatggtctgtgactcgcttccgcggcatgatttccacccagcccggctccaccccactcgcttcctttaagatcctggctctggagtcggcagatgggcatggcggctgcagtgctggcaatgacattggtggcctgacggagcaagagctgatggaacagctggaacactgtgagctggccccgccggctccttcagctccctcatggggctgtctccccagcccctcaccccgcatctccctcaccagcctccactcagcctccagcaacacctccttgtctggccaccgtgggagcccaagccccccgcaggctgaggcccggcgccgtggtgggggcagctttgtggaacgctgccaggaactggtgcggagtgggccagacctccgacggccacccacaccagccccgtggccctccagcggtctcggcactcccctcacacctcccaagatgaagctcaatgaaacttccttttgaacaacgcagctgccatgatgccttgggatgccctggtcctgggggactcaggtgcctccctgattcctgtgggaaccccgg

SEQ ID NO: 181168 - DNA, 716 bp, Homo sapiens
  Payload ID: 15677
  Gene Symbol: SHKBP1
  Gene Name: SH3KBP1 binding protein 1
  ENST ID: ENST00000594298
  CDS Start-End: 1-527
gtgacagtgggaactggatcgagatcgcctatggcaccagctcagggggcgtgcgggtcatcgtgcagcacccggagactgtgggctcggggcctcagctcttccagaccttcactgtgcaccgcagccctgtcaccaagatcatgctgtcggagaagcacctcatctcagcaggtggcctgacggagcaagagctgatggaacagctggaacactgtgagctggccccgccggctccttcagctccctcatggggctgtctccccagcccctcaccccgcatctccctcaccagcctccactcagcctccagcaacacctccttgtctggccaccgtgggagcccaagccccccgcaggctgaggcccggcgccgtggtgggggcagctttgtggaacgctgccaggaactggtgcggagtgggccagacctccgacggccacccacaccagccccgtggccctccagcggtctcggcactcccctcacacctcccaagatgaagctcaatgaaacttccttttgaacaacgcagctgccatgatgccttgggatgccctggtcctgggggactcaggtgcctccctgattcctgtgggaaccccgggttcagggccagggcctccttggaataaatggttattgttactaggtccccaccttccctcttttctggaagccaaagtcaccctccccaataaagtcctcactgcca

SEQ ID NO: 181169 - DNA, 1993 bp, Homo sapiens
  Payload ID: 15677
  Gene Symbol: SHKBP1
  Gene Name: SH3KBP1 binding protein 1
  ENST ID: ENST00000600718
  CDS Start-End: 1-1832
ctgcagccgagggggtccccagtcgggggcctcccggggaagtcattcatctgaatgtgggaggcaagagattcagtacctctcgccagactctcacctggatcccagactccttcttctccagtcttctgagcggacgcatctcgacgctgaaagatgagaccggagcaatcttcatcgacagggaccctacagtcttcgcccccatcctcaacttcctgcgcaccaaagagttggatcccaggggtgtccacggttccagcctcctccatgaagcccagttctatgggctcactcctctggttcgtcgcctgcagcttcgagaggagttggatcgatcttcttgtggaaacgtcctcttcaatggttacctgccgccaccagtgttcccagtgaagcggcggaaccggcacagcctagtggggcctcagcagctaggaggacggccagcccctgtccgacggagcaacacgatgccccccaaccttggcaatgcagggctgctgggccgaatgctggatgagaaaacccctccctcaccctcaggacaacctgaggagccggggatggtgcgcctggtgtgtggacaccataattggatcgctgtggcctatacccagtttctagtctgctacaggttgaaggaagcctctggctggcagctggtgttttccagcccccgcctggactggcccatcgaacgactggcgctcacagcccgggtgcatggtggggctttgggtgaacatgacaagatggtggcagcagccaccggcagcgagatcctgctatgggctctgcaggcggaaggcggtggctccgagataggggtctttcatctgggggtgcctgtggaggccttgttcttcgtcgggaaccagctcattgctacaagccacacagggcgcatcggggtgtggaatgccgtcaccaagcactggcaggtccaggaggtgcagcccatcaccagttatgacgcggcaggctccttcctcctcctgggctgcaacaacggctccatttactacgtggatgtgcagaagttccccttgcgcatgaaagacaacgacctccttgtcagcgagctctatcgggacccagcggaggatggggtcaccgccctcagtgtctacctcacccccaagaccagtgacagtgggaactggatcgagatcgcctatggcaccagctcagggggcgtgcgggtcatcgtgcagcacccggagactgtgggctcggggcctcagctcttccagaccttcactgtgcaccgcagccctgtcaccaagatcatgctgtcggagaagcacctcatctcagtctgtgccgacaacaaccacgtgcggacatggtctgtgactcgcttccgcggcatgatttccacccagcccggctccaccccactcgcttcctttaagatcctggctctggagtcggcagatgggcatggcggctgcagtgctggcaatgacattgcaggtggcctgacggagcaagagctgatggaacagctggaacactgtgagctggccccgccggctccttcagctccctcatggggctgtctccccagcccctcaccccgcatctccctcaccagcctccactcagcctccagcaacacctccttgtctggccaccgtgggagcccaagccccccgcaggctgaggcccggcgccgtggtgggggcagctttgtggaacgctgccaggaactggtgcggagtgggccagacctccgacggccacccacaccagccccgtggccctccagcggtctcggcactcccctcacacctcccaagatgaagctcaatgaaacttccttttgaacaacgcagctgccatgatgccttgggatgccctggtcctgggggactcaggtgcctccctgattcctgtgggaaccccgggttcagggccagggcctccttggaataaatggttattgttactaggtccccaccttccctcttttctggaagccaaagtc

SEQ ID NO: 181170 - DNA, 1019 bp, Homo sapiens
  Payload ID: 15677
  Gene Symbol: SHKBP1
  Gene Name: SH3KBP1 binding protein 1
  ENST ID: ENST00000597396
  CDS Start-End: 1-834
cgcagccctgtcaccaagatcatgctgtcggagaagcacctcatctcagtctgtgccgacaacaaccacgtgcggacatggtctgtgactcgcttccgcggcatgatttccacccagcccggctccaccccactcgcttcctttaagatcctggctctggagtcggcagatgggcatggcggctgcagtgctggcaatgacattggcccctacggtgagcgggacgaccagcaagtgttcatccagaaggtggtgcccagtgccagccagctcttcgtgcgtctctcatctactgggcagcgggtgtgctccgtgcgctccgtggacggctcacccacgacagccttcacagtgctggagtgcgagggctcccggcggctcggctctcggccccggcgctacctgctcactggccaggccaacggcagcttggccatgtgggacctaaccaccgccatggacggcctcggccaggcccctggtggcctgacggagcaagagctgatggaacagctggaacactgtgagctggccccgccggctccttcagctccctcatggggctgtctccccagcccctcaccccgcatctccctcaccagcctccactcagcctccagcaacacctccttgtctggccaccgtgggagcccaagccccccgcaggctgaggcccggcgccgtggtgggggcagctttgtggaacgctgccaggaactggtgcggagtgggccagacctccgacggccacccacaccagccccgtggccctccagcggtctcggcactcccctcacacctcccaagatgaagctcaatgaaacttccttttgaacaacgcagctgccatgatgccttgggatgccctggtcctgggggactcaggtgcctccctgattcctgtgggaaccccgggttcagggccagggcctccttggaataaatggttattgttactaggtccccaccttccctcttttctggaagccaaagtcaccctccccaataaagtcctcact

SEQ ID NO: 181171 - DNA, 623 bp, Homo sapiens
  Payload ID: 15677
  Gene Symbol: SHKBP1
  Gene Name: SH3KBP1 binding protein 1
  ENST ID: ENST00000594862
  CDS Start-End: 1-431
cgaccagcaagtgttcatccagaaggtggtgcccagtgccagccagctcttcgtgcgtctctcatctactgggcagcggtggcctgacggagcaagagctgatggaacagctggaacactgtgagctggccccgccggctccttcagctccctcatggggctgtctccccagcccctcaccccgcatctccctcaccagcctccactcagcctccagcaacacctccttgtctggccaccgtgggagcccaagccccccgcaggctgaggcccggcgccgtggtgggggcagctttgtggaacgctgccaggaactggtgcggagtgggccagacctccgacggccacccacaccagccccgtggccctccagcggtctcggcactcccctcacacctcccaagatgaagctcaatgaaacttccttttgaacaacgcagctgccatgatgccttgggatgccctggtcctgggggactcaggtgcctccctgattcctgtgggaaccccgggttcagggccagggcctccttggaataaatggttattgttactaggtccccaccttccctcttttctggaagccaaagtcaccctccccaataaagtcctcactgccaaca

SEQ ID NO: 181172 - DNA, 785 bp, Homo sapiens
  Payload ID: 15677
  Gene Symbol: SHKBP1
  Gene Name: SH3KBP1 binding protein 1
  ENST ID: ENST00000596163
  CDS Start-End: 1-389
tgggctcggggcctcagctcttccagaccttcactgtgcaccgcagccctgtcaccaagatcatgctgtcggagaagcacctcatctcagtctgtgccgacaacaaccacgtgcggacatggtctgtgactcgcttccgcggcatgatttccacccagcccggctccaccccactcgcttcctttaagatcctggctctggagtcggcagatgggcatggcggctgcagtgctggcaatgacattggcccctacggtgagcgggacgaccagcaagtgttcatccagaaggtggtgcccagtgccagccagctcttcgtgcgtctctcatctactgggcagcggtggcctgacggagcaagagctgatggaacagctggaacactgtgagctggccccgccggctccttcagctccctcatggggctgtctccccagcccctcaccccgcatctccctcaccagcctccactcagcctccagcaacacctccttgtctggccaccgtgggagcccaagccccccgcaggctgaggcccggcgccgtggtgggggcagctttgtggaacgctgccaggaactggtgcggagtgggccagacctccgacggccacccacaccagccccgtggccctccagcggtctcggcactcccctcacacctcccaagatgaagctcaatgaaacttccttttgaacaacgcagctgccatgatgccttgggatgccctggtcctgggggactcaggtgcctccctgattcctgtgggaaccccgggttcaggg

SEQ ID NO: 181173 - DNA, 2284 bp, Homo sapiens
  Payload ID: 15677
  Gene Symbol: SHKBP1
  Gene Name: SH3KBP1 binding protein 1
  ENST ID: ENST00000600733
  CDS Start-End: 46-2094
gcacacccggaagtgggtgcgggccagccggctcgcccgggggccatggcagcagcggctactgcagccgagggggtccccagtcgggggcctcccggggaagtcattcatctgaatgtgggaggcaagagattcagtacctctcgccagactctcacctggatcccagactccttcttctccagtcttctgagcggacgcatctcgacgctgaaagatgagaccggagcaatcttcatcgacagggaccctacagtcttcgcccccatcctcaacttcctgcgcaccaaagagttggatcccaggggtgtccacggttccagcctcctccatgaagcccagttctatgggctcactcctctggttcgtcgcctgcagcttcgagaggagttggatcgatcttcttgtggaaacgtcctcttcaatggttacctgccgccaccagtgttcccagtgaagcggcggaaccggcacagcctagtggggcctcagcagctaggaggacggccagcccctgtccgacggagcaacacgatgccccccaaccttggcaatgcagggctgctgggccgaatgctggatgagaaaacccctccctcaccctcaggacaacctgaggagccggggatggtgcgcctggtgtgtggacaccataattggatcgctgtggcctatacccagtttctagtctgctacaggttgaaggaagcctctggctggcagctggtgttttccagcccccgcctggactggcccatcgaacgactggcgctcacagcccgggtgcatggtggggctttgggtgaacatgacaagatggtggcagcagccaccggcagcgagatcctgctatgggctctgcaggcggaaggcggtggctccgagatagggcgcatcggggtgtggaatgccgtcaccaagcactggcaggtccaggaggtgcagcccatcaccagttatgacgcggcaggctccttcctcctcctgggctgcaacaacggctccatttactacgtggatgtgcagaagttccccttgcgcatgaaagacaacgacctccttgtcagcgagctctatcgggacccagcggaggatggggtcaccgccctcagtgtctacctcacccccaagaccagtgacagtgggaactggatcgagatcgcctatggcaccagctcagggggcgtgcgggtcatcgtgcagcacccggagactgtgggctcggggcctcagctcttccagaccttcactgtgcaccgcagccctgtcaccaagatcatgctgtcggagaagcacctcatctcagtctgtgccgacaacaaccacgtgcggacatggtctgtgactcgcttccgcggcatgatttccacccagcccggctccaccccactcgcttcctttaagatcctggctctggagtcggcagatgggcatggcggctgcagtgctggcaatgacattggcccctacggtgagcgggacgaccagcaagtgttcatccagaaggtggtgcccagtgccagccagctcttcgtgcgtctctcatctactgggcagcgggtgtgctccgtgcgctccgtggacggctcacccacgacagccttcacagtgctggagtgcgagggctcccggcggctcggctctcggccccggcgctacctgctcactggccaggccaacggcagcttggccatgtgggacctaaccaccgccatggacggcctcggccaggcccctgcaggtggcctgacggagcaagagctgatggaacagctggaacactgtgagctggccccgccggctccttcagctccctcatggggctgtctccccagcccctcaccccgcatctccctcaccagcctccactcagcctccagcaacacctccttgtctggccaccgtgggagcccaagccccccgcaggctgaggcccggcgccgtggtgggggcagctttgtggaacgctgccaggaactggtgcggagtgggccagacctccgacggccacccacaccagccccgtggccctccagcggtctcggcactcccctcacacctcccaagatgaagctcaatgaaacttccttttgaacaacgcagctgccatgatgccttgggatgccctggtcctgggggactcaggtgcctccctgattcctgtgggaaccccgggttcagggccagggcctccttggaataaatggttattgttactaggtccccaccttccctcttttctggaagccaaagtcaccctccccaataaagtcctcactgccaa

SEQ ID NO: 181174 - DNA, 810 bp, Homo sapiens
  Payload ID: 15677
  Gene Symbol: SHKBP1
  Gene Name: SH3KBP1 binding protein 1
  ENST ID: ENST00000599575
  CDS Start-End: 34-300
gtgggtgcgggccagccggctcgcccgggggccatggcagcagcggctactgcagccgagggggtccccagtcgggggcctcccggggaagtcattcatctgaatgtgggaggcaagagattcagtacctctcgccagactctcacctggatcccagactccttcttctccagtcttctgagcggacgcatctcgacgctgaaagatgagaccggagcaatcttcatcgacagggaccctacagtcttcgcccccatcctcaacttcctgcgcaccaaagagttggatcccagaccctgacctctagtcaattctactacccaggggtgtccacggttccagcctcctccatgaagcccagttctatgggctcactcctctggttcgtcgcctgcagcttcgagaggagttggatcgatcttcttgtggaaacgtcctcttcaatggttacctgccgccaccagtgttcccagtgaagcggcggaaccggcacagcctagtggggcctcagcagctaggaggacggccagcccctgtccgacggagcaacacgatgccccccaaccttggcaatgcagggctgctgggccgaatgctggatgagaaaacccctccctcaccctcaggacaacctgaggagccggggatggtgcgcctggtgtgtggacaccataattggatcgctgtggcctatacccagtttctagtctgctacaggttgaaggaagcctctggctggcagctggtgttttccagcccccgcctggactggcccatcgaacgactggcgctcacagcccgggtgcatgg

SEQ ID NO: 181175 - DNA, 3128 bp, Homo sapiens
  Payload ID: 15678
  Gene Symbol: SPRN
  Gene Name: shadow of prion protein homolog (zebrafish)
  Uniprot ID: Q5BIV9
  ENST ID: ENST00000414069
  CDS Start-End: 113-568
ggctgagggtccgcgccgccgcccgcccgctccttcccgctcggccgcggcctcagggacggatactccagcgcgcggttccaaccgaggcccgtggtttagccccacgaagatgaactgggcacccgcaacgtgctgggctctgctactggcggccgccttcctctgcgacagcggcgcagccaagggcggccgcggaggtgcgcggggcagtgcccggggaggggtccgcgggggtgcgcgcggggcctcgagggtgcgcgtgaggccggcgcagcgctacggtgccccgggctcctccctgcgcgtggctgccgccggggcggcagccggggcggcggcgggagcggccgcgggcctggcggcgggctcgggctggagaagggccgcgggacccggggaacgcggcctggaggacgaggaggacggggtgcccggaggcaacgggacaggccccggcatctacagctaccgggcgtggacttcgggcgctggacccacgcgcggcccgcgtctctgtctcgtgctgggcggcgccctcggagccctggggctgctgcggccctaggcctggctgggctcggggaccacatctggcccccggcccgcgccatcccccaggatcctccggcctgggctcccccttcctcccttgcccacggtcttggagccccactgggtgcaggagctgctggctgtccctgtggacccgccatccaccgtcctgcccacgccgcctcagcctgccacctcccacctagaggagaccatgggccctgccccacccactccaggatgttagggtcccctcagccaaaaaggcagctgcctgtggctcctgtaccaaccgcccagccacgctccatcgccgcccaaagggaggtgccaaggccaggaacccaagccaccccggctcccctcgcctgcccaggggccgtggtgactcacgggcagggaggcgacatcaggctggttctgccactgagcccctgaggaatctgaccctccccaaaagaagcagtgaaatggaccaaaggacttaagaatttggggggaagtgagggaaaaacgttaggtgctaaccacctgcccagaagagtggatctcacagcccaggaacattcccaagcaggaaaaccgtccgtccgaggaacgtccatcctggctctctgcggctggtgggaaaacacaccctgccctgaggggctgtccaggccttctcccccacaccctcaggccgagatccgtgagagacccactttgctccaacaacttgaaacaagtcactttaccctccttaggacccattttgggggggaaaaaccaacacattccagagctttccaagtcctttgaacttcaggttcacattcagggatcacacagttctgcctgttctcagggcacagcaactgccaatcccgctgaagaggcctccctgggcacagcacaggctgcacggtgcacgcatttccctgaaggcagccccttcttcggaagcagctgttccaggcctcggaacagggcctgggtatccgcgtggtgggctggcagctgacggcctgctcagtggagccaggagctaactcagaccccaaagcaagcagggggccagtggcggggcccagcgcccagcaggacacccatgcaagaggctgagccccccaacatccaaggacaggagagacatggagtggcgctggacagtcacgacaaggacttgcctccagcactggacacacctgtgttaagaccagccctctgcttcccagtcccgccagcctggggcatcctccatgggctcagcactgagaggtcttgggtctgccacgttctctagctctccagtcacccactcatccagggtaggaggggttctccctgccccccgccgtggccttgggatctcaccctctccatgtcctggggacagcctcgccctcagccggactgcatccctcctgggcctgagcctcgggactcagtggacaccaaagtcaagaccagcacccaccacgggccctgccagcctctgccttccccagctggcctgggttctggcctgggtgaggatctggaagctgttggcaggactcaaccaagcactgctctctagctccagggcactaagccacaggaggcagcgccctgcagcctcccgtccacactgccagcaatgcccctggcccagtgagcccagacgctcctccaccccttccagaccaagctcaacgcctccaagaccagcaggccaaggccaagccctgccccagatcctcataggcagagaagcccttctgacatttcccccaggaggcagggggtggtctgagtctcctcacagcagagagacccaccggagccccctcaactttgcagatgcccacctggaaaatgggctgagctgcaccagaccctcacacaccacagcactgcaagctgatggaatgttccagttatgatggacacttcgtgatctgcaatgactgttgattcagcacattagcatctgacacagccaacctgaatacttcctgccccaggcggtcagggttatggcacgatgcaggtggcactcaggggctaacttcaggctgatgagtgtgtggggtatggggcagcagaggcagccagccagcaaagaggggccactgagcaccagggccctggtggaggctgctgtgggacggtcaggccaccaccgcaaagaggcagccggagcttctgcacaggatgtccctggccccaggtcctgcagcaccttagtccatactaccagccccacccaccttccttcctcttccctcttctaggacacaggctgtggaccccttcaggtgcactataatggggctggaggggcccccacatctctcagccccactaatgcagaatcccactacccgtgagctagaaggtgctcagaggccaggggtctctactgcccatgccgggcggccttccagtcattgcacagcaaagccatgtgcagggcgtccccctcaaccctgccctgaacatgccccagggcactgaggggcgaagccagtgcttgggctctgctgctgggagtctctggtctgtgtctgtgtgtgcctgtaagtgtgaaataaacctctctgatggca

SEQ ID NO: 181176 - DNA, 1687 bp, Homo sapiens
  Payload ID: 15679
  Gene Symbol: SHARPIN
  Gene Name: SHANK-associated RH domain interactor
  Uniprot ID: Q9H0F6
  ENST ID: ENST00000359551
  CDS Start-End: 485-1465
gtgtgggcgtggcgggggctggggtctgcgggcgaaggtggcagcccattggaggtcccgggagcgaagtccagctgccgttaggcgctgggatagtcgcacgctggatgcatctacgtccgccgagcccctggggcgaagaggccgcgtccgccttcagttgtggccggtgcttcgccccctgacccttcgcccccaaagaccagctctaacgtgagcgcctcggccgccctgccccagcctcgtacacgccgccagcctcgcccagccggtgtccggagaccctcgggccgtgtccatttgtgggcaaagccagcggggcaggcttggccagagtgcaccactcggcgccgtcccaggcccgacgctctgggcgcgcccggaaccccaggttcgcggcccgtgtttccgaccggcggagggggctcagcggcccgatcccacggaagcgcgctcggaggggtgggacccggccggaccggagatggcgccgccagcgggcggggcggcggcggcggcctcggacttgggctccgccgcagtgctcttggctgtgcacgccgcggtgaggccgctgggcgccgggccagacgccgaggcacagctgcggaggctgcagctgagcgcggaccctgagcggcctgggcgcttccggctggagctgctgggcgcgggacctggggcggttaatttggagtggcccctggagtcagtttcctacaccatccgaggccccacccagcacgagctacagcctccaccaggagggcctggaaccctcagcctgcacttcctcaaccctcaggaagctcagcggtgggcagtcctagtccgaggtgccaccgtggaaggacagaatggcagcaagagcaactcaccaccagccttgggcccagaagcatgccctgtctccctgcccagtcccccggaagcctccacactcaagggccctccacctgaggcagatcttcctaggagccctggaaacttgacggagagagaagagctggcagggagcctggcccgggctattgcaggtggagacgagaagggggcagcccaagtggcagccgtcctggcccagcatcgtgtggccctgagtgttcagcttcaggaggcctgcttcccacctggccccatcaggctgcaggtcacacttgaagacgctgcctctgccgcatccgccgcgtcctctgcacacgttgccctgcaggtccacccccactgcactgttgcagctctccaggagcaggtgttctcagagctcggtttcccgccagccgtgcaacgctgggtcatcggacggtgcctgtgtgtgcctgagcgcagccttgcctcttacggggttcggcaggatggggaccctgctttcctctacttgctgtcagctcctcgagaagccccagcccagctggtcctgtccttcctgcaccttcatcaatgccccagaccgccctggctgtgagatgtgtagcacccagaggccctgcacttgggacccccttgctgcagcttccacctagcagccaccagaggttacaaggggagagtggcccttccctcacaagtccgacatctccaggcccccactgaactccggggacctctactgactgcttgctgggacagtcaccagggttggggggaagggccacaaaatgaaaccattaaagacccttaagagcca

SEQ ID NO: 181177 - DNA, 1765 bp, Homo sapiens
  Payload ID: 15679
  Gene Symbol: SHARPIN
  Gene Name: SHANK-associated RH domain interactor
  Uniprot ID: Q9H0F6
  ENST ID: ENST00000398712
  CDS Start-End: 438-1601
attggaggtcccgggagcgaagtccagctgccgttaggcgctgggatagtcgcacgctggatgcatctacgtccgccgagcccctggggcgaagaggccgcgtccgccttcagttgtggccggtgcttcgccccctgacccttcgcccccaaagaccagctctaacgtgagcgcctcggccgccctgccccagcctcgtacacgccgccagcctcgcccagccggtgtccggagaccctcgggccgtgtccatttgtgggcaaagccagcggggcaggcttggccagagtgcaccactcggcgccgtcccaggcccgacgctctgggcgcgcccggaaccccaggttcgcggcccgtgtttccgaccggcggagggggctcagcggcccgatcccacggaagcgcgctcggaggggtgggacccggccggaccggagatggcgccgccagcgggcggggcggcggcggcggcctcggacttgggctccgccgcagtgctcttggctgtgcacgccgcggtgaggccgctgggcgccgggccagacgccgaggcacagctgcggaggctgcagctgagcgcggaccctgagcggcctgggcgcttccggctggagctgctgggcgcgggacctggggcggttaatttggagtggcccctggagtcagtttcctacaccatccgaggccccacccagcacgagctacagcctccaccaggagggcctggaaccctcagcctgcacttcctcaaccctcaggaagctcagcggtgggcagtcctagtccgaggtgccaccgtggaaggacagaatggcagcaagagcaactcaccaccagccttgggcccagaagcatgccctgtctccctgcccagtcccccggaagcctccacactcaagggccctccacctgaggcagatcttcctaggagccctggaaacttgacggagagagaagagctggcagggagcctggcccgggctattgcaggtggagacgagaagggggcagcccaagtggcagccgtcctggcccagcatcgtgtggccctgagtgttcagcttcaggaggcctgcttcccacctggccccatcaggctgcaggtcacacttgaagacgctgcctctgccgcatccgccgcgtcctctgcacacgttgccctgcaggtccacccccactgcactgttgcagctctccaggagcaggtgttctcagagctcggtttcccgccagccgtgcaacgctgggtcatcggacggtgcctgtgtgtgcctgagcgcagccttgcctcttacggggttcggcaggatggggaccctgctttcctctacttgctgtcagctcctcgagaagccccagccacaggacctagccctcagcacccccagaagatggacggggaacttggacgcttgtttcccccatcattggggctacccccaggcccccagccagctgcctccagcctgcccagtccactccagcccagctggtcctgtccttcctgcaccttcatcaatgccccagaccgccctggctgtgagatgtgtagcacccagaggccctgcacttgggacccccttgctgcagcttccacctagcagccaccagaggttacaaggggagagtggcccttccctcacaagtccgacatctccaggcccccactgaactccggggacctctactgactgcttgctgggacagtcaccagggttggggggaagggccacaaaatgaaaccattaaagacccttaagagcca

SEQ ID NO: 181178 - DNA, 533 bp, Homo sapiens
  Payload ID: 15679
  Gene Symbol: SHARPIN
  Gene Name: SHANK-associated RH domain interactor
  ENST ID: ENST00000532536
  CDS Start-End: 1-288
gaccctgctttcctctacttgctgtcagctcctcgagaagccccagccacaggacctagccctcagcacccccagaagatggacggggaacttggacgcttgtttcccccatcattggggctacccccaggcccccagccagctgcctccagcctgcccagtccactccagcccagctggtcctgtccttcctgcaccttcatcaatgccccagaccgccctggctgtgagatgtgtagcacccagaggccctgcacttgggacccccttgctgcagcttccacctagcagccaccagaggtaccagaggtggcacaggcaggggaggtggggggcagggcagaatccacaggaatgacccagctcctcccccacaggttacaaggggagagtggcccttccctcacaagtccgacatctccaggcccccactgaactccggggacctctactgactgcttgctgggacagtcaccagggttggggggaagggccacaaaatgaaaccattaaagacccttaagagccagcaa

SEQ ID NO: 181179 - DNA, 4558 bp, Homo sapiens
  Payload ID: 15680
  Gene Symbol: SHC4
  Gene Name: SHC (Src homology 2 domain containing) family, member 4
  Uniprot ID: Q6S5L8
  ENST ID: ENST00000332408
  CDS Start-End: 430-2322
agaacagaaggctggggtgagggtgggagtcgggtgctaaatatttctactaggctcctgcaaggctagtgatgcagcgggccccccgaccggcgctcgcccgggttctgcgcctaagagttggccgtgagcgacccgcgccgccgggagcctgggtctaggctctcccgacaaggattccaaggcgagaacactggtgcctctgcctgggccagggagagactgaaatcagagcaggggaggcgtttcccccatgggctgtcacccttaaggggccgggagccgaggtgggcgagctcgagagcagagttggagaggtggctgctgtgagttgcatcgggcgttgaggtatctgatgtctgcaccgtttatctaccagacgacgaggcgatttatgcaacagtatcctgtttcagcactgccaaggctatgcgagaacgcggccaggacagcctggcaggactcgtgctgtatgtaggactcttcgggcaccccgggatgctgcacagggccaagtacagccgctttcggaacgagtcgatcacgtccttggacgaaggtagctccggaggctcggtcgggaacaagggctcgccgcagcctccccaccccgccctggcacctcacctgccgactgaagatgccaccttgccgtcgcaggagagccccaccccactgtgcaccttgatcccccgcatggcaagcatgaagctggccaacccggccactttgctgagtctgaaaaacttttgcctgggtaccaaagaggtgcctcggctgaagctccaggaaagccgggacccaggttccagcggcccctcttccccagaaaccagtttaagtaggtccgggactgcacctccaccgcagcaggacctggtgggacacagggcaaccgccctaacccctgattcgtgcccgcttcctggccctggggagccaacacttaggagcaggcaggacaggcactttctacagcacctgttggggatgggcatgaactactgtgtgaggtacatgggctgtgttgaagtgctgcaatcaatgagatcactggattttggaatgagaacccaagttacaagggaagcaataagtcgcctgtgtgaagctgtccccggggcaaatggagccattaaaaagcgaaagcctccagttaagttcctatcaacagtccttggcaaaagtaatcttcagttttcaggaatgaatataaaactgaccatctcaacatgcagtctcacattgatgaatcttgacaaccaacagattattgcaaatcatcatatgcagtctatttcatttgcctctggaggggatcctgatactacagactatgttgcctacgtagctaaagatccagttaatcaacgagcctgtcacatattggaatgccacaatggaatggcccaagacgtcataagtaccatagggcaggcttttgaactccggtttaaacagtacttgaaaaatccttctttgaatacttcttgtgaaagtgaggaggtgcatattgatagccatgccgaggagagagaagatcatgaatattacaatgaaattccagggaagcagccaccagtaggtggtgtttcagatatgcggatcaaagttcaagccacggaacaaatggcttactgccccatacagtgtgaaaagttgtgctatttgcctggaaactccaagtgcagcagtgtatatgagaactgtttagaacaaagcagggcaataggtaatgtccatccaagaggggtgcagtcccagcgagatacctcattattgaagcacacgtgccgagtggatctctttgatgacccctgctacattaatacacaggctcttcaaagtacacctggctctgctggaaatcaaaggtcagcccaaccactggggagcccatggcactgcggaaaggcaccagaaactgttcagccgggtgccacagcccagcctgccagctcacattctttgccacacattaagcagcagctgtggagcgaagaatgctatcatggcaagctgagcaggaaggcggcagagagcctcttggtaaaggatggggactttttggttcgagagagtgcaacatcccctggccaatatgtgctgagtggactacagggaggccaagcaaaacatcttctcctggtggatcctgaaggcaaggtgaggaccaaggatcatgtatttgataatgtcggccaccttatcagataccatatggataacagtttgccaatcatctcctctggaagcgaagtaagccttaaacaaccagtgagaaaagataataatccagcacttttgcattccaacaaatgacagtattgaagcaccatcacactgatatttcaagaaaccccattttgtattaggacacaaagataatttaaactttgtttgtagataaaatagagcacaaactgtgaagtgcatctttccaagaccatcatggaccaggtcctctataaaatgaagaactaacaaaaattagtcttcagaaatgaaaatcagaaaagaggaagagggttggtcattttaaaagaaattatatgtatgcacggatgtcactttttaaggccatattgcattgataacaagctaaaagcacaactaaaatttcacatgctaacgacaacttgaatgaactgctggggcagtggtatgtgcctttcaacttgataatttgggggacattttcatattgggagattaattctaagtatcttcatgttctatgactatagaaccatttgccaaaaaaaaaagcttttcttgctacaaaaaataagcaattttcttgagccttattgactttattacattttctgtttagcagcatttttcactgcaatgttaaaataaatatgacattgaattcgaactgtgtgtatgtcagtggaatcaaatcaaaagccactaacatggctgtctgtttcattggactgtcccatttgctggttaaaaggattggggcccaaatcctctggcctagcatttctcagtgtttgctattcagactgtctaaatacagcatgtgacaagctgaagaagccaaatctatcagtcatttctgatttcattatattctccccctcttcctgctaaaaagacaaaaaacaaaaaacaaaaaaaacaaaaaaaacctcatgagtgcatggatttaaaagagggcaaacaaaaccagtattcttcatatttactattcaaattggtttcattcttagtaaaagtacagaatctatttgaaattatagtaaaatttcttcttgattggctgacactgaatcatagtttctcacctacatatatccttagcacctcgtatagatatgatcagacaaaatgcagaaggaaaaaaaaacatattgaatgaagcacttggaaagattttccacatgtagaccaactggtaaactaacagagtgattaagcatggtgtacagaaaagcattacgctgagtcttaccagtgtgaccttcagcaagttgctgaatctgtttgggttccagtttccttggcaataaaatgagctaaatgggctaggtgaatttggaggactacttcagtcctaacttatagtatgagtctctaaaaagcaagtttttcatttgttagaggtcgttattgataaccagtctgtatagttaaggtaaaaaattaagcttttcttctatagtctgtgtccatactcacagaatgaatggcacacctgagatcaacattcacatagtttagactccaaaccattcagtctaaaatactgaaactttggaatatagggaatgatgataaaagtggatttggtttgagtagcagaaaactacttatgtccttttcttgcctttccaagaaaaatgttttttgtttttttttttaatcttgagttatctggatattgccttgactccatttcattttggctatgtagatacaacttagtctttgtgattgtgatatatttgctaagttttaaataaaacttcttttggatagaaatcattagaaaccaagcatactgcactctaatattttactgtaaaggcttatgatttttatttctactgccattaattttttagatggatttgtttcctcttacacaactagaattaatgtatttttcaccagttttccatataccttaggtcttgatcgtttgtccttaaaaaggggatcagcatgagtatagacagtagaaatgtatgggtagtctaaccacttttatcagagacagagcagggctgtggtctcactctagctgagcagagtattaacttggtagcaagagttcctgatacaaatagatgcaatgactgtaaatggtgtcagcagtacacatggataatcagtatttgactgtaatagtatagtagttaaatacagcacttaaaaataccacagacacagttaaagcaaaaggaaacaataaaaggaatgtctgcatgctattttaatctcacattctttatctgtcttaaagtggaaatccatttgcctataaatacctgtaaacgactttaaaaaataaatgattattgctttgtgacaattgaca

SEQ ID NO: 181180 - DNA, 2799 bp, Homo sapiens
  Payload ID: 15680
  Gene Symbol: SHC4
  Gene Name: SHC (Src homology 2 domain containing) family, member 4
  Uniprot ID: Q6S5L8
  ENST ID: ENST00000396535
  CDS Start-End: 832-1995
tttttaaaaacatgttttacctgtttttaccttcaacttaaaagcctcaggttttaagttgtatatacttatatgaattatatgactgtgtatacttacaggattcaagcacatttcatttattctgcactttatttctattattattacattatagttatgtagaattatacaactcaccataatgtagaatcaatgggagccctgagcttgttttcctgcaactagatggtcccatctgggggtgatgagacacagtgacacccgaggtgtgttccttatgtccggtctattctgtaatctcattttggttgctgttactgtggaaaatcctgcctcacaaagataggatgttgaaaatggaaggaggcttttcagtacttttgtggcaatctcaggatgttccgccttgactttaatcgagaacgtatggagatttgaagttgtctcaaacatacttttaaggccaccgtcatttgcaatatcaagcagttgatcctcttctagcgtggacaaagtggattcacctggcttattcacaaatgggtcacagatccattccgtcttttgtggatgagaagtgtgatggttaatactgagtgtcaacttgattggattgaaggatacaagtattgatcattggtgtgtctgtgagggtgttgccaaaggagattaacatttgagtcagtgggctgcgaaaggcagacccacccttaatctggttgggcacaatctaatcagctgccagcttggctagaatataagcaggcagaaaaatgtgaaaagagagactggcctagcctcccagcctaaatctttctcctgtgttggatgcttcctgccctcgaacattggattcccaagttcttcagtttcagaactcggactggctctcctctctccttagcctgcagacagcctattgtaggaccttgtgatcatattattgcaaatcatcatatgcagtctatttcatttgcctctggaggggatcctgatactacagactatgttgcctacgtagctaaagatccagttaatcaacgagcctgtcacatattggaatgccacaatggaatggcccaagacgtcataagtaccatagggcaggcttttgaactccggtttaaacagtacttgaaaaatccttctttgaatacttcttgtgaaagtgaggaggtgcatattgatagccatgccgaggagagagaagatcatgaatattacaatgaaattccagggaagcagccaccagtaggtggtgtttcagatatgcggatcaaagttcaagccacggaacaaatggcttactgccccatacagtgtgaaaagttgtgctatttgcctggaaactccaagtgcagcagtgtatatgagaactgtttagaacaaagcagggcaataggtaatgtccatccaagaggggtgcagtcccagcgagatacctcattattgaagcacacgtgccgagtggatctctttgatgacccctgctacattaatacacaggctcttcaaagtacacctggctctgctggaaatcaaaggtcagcccaaccactggggagcccatggcactgcggaaaggcaccagaaactgttcagccgggtgccacagcccagcctgccagctcacattctttgccacacattaagcagcagctgtggagcgaagaatgctatcatggcaagctgagcaggaaggcggcagagagcctcttggtaaaggatggggactttttggttcgagagagtgcaacatcccctggccaatatgtgctgagtggactacagggaggccaagcaaaacatcttctcctggtggatcctgaaggcaaggtgaggaccaaggatcatgtatttgataatgtcggccaccttatcagataccatatggataacagtttgccaatcatctcctctggaagcgaagtaagccttaaacaaccagtgagaaaagataataatccagcacttttgcattccaacaaatgacagtattgaagcaccatcacactgatatttcaagaaaccccattttgtattaggacacaaagataatttaaactttgtttgtagataaaatagagcacaaactgtgaagtgcatctttccaagaccatcatggaccaggtcctctataaaatgaagaactaacaaaaattagtcttcagaaatgaaaatcagaaaagaggaagagggttggtcattttaaaagaaattatatgtatgcacggatgtcactttttaaggccatattgcattgataacaagctaaaagcacaactaaaatttcacatgctaacgacaacttgaatgaactgctggggcagtggtatgtgcctttcaacttgataatttgggggacattttcatattgggagattaattctaagtatcttcatgttctatgactatagaaccatttgccaaaaaaaaaagcttttcttgctacaaaaaataagcaattttcttgagccttattgactttattacattttctgtttagcagcatttttcactgcaatgttaaaataaatatgacattgaattcgaactgtgtgtatgtcagtggaatcaaatcaaaagccactaacatggctgtctgtttcattggactgtcccatttgctggttaaaaggattggggcccaaatcctctggcctagcatttctcagtgtttgctattcagactgtctaaatacagcatgtgacaagctgaagaagccaaatctatcagtcatttctgatttcattatattctccccctcttcctgctaaaaagacaaaaaacaaaaa

SEQ ID NO: 181181 - DNA, 1447 bp, Homo sapiens
  Payload ID: 15680
  Gene Symbol: SHC4
  Gene Name: SHC (Src homology 2 domain containing) family, member 4
  ENST ID: ENST00000537958
  CDS Start-End: 221-1255
aggtaccgcctcctacttggcgcgccactgtggttggagtagctcagtgttttctccggggtgttggcgtcgccttttgagctacgtttccatcgattcgaacttcgtatctagggaccctgcatgcaagagcttatagtgaagaaatacttggtcccatttcttttcgcctgggaggtatctttccactattagcaatgcgattattgcaaatcatcatatgcagtctatttcatttgcctctggaggggatcctgatactacagactatgttgcctacgtagctaaagatccagttaatcaacgagcctgtcacatattggaatgccacaatggaatggcccaagacgtcataagtaccatagggcaggcttttgaactccggtttaaacagtacttgaaaaatccttctttgaatacttcttgtgaaagtgaggaggtgcatattgatagccatgccgaggagagagaagatcatgaatattacaatgaaattccagggaagcagccaccagtaggtggtgtttcagatatgcggatcaaagttcaagccacggaacaaatggcttactgccccatacagtgtgaaaagttgtgctatttgcctggaaactccaagtgcagcagtgtatatgagaactgtttagaacaaagcagggcaataggtaatgtccatccaagaggggtgcagtcccagcgagatacctcattattgaagcacacgtgccgagtggatctctttgatgacccctgctacattaatacacaggctcttcaaagtacacctggctctgctggaaatcaaaggtcagcccaaccactggggagcccatggcactgcggaaaggcaccagaaactgttcagccgggtgccacagcccagcctgccagctcacattctttgccacacattaagcagcagctgtggagcgaagaatgctatcatggcaagctgagcaggaaggcggcagagagcctcttggtaaaggatggggactttttggttcgagagagtgcaacatcccctggccaatatgtgctgagtggactacagggaggccaagcaaaacatcttctcctggtggatcctgaaggcaaggtgaggaccaaggatcatgtatttgataatgtcggccaccttatcagataccatatggataacagtttgccaatcatctcctctggaagcgaagtaagccttaaacaaccagtgagaaaagataataatccagcacttttgcattccaacaaatgacagtattgaagcaccatcacactgatatttcaagaaaccccattttgtattaggacacaaagataatttaaactttgtttgtagataaaatagagcacaaactgtgaagtgcatctttccaagaccatcatggaccaggtcctctataaaatgaagaactaacaaaaattagtcttcagaaatgaaaatcag

SEQ ID NO: 181182 - DNA, 821 bp, Homo sapiens
  Payload ID: 15680
  Gene Symbol: SHC4
  Gene Name: SHC (Src homology 2 domain containing) family, member 4
  ENST ID: ENST00000557797
  CDS Start-End: 81-515
gaagaaatacttggtcccatttcttttcgcctgggaggtatctttccactattagcaatgcgattattgcaaatcatcatatgcagtctatttcatttgcctctggaggggatcctgatactacagactatgttgcctacgtagctaaagatccagttaatcaacgagcctgtcacatattggaatgccacaatggaatggcccaagacgtcataagtaccatagggcaggcttttgaactccggtttaaacagtacttgaaaaatccttctttgaatacttcttgtgaaagtgaggaggtgcatattgatagccatgccgaggagagagaagatcatgaatattacaatgaaattccagggaagcagccaccagtaggtggtgtttcagatatgcggatcaaagttcaagccacggaacaaatggcttactgccccatacagtgtgaaaagttgtgctatttggtaatgtccatccaagaggggtgcagtcccagcgagatacctcattattgaagcacacgtgccgagtggatctctttgatgacccctgctacattaatacacaggctcttcaaagtacacctggctctgctggaaatcaaaggtcagcccaaccactggggagcccatggcactgcggaaaggcaccagaaactgttcagccgggtgccacagcccagcctgccagctcacattctttgccacacattaagcagcagctgtggagcgaagaatgctatcatggcaagctgagcaggaaggcggcagagagcctcttggtaaaggatggggactttttggttcgagagagtgcaacat

SEQ ID NO: 181183 - DNA, 885 bp, Homo sapiens
  Payload ID: 15680
  Gene Symbol: SHC4
  Gene Name: SHC (Src homology 2 domain containing) family, member 4
  ENST ID: ENST00000558220
  CDS Start-End: 502-885
accgcctcctacttggcgcgccactgtggttggagtagctcagtgttttctccggggtgttggcgtcgccttttgagctacgtttccatcgattcgaacttcgtatctagggaccctgcatgcaagagcgtaacagtttctgtgttacttaaccctactgctgcttgtaatgctgcaaaccggaaaataaccttacatggccttcgtaacatttaatgctccttcccccccttcctcttcccctgggcaatttaccgatgtactgatgacttgtaaatccacgtctccaaaccagacaacatccataaccacagatcagcatattaagaactaatccattttgtccttttagtgttttcatttaaaaagttaaattcacaaacaacagatatattgtactttttttttttttagttatagtgaagaaatacttggtcccatttcttttcgcctgggaggtatctttccactattagcaatgcgattattgcaaatcatcatatgcagtctatttcatttgcctctggaggggatcctgatactacagactatgttgcctacgtagctaaagatccagttaatcaacgagcctgtcacatattggaatgccacaatggaatggcccaagacgtcataagtaccatagggcaggcttttgaactccggtttaaacagtacttgaaaaatccttctttgaatacttcttgtgaaagtgaggaggtgcatattgatagccatgccgaggagagagaagatcatgaatattacaatgaaattccagggaagcagccaccagtaggtggtgtttcagatatgcggatcaaagttcaagccacggaacaaatggcttactgccccatacagtgtgaaaagttgtgctatttg

SEQ ID NO: 181184 - DNA, 3472 bp, Homo sapiens
  Payload ID: 15681
  Gene Symbol: SHC1
  Gene Name: SHC (Src homology 2 domain containing) transforming protein 1
  Uniprot ID: P29353
  ENST ID: ENST00000368445
  CDS Start-End: 216-1967
gaggctccacgttgggcggggatggggcctgaaactgtctgggtctgagctggggagcggaagccacttgtccctctccctccccaggacttctgtgactcctgggccacagaggtccaaccaggctaagggcctggggataccccctgcctggcccccttgcccaaactggcaggggggccaggctgggcagcagcccctctttcacctcaactatggatctcctgccccccaagcccaagtacaatccactccggaatgagtctctgtcatcgctggaggaaggggcttctgggtccacccccccggaggagctgccttccccatcagcttcatccctggggcccatcctgcctcctctgcctggggacgatagtcccactaccctgtgctccttcttcccccggatgagcaacctgaggctggccaacccggctggggggcgcccagggtctaagggggagccaggaagggcagctgatgatggggaggggatcgtaggggcagccatgccagactcaggccccctacccctcctccaggacatgaacaagctgagtggaggcggcgggcgcaggactcgggtggaagggggccagcttgggggcgaggagtggacccgccacgggagctttgtcaataagcccacgcggggctggctgcatcccaacgacaaagtcatgggacccggggtttcctacttggttcggtacatgggttgtgtggaggtcctccagtcaatgcgtgccctggacttcaacacccggactcaggtcaccagggaggccatcagtctggtgtgtgaggctgtgccgggtgctaagggggcgacaaggaggagaaagccctgtagccgcccgctcagctctatcctggggaggagtaacctgaaatttgctggaatgccaatcactctcaccgtctccaccagcagcctcaacctcatggccgcagactgcaaacagatcatcgccaaccaccacatgcaatctatctcatttgcatccggcggggatccggacacagccgagtatgtcgcctatgttgccaaagaccctgtgaatcagagagcctgccacattctggagtgtcccgaagggcttgcccaggatgtcatcagcaccattggccaggccttcgagttgcgcttcaaacaatacctcaggaacccacccaaactggtcacccctcatgacaggatggctggctttgatggctcagcatgggatgaggaggaggaagagccacctgaccatcagtactataatgacttcccggggaaggaaccccccttggggggggtggtagacatgaggcttcgggaaggagccgctccaggggctgctcgacccactgcacccaatgcccagacccccagccacttgggagctacattgcctgtaggacagcctgttgggggagatccagaagtccgcaaacagatgccacctccaccaccctgtccaggcagagagctttttgatgatccctcctatgtcaacgtccagaacctagacaaggcccggcaagcagtgggtggtgctgggccccccaatcctgctatcaatggcagtgcaccccgggacctgtttgacatgaagcccttcgaagatgctcttcgcgtgcctccacctccccagtcggtgtccatggctgagcagctccgaggggagccctggttccatgggaagctgagccggcgggaggctgaggcactgctgcagctcaatggggacttcctggtacgggagagcacgaccacacctggccagtatgtgctcactggcttgcagagtgggcagcctaagcatttgctactggtggaccctgagggtgtggttcggactaaggatcaccgctttgaaagtgtcagtcaccttatcagctaccacatggacaatcacttgcccatcatctctgcgggcagcgaactgtgtctacagcaacctgtggagcggaaactgtgatctgccctagcgctctcttccagaagatgccctccaatcctttccaccctattccctaactctcgggacctcgtttgggagtgttctgtgggcttggccttgtgtcagagctgggagtagcatggactctgggtttcatatccagctgagtgagagggtttgagtcaaaagcctgggtgagaatcctgcctctccccaaacattaatcaccaaagtattaatgtacagagtggcccctcacctgggcctttcctgtgccaacctgatgccccttccccaagaaggtgagtgcttgtcatggaaaatgtcctgtggtgacaggcccagtggaacagtcacccttctgggcaagggggaacaaatcacacctctgggcttcagggtatcccagacccctctcaacacccgccccccccatgtttaaactttgtgcctttgaccatctcttaggtctaatgatattttatgcaaacagttcttggacccctgaattcaatgacagggatgccaacaccttcttggcttctgggacctgtgttcttgctgagcaccctctccggtttgggttgggataacagaggcaggagtggcagctgtcccctctccctggggatatgcaacccttagagattgccccagagccccactcccggccaggcgggagatggacccctcccttgctcagtgcctcctggccggggcccctcaccccaaggggtctgtatatacatttcataaggcctgccctcccatgttgcatgcctatgtactctacgccaaagtgcagcccttcctcctgaagcctctgccctgcctccctttctgggagggcggggtgggggtgactgaatttgggcctcttgtacagttaactctcccaggtggattttgtggaggtgagaaaaggggcattgagactataaagcagtagacaatccccacataccatctgtagagttggaactgcattcttttaaagttttatatgcatatattttagggctgtagacttactttcctattttcttttccattgcttattcttgagcacaaaatgataatcaattattacatttatacatcacctttttgacttttccaagcccttttacagctcttggcattttcctcgcctaggcctgtgaggtaactgggatcgcaccttttataccagagacctgaggcagatgaaatttatttccatctaggactagaaaaacttgggtctcttaccgcgagactgagaggcagaagtcagcccgaatgcctgtcagtttcatggaggggaaacgcaaaacctgcagttcctgagtaccttctacaggcccggcccagcctaggcccggggtggccacaccacagcaagccggccccccctcttttggccttgtggataagggagagttgaccgttttcatcctggcctccttttgctgtttggatgtttccacgggtctcacttataccaaagggaaaactcttcattaaagtccgtatttcttcta

SEQ ID NO: 181185 - DNA, 2879 bp, Homo sapiens
  Payload ID: 15681
  Gene Symbol: SHC1
  Gene Name: SHC (Src homology 2 domain containing) transforming protein 1
  ENST ID: ENST00000368449
  CDS Start-End: 310-1374
agagaagaggctccacgttgggcggggatggggcctgaaactgtctgggtctgagctggggagcggaagccacttgtccctctccctccccaggacttctgtgactcctgggccacagaggtccaaccaggctaagggcctggggataccccctgcctggcccccttgcccaaactggcaggggggccaggctgggcagcagcccctctttcacctcaactatggatctcctgccccccaagcccaagtacaatccactccggaatgagtctctctatcctggggaggagtaacctgaaatttgctggaatgccaatcactctcaccgtctccaccagcagcctcaacctcatggccgcagactgcaaacagatcatcgccaaccaccacatgcaatctatctcatttgcatccggcggggatccggacacagccgagtatgtcgcctatgttgccaaagaccctgtgaatcagagagcctgccacattctggagtgtcccgaagggcttgcccaggatgtcatcagcaccattggccaggccttcgagttgcgcttcaaacaatacctcaggaacccacccaaactggtcacccctcatgacaggatggctggctttgatggctcagcatgggatgaggaggaggaagagccacctgaccatcagtactataatgacttcccggggaaggaaccccccttggggggggtggtagacatgaggcttcgggaaggagccgctccaggggctgctcgacccactgcacccaatgcccagacccccagccacttgggagctacattgcctgtaggacagcctgttgggggagatccagaagtccgcaaacagatgccacctccaccaccctgtccaggcagagagctttttgatgatccctcctatgtcaacgtccagaacctagacaaggcccggcaagcagtgggtggtgctgggccccccaatcctgctatcaatggcagtgcaccccgggacctgtttgacatgaagcccttcgaagatgctcttcgcgtgcctccacctccccagtcggtgtccatggctgagcagctccgaggggagccctggttccatgggaagctgagccggcgggaggctgaggcactgctgcagctcaatggggacttcctggtacgggagagcacgaccacacctggccagtatgtgctcactggcttgcagagtgggcagcctaagcatttgctactggtggaccctgagggtgtggttcggactaaggatcaccgctttgaaagtgtcagtcaccttatcagctaccacatggacaatcacttgcccatcatctctgcgggcagcgaactgtgtctacagcaacctgtggagcggaaactgtgatctgccctagcgctctcttccagaagatgccctccaatcctttccaccctattccctaactctcgggacctcgtttgggagtgttctgtgggcttggccttgtgtcagagctgggagtagcatggactctgggtttcatatccagctgagtgagagggtttgagtcaaaagcctgggtgagaatcctgcctctccccaaacattaatcaccaaagtattaatgtacagagtggcccctcacctgggcctttcctgtgccaacctgatgccccttccccaagaaggtgagtgcttgtcatggaaaatgtcctgtggtgacaggcccagtggaacagtcacccttctgggcaagggggaacaaatcacacctctgggcttcagggtatcccagacccctctcaacacccgccccccccatgtttaaactttgtgcctttgaccatctcttaggtctaatgatattttatgcaaacagttcttggacccctgaattcaatgacagggatgccaacaccttcttggcttctgggacctgtgttcttgctgagcaccctctccggtttgggttgggataacagaggcaggagtggcagctgtcccctctccctggggatatgcaacccttagagattgccccagagccccactcccggccaggcgggagatggacccctcccttgctcagtgcctcctggccggggcccctcaccccaaggggtctgtatatacatttcataaggcctgccctcccatgttgcatgcctatgtactctacgccaaagtgcagcccttcctcctgaagcctctgccctgcctccctttctgggagggcggggtgggggtgactgaatttgggcctcttgtacagttaactctcccaggtggattttgtggaggtgagaaaaggggcattgagactataaagcagtagacaatccccacataccatctgtagagttggaactgcattcttttaaagttttatatgcatatattttagggctgtagacttactttcctattttcttttccattgcttattcttgagcacaaaatgataatcaattattacatttatacatcacctttttgacttttccaagcccttttacagctcttggcattttcctcgcctaggcctgtgaggtaactgggatcgcaccttttataccagagacctgaggcagatgaaatttatttccatctaggactagaaaaacttgggtctcttaccgcgagactgagaggcagaagtcagcccgaatgcctgtcagtttcatggaggggaaacgcaaaacctgcagttcctgagtaccttctacaggcccggcccagcctaggcccggggtggccacaccacagcaagccggccccccctcttttggccttgtggataagggagagttgaccgttttcatcctggcctccttttgctgtttggatgtttccacgggtctcacttataccaaagggaaaactcttcattaaagtccgtatttcttcta

SEQ ID NO: 181186 - DNA, 3059 bp, Homo sapiens
  Payload ID: 15681
  Gene Symbol: SHC1
  Gene Name: SHC (Src homology 2 domain containing) transforming protein 1
  Uniprot ID: P29353
  ENST ID: ENST00000368450
  CDS Start-End: 133-1554
gagtgtaataaagtttctccagggaggcagggcccggggagaaagttggagcggtaacctaagctggcagtggcgtgatccggcaccaaatcggcccgcggtgcggtgcggagactccatgaggccctggacatgaacaagctgagtggaggcggcgggcgcaggactcgggtggaagggggccagcttgggggcgaggagtggacccgccacgggagctttgtcaataagcccacgcggggctggctgcatcccaacgacaaagtcatgggacccggggtttcctacttggttcggtacatgggttgtgtggaggtcctccagtcaatgcgtgccctggacttcaacacccggactcaggtcaccagggaggccatcagtctggtgtgtgaggctgtgccgggtgctaagggggcgacaaggaggagaaagccctgtagccgcccgctcagctctatcctggggaggagtaacctgaaatttgctggaatgccaatcactctcaccgtctccaccagcagcctcaacctcatggccgcagactgcaaacagatcatcgccaaccaccacatgcaatctatctcatttgcatccggcggggatccggacacagccgagtatgtcgcctatgttgccaaagaccctgtgaatcagagagcctgccacattctggagtgtcccgaagggcttgcccaggatgtcatcagcaccattggccaggccttcgagttgcgcttcaaacaatacctcaggaacccacccaaactggtcacccctcatgacaggatggctggctttgatggctcagcatgggatgaggaggaggaagagccacctgaccatcagtactataatgacttcccggggaaggaaccccccttggggggggtggtagacatgaggcttcgggaaggagccgctccaggggctgctcgacccactgcacccaatgcccagacccccagccacttgggagctacattgcctgtaggacagcctgttgggggagatccagaagtccgcaaacagatgccacctccaccaccctgtccaggcagagagctttttgatgatccctcctatgtcaacgtccagaacctagacaaggcccggcaagcagtgggtggtgctgggccccccaatcctgctatcaatggcagtgcaccccgggacctgtttgacatgaagcccttcgaagatgctcttcgcgtgcctccacctccccagtcggtgtccatggctgagcagctccgaggggagccctggttccatgggaagctgagccggcgggaggctgaggcactgctgcagctcaatggggacttcctggtacgggagagcacgaccacacctggccagtatgtgctcactggcttgcagagtgggcagcctaagcatttgctactggtggaccctgagggtgtggttcggactaaggatcaccgctttgaaagtgtcagtcaccttatcagctaccacatggacaatcacttgcccatcatctctgcgggcagcgaactgtgtctacagcaacctgtggagcggaaactgtgatctgccctagcgctctcttccagaagatgccctccaatcctttccaccctattccctaactctcgggacctcgtttgggagtgttctgtgggcttggccttgtgtcagagctgggagtagcatggactctgggtttcatatccagctgagtgagagggtttgagtcaaaagcctgggtgagaatcctgcctctccccaaacattaatcaccaaagtattaatgtacagagtggcccctcacctgggcctttcctgtgccaacctgatgccccttccccaagaaggtgagtgcttgtcatggaaaatgtcctgtggtgacaggcccagtggaacagtcacccttctgggcaagggggaacaaatcacacctctgggcttcagggtatcccagacccctctcaacacccgccccccccatgtttaaactttgtgcctttgaccatctcttaggtctaatgatattttatgcaaacagttcttggacccctgaattcaatgacagggatgccaacaccttcttggcttctgggacctgtgttcttgctgagcaccctctccggtttgggttgggataacagaggcaggagtggcagctgtcccctctccctggggatatgcaacccttagagattgccccagagccccactcccggccaggcgggagatggacccctcccttgctcagtgcctcctggccggggcccctcaccccaaggggtctgtatatacatttcataaggcctgccctcccatgttgcatgcctatgtactctacgccaaagtgcagcccttcctcctgaagcctctgccctgcctccctttctgggagggcggggtgggggtgactgaatttgggcctcttgtacagttaactctcccaggtggattttgtggaggtgagaaaaggggcattgagactataaagcagtagacaatccccacataccatctgtagagttggaactgcattcttttaaagttttatatgcatatattttagggctgtagacttactttcctattttcttttccattgcttattcttgagcacaaaatgataatcaattattacatttatacatcacctttttgacttttccaagcccttttacagctcttggcattttcctcgcctaggcctgtgaggtaactgggatcgcaccttttataccagagacctgaggcagatgaaatttatttccatctaggactagaaaaacttgggtctcttaccgcgagactgagaggcagaagtcagcccgaatgcctgtcagtttcatggaggggaaacgcaaaacctgcagttcctgagtaccttctacaggcccggcccagcctaggcccggggtggccacaccacagcaagccggccccccctcttttggccttgtggataagggagagttgaccgttttcatcctggcctccttttgctgtttggatgtttccacgggtctcacttataccaaagggaaaactcttcattaaagtccgtatttcttcta

SEQ ID NO: 181187 - DNA, 3062 bp, Homo sapiens
  Payload ID: 15681
  Gene Symbol: SHC1
  Gene Name: SHC (Src homology 2 domain containing) transforming protein 1
  Uniprot ID: P29353
  ENST ID: ENST00000368453
  CDS Start-End: 133-1557
gagtgtaataaagtttctccagggaggcagggcccggggagaaagttggagcggtaacctaagctggcagtggcgtgatccggcaccaaatcggcccgcggtgcggtgcggagactccatgaggccctggacatgaacaagctgagtggaggcggcgggcgcaggactcgggtggaagggggccagcttgggggcgaggagtggacccgccacgggagctttgtcaataagcccacgcggggctggctgcatcccaacgacaaagtcatgggacccggggtttcctacttggttcggtacatgggttgtgtggaggtcctccagtcaatgcgtgccctggacttcaacacccggactcaggtcaccagggaggccatcagtctggtgtgtgaggctgtgccgggtgctaagggggcgacaaggaggagaaagccctgtagccgcccgctcagctctatcctggggaggagtaacctgaaatttgctggaatgccaatcactctcaccgtctccaccagcagcctcaacctcatggccgcagactgcaaacagatcatcgccaaccaccacatgcaatctatctcatttgcatccggcggggatccggacacagccgagtatgtcgcctatgttgccaaagaccctgtgaatcagagagcctgccacattctggagtgtcccgaagggcttgcccaggatgtcatcagcaccattggccaggccttcgagttgcgcttcaaacaatacctcaggaacccacccaaactggtcacccctcatgacaggatggctggctttgatggctcagcatgggatgaggaggaggaagagccacctgaccatcagtactataatgacttcccggggaaggaaccccccttggggggggtggtagacatgaggcttcgggaaggagccgctccaggggctgctcgacccactgcacccaatgcccagacccccagccacttgggagctacattgcctgtaggacagcctgttgggggagatccagaagtccgcaaacagatgccacctccaccaccctgtccagcaggcagagagctttttgatgatccctcctatgtcaacgtccagaacctagacaaggcccggcaagcagtgggtggtgctgggccccccaatcctgctatcaatggcagtgcaccccgggacctgtttgacatgaagcccttcgaagatgctcttcgcgtgcctccacctccccagtcggtgtccatggctgagcagctccgaggggagccctggttccatgggaagctgagccggcgggaggctgaggcactgctgcagctcaatggggacttcctggtacgggagagcacgaccacacctggccagtatgtgctcactggcttgcagagtgggcagcctaagcatttgctactggtggaccctgagggtgtggttcggactaaggatcaccgctttgaaagtgtcagtcaccttatcagctaccacatggacaatcacttgcccatcatctctgcgggcagcgaactgtgtctacagcaacctgtggagcggaaactgtgatctgccctagcgctctcttccagaagatgccctccaatcctttccaccctattccctaactctcgggacctcgtttgggagtgttctgtgggcttggccttgtgtcagagctgggagtagcatggactctgggtttcatatccagctgagtgagagggtttgagtcaaaagcctgggtgagaatcctgcctctccccaaacattaatcaccaaagtattaatgtacagagtggcccctcacctgggcctttcctgtgccaacctgatgccccttccccaagaaggtgagtgcttgtcatggaaaatgtcctgtggtgacaggcccagtggaacagtcacccttctgggcaagggggaacaaatcacacctctgggcttcagggtatcccagacccctctcaacacccgccccccccatgtttaaactttgtgcctttgaccatctcttaggtctaatgatattttatgcaaacagttcttggacccctgaattcaatgacagggatgccaacaccttcttggcttctgggacctgtgttcttgctgagcaccctctccggtttgggttgggataacagaggcaggagtggcagctgtcccctctccctggggatatgcaacccttagagattgccccagagccccactcccggccaggcgggagatggacccctcccttgctcagtgcctcctggccggggcccctcaccccaaggggtctgtatatacatttcataaggcctgccctcccatgttgcatgcctatgtactctacgccaaagtgcagcccttcctcctgaagcctctgccctgcctccctttctgggagggcggggtgggggtgactgaatttgggcctcttgtacagttaactctcccaggtggattttgtggaggtgagaaaaggggcattgagactataaagcagtagacaatccccacataccatctgtagagttggaactgcattcttttaaagttttatatgcatatattttagggctgtagacttactttcctattttcttttccattgcttattcttgagcacaaaatgataatcaattattacatttatacatcacctttttgacttttccaagcccttttacagctcttggcattttcctcgcctaggcctgtgaggtaactgggatcgcaccttttataccagagacctgaggcagatgaaatttatttccatctaggactagaaaaacttgggtctcttaccgcgagactgagaggcagaagtcagcccgaatgcctgtcagtttcatggaggggaaacgcaaaacctgcagttcctgagtaccttctacaggcccggcccagcctaggcccggggtggccacaccacagcaagccggccccccctcttttggccttgtggataagggagagttgaccgttttcatcctggcctccttttgctgtttggatgtttccacgggtctcacttataccaaagggaaaactcttcattaaagtccgtatttcttcta

SEQ ID NO: 181188 - DNA, 780 bp, Homo sapiens
  Payload ID: 15681
  Gene Symbol: SHC1
  Gene Name: SHC (Src homology 2 domain containing) transforming protein 1
  ENST ID: ENST00000366442
  CDS Start-End: 368-780
ggttagtgaggccggaagtgagtgtaataaagtttctccagggaggcagggcccggggagaaagttggagcggtaacctaagctggcagtggcgtgatccggcaccaaatcggcccgcggtgcggtgcggagactccatgaggccctgacggagtttcgctcttatcgtccaggctggagtgcaatggtgcgatctcggctcactgcaacctccgcctcctgagttcaagtgattctcctgcctcagcctcctgagtagctgggattacaggcgcccaccaccacgcccggctaatttttgtatttttagtagagacggggtttccccatgttggctaggctagcctcgaactcctgacctcaggacatgaacaagctgagtggaggcggcgggcgcaggactcgggtggaagggggccagcttgggggcgaggagtggacccgccacgggagctttgtcaataagcccacgcggggctggctgcatcccaacgacaaagtcatgggacccggggtttcctacttggttcggtacatgggttgtgtggaggtcctccagtcaatgcgtgccctggacttcaacacccggactcaggtcaccagggaggccatcagtctggtgtgtgaggctgtgccgggtgctaagggggcgacaaggaggagaaagccctgtagccgcccgctcagctctatcctggggaggagtaacctgaaatttgctggaatgccaatcactctcaccgtctccaccagcagcctcaacctcatggccgcagactg

SEQ ID NO: 181189 - DNA, 1305 bp, Homo sapiens
  Payload ID: 15681
  Gene Symbol: SHC1
  Gene Name: SHC (Src homology 2 domain containing) transforming protein 1
  ENST ID: ENST00000444664
  CDS Start-End: 1-892
ggatgaggaggaggaagagccacctgaccatcagtactataatgacttcccggggaaggaaccccccttggggggggtggtagacatgaggcttcgggaaggagccgctccaggggctgctcgacccactgcacccaatgcccagacccccagccacttgggagctacattgcctgtaggacagcctgttgggggagatccagaagtccgcaaacagatgccacctccaccaccctgtccaggcagagagctttttgatgatccctcctatgtcaacgtccagaacctagacaaggcccggcaagcagtgggtggtgctgggccccccaatcctgctatcaatggcagtgcaccccgggacctgtttgacatgaagcccttcgaagatgctcttcgcgtgcctccacctccccagtcggtgtccatggctgagcagctccgaggggagccctggttccatgggaagctgagccggcgggaggctgaggcactgctgcagctcaatggggacttcctggtacgggagagcacgaccacacctggccagtatgtgctcactggcttgcagagtgggcagcctaagcatttgctactggtggaccctgagggtgtgagatggggtttcgccatgttgcccaagctgttcttgaactcccgggctcaagtgatccgcctccctcggcctcccagagtgctgggattacaggcacggaccaccatgcccagcctccacatctttttttgcactgtgtatactcttctgagacatgccaacttcctccaggtcaagaaaggggtatatagctctcagcttcactctttcagggctgatgtcgcctttgccttttctcacttcactgacctgtctattcctacaactgtctctttctagagaagcctcaatgatcaggattgacaggccacactctcccccaccatttttttctcctccttcaagcctcttgtctgtttcaccctcttccaccttggaggctgaggtcttatttgactcttcacctgaattgaccttcttccttcccaccctcccaggttcggactaaggatcaccgctttgaaagtgtcagtcaccttatcagctaccacatggacaatcacttgcccatcatctctgcgggcagcgaactgtgtctacagcaacctgtggagcggaaactgtgatctgccctagcgctctcttccagaagatgccctccaatcctttccaccctattccctaactctcgggacctcgtttgggagtgttctgtgggcttggccttgtgtcagagctgggagtagcatgga

SEQ ID NO: 181190 - DNA, 692 bp, Homo sapiens
  Payload ID: 15681
  Gene Symbol: SHC1
  Gene Name: SHC (Src homology 2 domain containing) transforming protein 1
  ENST ID: ENST00000412170
  CDS Start-End: 93-692
gaaagttggagcggtaacctaagctggcagtggcgtgatccggcaccaaatcggcccgcggtgcggtgcggagactccatgaggccctggacatgaacaagctgagtggaggcggcgggcgcaggactcgggtggaagggggccagcttgggggcgaggagtggacccgccacgggagctttgtcaataagcccacgcggggctggctgcatcccaacgacaaagtcatgggacccggggtttcctacttggttcggtacatgggttgtgtggaggtcctccagtcaatgcgtgccctggacttcaacacccggactcaggtcaccagggaggccatcagtctggtgtgtgaggctgtgccgggtgctaagggggcgacaaggaggagaaagccctgtagccgcccgctcagctctatcctggggaggagtaacctgaaatttgctggaatgccaatcactctcaccgtctccaccagcagcctcaacctcatggccgcagactgcaaacaggacacagccgagtatgtcgcctatgttgccaaagaccctgtgaatcagagagcctgccacattctggagtgtcccgaagggcttgcccaggatgtcatcagcaccattggccaggccttcgagttgcgcttcaaacaatacctcaggaacccacccaaactggtcacccctcatgacagg

SEQ ID NO: 181191 - DNA, 550 bp, Homo sapiens
  Payload ID: 15681
  Gene Symbol: SHC1
  Gene Name: SHC (Src homology 2 domain containing) transforming protein 1
  ENST ID: ENST00000444179
  CDS Start-End: 162-550
ggcaggcaggcgctgggtctgagtacccctctttccccagggaggccatcagtctggtgtgtgaggctgtgccgggtgctaagggggcgacaaggaggagaaagccctgtagccgcccgctcagctctatcctggggaggagtaacctgaaatttgctggaatgccaatcactctcaccgtctccaccagcagcctcaacctcatggccgcagactgcaaacagatcatcgccaaccaccacatgcaatctatctcatttgcatccggcggggatccggacacagccgagtatgtcgcctatgttgccaaagaccctgtgaatcagagagcctgccacattctggagtgtcccgaagggcttgcccaggatgtcatcagcaccattggccaggccttcgagttgcgcttcaaacaatacctcaggaacccacccaaactggtcacccctcatgacaggatggctggctttgatggctcagcatgggatgaggaggaggaagagccacctgaccatcagtactataatgacttcccggggaaggaaccccc

SEQ ID NO: 181192 - DNA, 3481 bp, Homo sapiens
  Payload ID: 15681
  Gene Symbol: SHC1
  Gene Name: SHC (Src homology 2 domain containing) transforming protein 1
  Uniprot ID: P29353
  ENST ID: ENST00000448116
  CDS Start-End: 222-1976
agagaagaggctccacgttgggcggggatggggcctgaaactgtctgggtctgagctggggagcggaagccacttgtccctctccctccccaggacttctgtgactcctgggccacagaggtccaaccaggctaagggcctggggataccccctgcctggcccccttgcccaaactggcaggggggccaggctgggcagcagcccctctttcacctcaactatggatctcctgccccccaagcccaagtacaatccactccggaatgagtctctgtcatcgctggaggaaggggcttctgggtccacccccccggaggagctgccttccccatcagcttcatccctggggcccatcctgcctcctctgcctggggacgatagtcccactaccctgtgctccttcttcccccggatgagcaacctgaggctggccaacccggctggggggcgcccagggtctaagggggagccaggaagggcagctgatgatggggaggggatcgtaggggcagccatgccagactcaggccccctacccctcctccaggacatgaacaagctgagtggaggcggcgggcgcaggactcgggtggaagggggccagcttgggggcgaggagtggacccgccacgggagctttgtcaataagcccacgcggggctggctgcatcccaacgacaaagtcatgggacccggggtttcctacttggttcggtacatgggttgtgtggaggtcctccagtcaatgcgtgccctggacttcaacacccggactcaggtcaccagggaggccatcagtctggtgtgtgaggctgtgccgggtgctaagggggcgacaaggaggagaaagccctgtagccgcccgctcagctctatcctggggaggagtaacctgaaatttgctggaatgccaatcactctcaccgtctccaccagcagcctcaacctcatggccgcagactgcaaacagatcatcgccaaccaccacatgcaatctatctcatttgcatccggcggggatccggacacagccgagtatgtcgcctatgttgccaaagaccctgtgaatcagagagcctgccacattctggagtgtcccgaagggcttgcccaggatgtcatcagcaccattggccaggccttcgagttgcgcttcaaacaatacctcaggaacccacccaaactggtcacccctcatgacaggatggctggctttgatggctcagcatgggatgaggaggaggaagagccacctgaccatcagtactataatgacttcccggggaaggaaccccccttggggggggtggtagacatgaggcttcgggaaggagccgctccaggggctgctcgacccactgcacccaatgcccagacccccagccacttgggagctacattgcctgtaggacagcctgttgggggagatccagaagtccgcaaacagatgccacctccaccaccctgtccagcaggcagagagctttttgatgatccctcctatgtcaacgtccagaacctagacaaggcccggcaagcagtgggtggtgctgggccccccaatcctgctatcaatggcagtgcaccccgggacctgtttgacatgaagcccttcgaagatgctcttcgcgtgcctccacctccccagtcggtgtccatggctgagcagctccgaggggagccctggttccatgggaagctgagccggcgggaggctgaggcactgctgcagctcaatggggacttcctggtacgggagagcacgaccacacctggccagtatgtgctcactggcttgcagagtgggcagcctaagcatttgctactggtggaccctgagggtgtggttcggactaaggatcaccgctttgaaagtgtcagtcaccttatcagctaccacatggacaatcacttgcccatcatctctgcgggcagcgaactgtgtctacagcaacctgtggagcggaaactgtgatctgccctagcgctctcttccagaagatgccctccaatcctttccaccctattccctaactctcgggacctcgtttgggagtgttctgtgggcttggccttgtgtcagagctgggagtagcatggactctgggtttcatatccagctgagtgagagggtttgagtcaaaagcctgggtgagaatcctgcctctccccaaacattaatcaccaaagtattaatgtacagagtggcccctcacctgggcctttcctgtgccaacctgatgccccttccccaagaaggtgagtgcttgtcatggaaaatgtcctgtggtgacaggcccagtggaacagtcacccttctgggcaagggggaacaaatcacacctctgggcttcagggtatcccagacccctctcaacacccgccccccccatgtttaaactttgtgcctttgaccatctcttaggtctaatgatattttatgcaaacagttcttggacccctgaattcaatgacagggatgccaacaccttcttggcttctgggacctgtgttcttgctgagcaccctctccggtttgggttgggataacagaggcaggagtggcagctgtcccctctccctggggatatgcaacccttagagattgccccagagccccactcccggccaggcgggagatggacccctcccttgctcagtgcctcctggccggggcccctcaccccaaggggtctgtatatacatttcataaggcctgccctcccatgttgcatgcctatgtactctacgccaaagtgcagcccttcctcctgaagcctctgccctgcctccctttctgggagggcggggtgggggtgactgaatttgggcctcttgtacagttaactctcccaggtggattttgtggaggtgagaaaaggggcattgagactataaagcagtagacaatccccacataccatctgtagagttggaactgcattcttttaaagttttatatgcatatattttagggctgtagacttactttcctattttcttttccattgcttattcttgagcacaaaatgataatcaattattacatttatacatcacctttttgacttttccaagcccttttacagctcttggcattttcctcgcctaggcctgtgaggtaactgggatcgcaccttttataccagagacctgaggcagatgaaatttatttccatctaggactagaaaaacttgggtctcttaccgcgagactgagaggcagaagtcagcccgaatgcctgtcagtttcatggaggggaaacgcaaaacctgcagttcctgagtaccttctacaggcccggcccagcctaggcccggggtggccacaccacagcaagccggccccccctcttttggccttgtggataagggagagttgaccgttttcatcctggcctccttttgctgtttggatgtttccacgggtctcacttataccaaagggaaaactcttcattaaagtccgtatttcttcta

SEQ ID NO: 181193 - DNA, 780 bp, Homo sapiens
  Payload ID: 15681
  Gene Symbol: SHC1
  Gene Name: SHC (Src homology 2 domain containing) transforming protein 1
  ENST ID: ENST00000414115
  CDS Start-End: 181-780
cccagttgagtgggaggcaggcaggcaggcgctgggtctgagtacccctctttccccagggaggccatcagtctggtgtgtgaggctgtgccgggtgctaagggggcgacaaggaggagaaagccctgtagccgcccgctcagctctatcctggggaggagtaacctgaaatttgctggaatgccaatcactctcaccgtctccaccagcagcctcaacctcatggccgcagactgcaaacaggacacagccgagtatgtcgcctatgttgccaaagaccctgtgaatcagagagcctgccacattctggagtgtcccgaagggcttgcccaggatgtcatcagcaccattggccaggccttcgagttgcgcttcaaacaatacctcaggaacccacccaaactggtcacccctcatgacaggatggctggctttgatggctcagcatgggatgaggaggaggaagagccacctgaccatcagtactataatgacttcccggggaaggaaccccccttggggggggtggtagacatgaggcttcgggaaggagccgctccaggggctgctcgacccactgcacccaatgcccagacccccagccacttgggagctacattgcctgtaggacagcctgttgggggagatccagaagtccgcaaacagatgccacctccaccaccctgtccagcaggcagagagctttttgatgatccctcctatgtcaacgtccagaacctagacaaggcccggcaagcagtgggtggtgctgggcccccc

SEQ ID NO: 181194 - DNA, 2494 bp, Homo sapiens
  Payload ID: 15682
  Gene Symbol: SHC2
  Gene Name: SHC (Src homology 2 domain containing) transforming protein 2
  Uniprot ID: P98077
  ENST ID: ENST00000264554
  CDS Start-End: 1-1749
atgacgcagggtccgggcgggcgcgcgcccccggcgccccccgcgccccccgagcccgaggcgcccaccaccttctgcgcgttgctgccccgaatgccgcagtggaagttcgcggccccgggcggcttcctgggccgcggcccggcggcggcgcgggcggctggggcctcggggggcgcggacccccaacccgagccggcgggcccggggggcgtcccggcgctggcggccgccgtcctgggcgcctgcgagccccgctgcgccgcgccctgtcccctgcccgcgctcagccgctgtcggggcgcggggtcgcgggggtcgcggggcgggcggggggcggcggggtccggggacgccgccgccgccgccgagtggatccggaagggcagcttcatccacaaacccgcgcacggctggctacaccccgacgccagggtcctggggcccggggtctcctacgtcgtgcggtacatgggctgcatcgaggttctccgctctatgcgctccctggactttaacacgcgcacgcaggtgaccagggaagccatcaaccggctccatgaggccgtgcctggcgtccggggatcctggaagaaaaaggcccccaacaaggccctggcgtccgtcctgggcaagagcaaccttcgctttgccggcatgagcatctccatccacatctccactgatggcctcagcctctccgtgcctgccacgcgccaggtcatcgccaaccaccacatgccgtccatctccttcgcgtcaggcggagacacggacatgacggattacgtggcctacgtcgccaaggaccccatcaaccagagagcctgccacatcctggagtgctgtgagggcctggcacagagcatcatcagcaccgtgggccaagctttcgagctgcgcttcaagcagtacctgcacagcccgcccaaggtggcgctgcccccagaaaggctggcagggccggaggagtcggcctggggggacgaggaggactctttggagcacaattactacaacagcatcccggggaaggagccgccgctgggcgggctagtggactccaggctggccctgacacagccctgcgccctcacggccctcgaccagggcccatctccttctctaagagatgcctgcagcctgccatgggacgtggggtccaccggtacagctccaccgggggacggctacgtgcaggcggacgcccggggccccccggaccacgaggagcacctgtatgtcaacacccagggtctggacgcccccgagccggaggacagccccaaaaaggatctgtttgacatgcgaccctttgaggatgccctgaagttgcatgagtgctcagtggcggcaggcgtgacagcagcccctcttcccttggaggaccagtggcccagcccccctacccgccgggcccctgtggcccccacggaggaacagctgcgtcaggagccctggtaccacggccggatgagccgccgggcggcagagaggatgcttcgagctgacggggacttccttgtgcgagacagcgtcaccaaccccgggcagtatgtcctcaccggcatgcacgccgggcagcccaagcacctgctgctcgtggaccccgagggcgtggtacggacgaaggacgtgctgtttgagagcatcagccacctgatcgaccaccacctgcagaacgggcagcccatcgtggccgccgagagtgagctgcacctgcgtggcgtggtctcacgggagccctgagccaggtgaccgttctcagccctggctcctgcctgttctcagccccggctcctgcctgtcatggccttggggctctcagccctcctcctggatcctggtcaggccgaaccaccgctgcctctccttcctccgcatgagcctctggcatggtccttcctccagctggccccgggctgggcagagcctcctcctgccggggcccctgcccaccccctcctttgcctggagtgagggtgttcataccaaagacggaaccatttcgcctttaaagaaaatatatccagaagcagccgctgcctcggagccctggcccttgggtccccctctcgcctggctggttcggtctaacgccccggagagtcagggctcccaggaccctggggaggaggcggattccgggcctggctgggcttcctcttcccacctgaggactgggtgcacagttgtctttgaggggggacgcttaaggtgctttggggttctcaggccaggatacatgctggcgctgaagtgcaggcagccttgaggtcacctgggatctcggggtagccaggctgctccaagacagtggatatcgaggcagtcgtgaggcccctactccacctgggagcaggggaaggacgtggttgcctggcctgggctgcgcccagcagcttccccccagtcctgccctcccagctgtcgacccagatgggatgttcggatcggtttgtaattaaacctgggaatggccacaagagcacaa

SEQ ID NO: 181195 - DNA, 816 bp, Homo sapiens
  Payload ID: 15682
  Gene Symbol: SHC2
  Gene Name: SHC (Src homology 2 domain containing) transforming protein 2
  ENST ID: ENST00000590170
  CDS Start-End: 1-416
gagggcctggcacagagcatcatcagcaccgtgggccaagctttcgagctgcgcttcaagcagtacctgcacagcccgcccaaggtggcgctgcccccagaaaggctggcagggccggaggagtcggcctggggggacgaggaggactctttggagcacaattactacaacagcatcccggggaaggagccgccgctgggcgggctagtggactccaggctggccctgacacagccctgcgccctcacggccctcgaccagggcccatctccttctctaagagatgcctgcagcctgccatgggacgtggggtccaccggtacaggaccagtggcccagcccccctacccgccgggcccctgtggcccccacggaggaacagctgcgtcaggagccctggtaccacggccggatgagccgccgggcggcagagaggatgcttcgagctgacggggacttccttgtgcgagacagcgtcaccaaccccgggcagtatgtcctcaccggcatgcacgccgggcagcccaagcacctgctgctcgtggaccccgagggcgtggtacggacgaaggacgtgctgtttgagagcatcagccacctgatcgaccaccacctgcagaacgggcagcccatcgtggccgccgagagtgagctgcacctgcgtggcgtggtctcacgggagccctgagccaggtgaccgttctcagccctggctcctgcctgttctcagccccggctcctgcctgtcatggccttggggctctcagccctcctcctggatcctggtcaggccgaaccaccgctgcctctccttcc

SEQ ID NO: 181196 - DNA, 951 bp, Homo sapiens
  Payload ID: 15682
  Gene Symbol: SHC2
  Gene Name: SHC (Src homology 2 domain containing) transforming protein 2
  ENST ID: ENST00000590222
  CDS Start-End: 1-208
cgacgccagggtcctggggcccggggtctcctacgtcgtgcggtacatgggctgcatcgaggttctccgctctatgcgctccctggactttaacacgcgcacgcaggtgaccagctcctgccaccactcaggctgcagacaggatctcgacacggaccccgcgtcaggctcagggcctcctgctcgctgctccaacccccacatctgatgccgagccttccttgtgggccgaggccagggacacactggtccctgggaaagagggtggtagaggggccagagctgggggccgggcctctgccggatgcaaggacgcacgtggagtgggctggtgcccaagctgcacctgtcctgtggggcactcctcccccagggaagccatcaaccggctccatgaggccgtgcctggcgtccggggatcctggaagaaaaaggcccccaacaaggccctggcgtccgtcctgggcaagagcaaccttcgctttgccggcatgagcatctccatccacatctccactgatggcctcagcctctccgtgcctgccacgcgccaggtcatcgccaaccaccacatgccgtccatctccttcgcgtcaggcggagacacggacatgacggattacgtggcctacgtcgccaaggaccccatcaaccagagagcctgccacatcctggagtgctgtgagggcctggcacagagcatcatcagcaccgtgggccaagctttcgagctgcgcttcaagcagtacctgcacagcccgcccaaggtggcgctgcccccagaaaggctggcagggccggaggagtcggcctggggggacgaggaggactctttggagcacaattactacaacagcatcccggggaaggagccgccgctgggcgggctagtggactccaggctggccctgacacagccctgcgccctcacggccctcgaccagggcccat

SEQ ID NO: 181197 - DNA, 569 bp, Homo sapiens
  Payload ID: 15683
  Gene Symbol: SHC3
  Gene Name: SHC (Src homology 2 domain containing) transforming protein 3
  ENST ID: ENST00000375831
  CDS Start-End: 109-426
cccacgggagaagcacccacctacgtcaacactcagcagatcccaccacaggcctggccggctgcggtcagcagtgctgagagcagcccaaggaaagacctctttgacatgaaaccttttgaagatgctctcaagaaccagcccttggggcccgtgttaagcaaggcagcctccgtggagtgcatcagccctgtgtcacctagagccccagatgccaagatgctggaggaactgcaagccgagacttggtaccaaggagagatgagcaggaaggaggcagaggggctgctggagaaagacggagacttcctggtcaggaagagcaccaccaacccgggctcctttgtcctcacgggcatgcacaatggccaggccaagcacctgctgctcgtggacccagaaggcacgagaagtaactcctactgatgttggccatccctggcactacagctgtatctgaataatcccgtaggtttggctgaatttttcatcttcccgtcaagaaagacattcatctttacctggggcatagtccaagaattgctaagtttaataaatgcagttaaatc

SEQ ID NO: 181198 - DNA, 9768 bp, Homo sapiens
  Payload ID: 15683
  Gene Symbol: SHC3
  Gene Name: SHC (Src homology 2 domain containing) transforming protein 3
  Uniprot ID: Q92529
  ENST ID: ENST00000375835
  CDS Start-End: 308-2092
tgcttttgctgtgagcagccccaagcagctgggcgctccatcagaggcaactatgacttttgcaaagcaaacgtgcaaccccaagcagcggtctcccgggccggggctgcgcggccgccgctgtgctggcttttaacggtgggagggcaccatcctcttgctctgctctcgttctccagaaggctgtcccggggcccccactctccgtcccgctccggggacagtggctcgcctgctatgcgcggcagcccgcgccggggccggcaccagcagcgcccgggcggatgcagcgagcccacggaggggcatgcttccacgcaccaagtataaccgcttcaggaatgactcggtgacatcggtcgatgaccttctccacagcctgtcggtgagcggcggcggaggcaaggtttcggcggcgcgcgcgaccccggcggcggctccctacttggtgtccggcgaggcgctgcgcaaggcgcccgacgatgggcccggcagcctgggccacctgctccacaaggtgtcccacctgaaactctccagctcgggcctccgcggcctgtcgtcggccgcccgggagcgggcgggcgcgcggctctcgggcagctgcagcgcgcccagcctggccgccccggacggcagtgcgccctcggcgccccgcgccccggccatgagcgccgccaggaagggccggcccggcgacgagccgctgcccaggccccctcggggggcgccgcacgccagcgaccaggtgctggggcccggagtcacctacgtggtcaagtacttggggtgcattgaagttctgcgctcaatgaggtctcttgacttcagtacaagaacacaaattaccagggaagccatcagccgcgtctgtgaagctgtgcctggtgcgaagggagccttcaagaagagaaagcctccaagcaaaatgctgtccagcatcttgggaaagagcaacctccagtttgcgggaatgagcatctctctgaccatctccacggccagtctgaacctgcgaactccggactccaaacagatcatagcgaatcaccacatgcggtccatctccttcgcctctgggggagacccggacacaactgactatgttgcatatgtggctaaggaccctgttaatcgcagagcttgtcacattttggaatgctgtgatgggctggcccaggatgtcatcggctccatcggacaagcctttgagctccggtttaagcaatatttacagtgtcctaccaagattcccgctctccatgatcgaatgcagagtctggatgagccatggacggaagaggagggagatggctcagaccacccatactacaacagcatcccaagcaagatgcctcctccagggggctttcttgatactagactgaaacccagaccccatgctcctgacacagcccagtttgcaggaaaagagcagacttattaccagggaagacacttaggagacacttttggcgaagactggcagcaaacacctttaaggcaagggtcctcggacatctacagcacgccagaagggaaactgcacgtggcccccacgggagaagcacccacctacgtcaacactcagcagatcccaccacaggcctggccggctgcggtcagcagtgctgagagcagcccaaggaaagacctctttgacatgaaaccttttgaagatgctctcaagaaccagcccttggggcccgtgttaagcaaggcagcctccgtggagtgcatcagccctgtgtcacctagagccccagatgccaagatgctggaggaactgcaagccgagacttggtaccaaggagagatgagcaggaaggaggcagaggggctgctggagaaagacggagacttcctggtcaggaagagcaccaccaacccgggctcctttgtcctcacgggcatgcacaatggccaggccaagcacctgctgctcgtggacccagaaggcacgatccggacaaaggacagagtctttgacagtatcagccacctcatcaaccaccacctagaaagcagcctgcccattgtctctgcagggagtgagctgtgtctccagcagccagtggagaggaagcagtgacctggccagcactgctcccagcactgcgcaccaggtcaggaggacctggagtggactagaatcggggctgctggaactgggacagctgcctgtggctcagagccttcttcaaaagcttcaaaaggaaggcttcctttaaggtcaagtttcataaacttggttctgaatttctcatatgcatattaaaggtgtacatacctatacatcctgtacaaattatccctctatatttatattttttaagactaagaaagatgtaagactaatgttctgtgctgtatgtttttaatgaaaaaaaaaaataagtttaactgtagttgtccaggcaaaaatttaattcaactgacccatcccaccgggaaatgccactaggaaggtgtagcctgcagttttacctaataagcacaactggaggggaatagaaacacagaattgtgagggaatcgcaaggcatgctgctcagagcatgcctagccctgcactgaaagctatgagatactggttctgaggcatggctgtgcttgctggtgggagcgggcatcctcccttggcctccctgggacacctcctgtgctccctgcactgcactccacgtgcctggggtgtctacacaactcgctgcagcttcactaaagaacaggtggcactccagcttctccgggtcctgctgagcacagggccccgccacccttgaccccagttgtgcgaggagtacttgggaattcatttcatgccaaaatggcacaaaataagcttcaccaaccaagattttgattgacaagtgcttccctgttctcatgtatctaatgctaaaatgggtatttgtagaagggtggtcggggcaaattcctggtttgtgtctccctctagtcagcggttgactacaggctgcttatggtaattgctagtaaagtcccccgcccgccttatacaataggggagaagcctgtgtgacagcaagagcaggcacccatcccagagctcagtcccgaagactcaggtattgaggcttctggggctgcatgtgccagaaacccaggagtcactggaatccatttgaggtactgcctctggcatgagggatgggggaaaggcctgctgtcccaacaacaaggtttctccgttgctgcagggaagagcatgtgcctgcccccactctttgtcttgactccctttcttccaggtaaaatactgtcatttcctgaggagtcatttggtgttagaaagctggcaatgtttatacctttcaaatactatctgggctgagattgccctgtgattttcacagatgccctttaaagaatagatggatccatttgcttgctggcagcgtggctcttgttctggtgagaccccacagggtacagcaccctgtagggtatgggtcagcagaacagaaagacacactaaacacgcttagagttggatagtgataaatctgatcctgtaaggagagttatgaggagactgaaaaatctggcagataataatactgctaagttctaatgccaatggtatgagccccatttctgccttggggtgtgcgtgtggccagatggaaggacaggttagagctaaccagtgaggatgagtcagggcaggccccagccttcatacatggccttctagggagtctttgcctttgagggtccagtgaatttgagatgacagtgaagtcagtgttctagaatgttctgcagtggattgaaactctggagagtctgacactactgtagactgcactgctgttttctgaaatggttttggcttcaggcatcatgtggatactctgcttagtgatccagaagcagacggctccacggggttgctggcagcagctgcatcaggctcctgccccaagacagcatagacttgggtgctctgagagctgccctgcacatctgtcctctgggaggctgggagccctggagagacacacacagctctgacccacctgtgcatgaatgtgcaccacatagaaaaatgtgcgaaatgaccttctttctacattcatgcattccccacttgtgaaaggtcaaaatgctattataacattcagggacaatagcaaagtaggaaatgcaagttaggagctgtgaatgctgtaacatttgatttactttatttttctcttggggggacttgaatggtaacctgcagctttagtagctcttgctgtgaagtcagtgtctagttcgatggtgatagaaaatatatatattttttgcatgagaatcaatttagaaaatttaaagtattggagtcgaattttttctttttaatattaattcaaaatatacatttttaagctcagattatatattggttacactagaatagtgccagtgaagtgagcaggcttcagacatagcagatggcagcgattttctaatctttgttccctcccatttgtaaagtgggttagagcacacattagttatcccaactcttccctccagcactgtgtggtgggccattcctgtgagcctcacagacacatggggaaagtgaggctggggctggtgccacaccttcctggaggccatgttgtcatctggctgcagagctcttctgctcactcagcatttcgtgagccctgctgtgtgccagcctgtgctttgagctcaggattccaaggcaaaagcaatggaggctcctccctgtctagcctgggcccctcttccccacactttctcaggccacatctctgcctgggcagggcagggaagctgaacaatgaacgcagcgggaatggcattaggccttgcgttccagggcctcaggcttccagggcacagtcgctgctgctgtgctgggccaccctggtcctgcagagtgcacctgggccctgctgtccctccaatgggcacccccaacacttaaccccaaactctatgtcttctgggagtacaaggtgggggccagcagtcctaaaacggcccctctgcccttaccgagtggccctagagacccccacccacctcccctaaccccacgaatgaatcagctgtgcttcaaatgacatctctgtcccacggaggccggctgggcctctcatgggggtgctcattgtggtttaagtcagctttgattcttgacctccaaggctgcctctgagtagctaaccggagaatcgggtggggaggtgaaaaacaccgcagtcaaatgactcaatctttaatcctgtgcttaagacaccactgttgctgttttttatatttgaagcacccaaagactgggcgtccgctcagccttgatgagcgagcagctattttgtcaggccatctatgatgttgggataatggacaaaggcctgattgggccatatatggccttctttagggcctcctggaggtggaggaagttgtgggtaatttctaataaagacgggaaatgacaagccgtgtgtgtaggtaaagtcctaacttaaaaggaaggacaggcctagggaagggtggaccctaaagggcccatgtgccaggggaacagtggacatgtgtgtccagcccaacctccatgtctggtgctgggattctgaaggtggcccccagctcccaaaataaagctttccttttcagtagcgtccgacacttgggtagcttctttctataagcaatgcttgaagatggacgtctgggtcctcatttcctccaaactggctgctacctgaaggcagtcacacatttcttttctgttgggctgagctgggcagaagcctcggactataggcctttccagggcagaggcaatgcgggccacgagtagatacctccatccagcctccaccctggcacacccagaacggcgtggactcaggcgggttgctggatttctctgagccttggcgtgctctacactgcagggctatacatgttcccagcttgagggcgtgctggggattgacaaatatatgaaacatataagcgcaatgattttctaaaattgtgcattcccagcgtgcccattggttctctctcgctggcccaactttgtgtgctgtccataaatccctttctgtggacggtgacagtaggattgggagtgagtgggaagattgtggaaagattgcaaagaggtcattgcaggactcagacagaccttgcagtgggtttcagagtaatactcaggttctcccatggaactttcaaagctggctctaagaaagatgaagaggacaaacccactcctggacatagtgccaacctagaactgtcagctccacacaggatcacagggaagggagcttggtaagacagcccagtagggggccctgcttttcagaagaggaaactggagccatgcaagggcctggggatcaacttagaaaagagcacaggactcacagtcctgggcctgcacgtaaagctagccccctgccccacggaaatggcaagcagtgcttccctccaggggttctacatctgtgctccatctcaaaatgcataaaagcctgagtcattcagatgggagagacagtgtttctacttcctcttagttggggttcctccagaaggagaccctgagagaggacttgaggttatgtagtttatttgagtgaagatcccggaagtagggagagaaggaagctgacggggaaggcgtgcattatcaagtaagttaccgtcatgtgcacaactggagctgaatcccaccggggaaccccgagagacagagctgacaccccagagttcacccagcaaggcggggagacagctggggtatttattcaccaagtctatcacttatgaaaggctgtttctggaaacaatttctgactggccctgcacacacctgagcatacttcctaagccggggatgtccctgagctgagacaggcgttcgtgacaagcagacttcgagtggaaggcaggcatcagaaccaccctgtgagctggttcagacaaagattgcaggcccttccacccccctggccccgccaagttcctgactccctaggtctggagtggggcccgggaatttgcatttcaaaaaatctcgaggtgatgctggtgcagctgctctgaagtcttgactttgagaaccactcactagtgagagtttccagcccttacctgtctcttattgatggctttcccccctctaatttataattatgctttcacaccacttcatgtcacagatcccagggtccgtgctgtgaatttaaaagtggagaattaataagcatttataactccatgcaaccattgctggcagcttaaatgccatctgccagccataatttatttataatggggtttatacatatttataagtttgcaagcaacaaatgcacagttttaaaactggcacattttatagcagccagaaaaattgcaactttataccaggacttgtgaatgtgaattgcatatgtatatacatatacgcatatacttacattgattaaaaacggatctgcatctctgtacacacgcagattggctctgtgttgtgcaccttgggactcctccctgggctttggttttacagctaagtaggaagtcaaacaaacgtgaagaatttgggaattggcaggctgtggcatcagccatggaggatggtcctggatgctgtaggatgtgagatccagcacaaagagaacaagaacaggacatgaggaccacagggattgggggaacccactgtgggaaatgacagagaagccagtgggggaagacaaagaaagaagaaggtggaggcagaataaaggtgagaagaagggaaggggaggataaaacaagtccagatttagatcttccttcatgcagccatgcatagctgtctgaggccagcagggaaggaggagaaagggaaggtgtggtggaggaggctgtgctcgtgatgtcatgctttcgtgtattcccaggtgcagctgcatatacttggcacagtttcttgggatttctagccagtttcttggcctcatttgtgcattagttaatatgtggctggccctgtactgggatggtgggatagagaagtgaatgtatgaggcctctgcctgagtttataacctagaaagaaataaagacacacacacacaaaggtgttggagtgtgacaagccttaaggtacccgtgtgtccaagtaaagtagaaccagcaagggtggagtgcccaggtcagtctggggactctggaggcttcgcactgcaggcgtcagatactgagtgttagtggcacggagaagagtgtggaaggctcaggatgggggtggacagcctggagttgtcactctcagtagagatgctagaaggggcgggaggtgatcccagcctcccttctttcctcctcctggctgtcacagatgctctgaattgatgaatccttcaggccaaaaacacacaggctccttccctaggtctggaaaaatggttctcgctgaaaaagcaccaggaataaaatctcatacaattttaggtgtctattttgttgtctcaccttgaaatactgcagacagaaaaacatgcacatggggagctgtggtcctgagctttgaggtaatgaattcccactcatgtgatcatttttaccataaccaaagtttctaaccatcaaaatcaagtgacaattaaaacaggcattaatggataaatccgtctttaaatattaatggggttaattttgttaacagctatgtgttggttgcaagtggaatgttctctgttcatttgacttttgaatataacttgttccagaatattgtaaaattaagtatgtgaatgtttctttgtattcagaattaaacatttggtgttaaaatcccaggattaggagacaactccatgtaaatttaatgtgtaataataagataataactttttaaaaagcatttggatggcaaattatacatactgacaaatgaatattatctgaaagttgttttgtttccattaacttttgtgaaacaaaaagaattactgtaacagtctatgtcttggcgtattgccaattcaccactttctactttgtgctggaacagaactggcttttttgacatccctgaggagtggaaatgcaaaacgaatttcaagttctctaatctttgttctatgacaaatgaaaaaacctaagttatctggtgttttggagatttgagaatacagcaggtgaagagaattagcttaaattccctcctcccttttgataaatccacagggattccttcactctgtcaggaaatggtgtggtttccaagcattagcccttcatgatctgtctggtgcatttctgtgctcctgggatcgccaagtgcaggcacggcatcgcatccccaggtgtcatcctgtgacccaggaggggaagatgacacacccaatttaggtaatgctgcacttcttgttataattggttattggaaaatgtgcctttattatcagaacagtggtgtgcgcatttctgattatggagctaacttttggatatctgacttagatactaaaaacatttgggtgttgcagttttgcacttgtagatacaacttaaaagcatgaaactggtgatttaattagatgttttctataaaatgcaccttgttacatttctgtgaaagggtcttaccagcgtggaataactggctcaagggttgagagaaacaaccattttctaaacagttaattgtttaaaggactatacatgtaagtctgcaggcaataaaggctgttgtgaaaagta

SEQ ID NO: 181199 - DNA, 3461 bp, Homo sapiens
  Payload ID: 15684
  Gene Symbol: SHCBP1
  Gene Name: SHC SH2-domain binding protein 1
  Uniprot ID: Q8NEM2
  ENST ID: ENST00000303383
  CDS Start-End: 268-2286
tatctcatttccaggcattgctggttcgtttttttcgaaaatcattccaaattatattccaattcgactttcttcaagttcatcccagaaaagcaaaggccgggcacttgaacaagaacagctgtcagcctggggcgagggggcagtgttggtgggggctggagcggggccggactctaattggtccacggcctcggcccgactatcaaatcagcagagcctgcgtcatcacgtcgttgcctgggctgccgtccgcggaaatttgaaatggctgacgggtcgctgacgggcggcggtctggaggcagcggccatggcgccggagcgcatgggctgggcggtggagcaggagctggcgtctctggagaaaggtttgttccaagatgaagattcatgcagtgattgtagctaccgtgataaaccaggttctagtttacaaagttttatgccagaaggaaaaacctttttcccagaaattttccaaacaaatcaacttttgttctatgagcgattcagagcctatcaagattacattttagctgactgcaaggcctctgaggtacaggaattcacagctgagttcttggagaaggtccttgagccatctggatggcgggcagtctggcacactaatgtgttcaaggtgctggttgagatcacagatgtggactttgcagccttgaaggcagtggtgaggcttgctgaaccatacctctgtgactctcaagtgagcacttttaccatggagtgcatgaaggagctccttgatctgaaggagcatcggttgcccctgcaggagctgtgggtggtgtttgatgattcaggagtgtttgaccagacagcccttgcaattgagcatgtcagatttttctaccaaaacatttggaggagttgggatgaagaagaggaggatgaatacgattattttgtcagatgtgttgaacctcgattaagattgcattatgacattcttgaagaccgagttccatcaggacttattgttgactaccacaatctgttgtctcaatgtgaggagagttacaggaaatttttaaatctgagaagcagtttgtcaaattgtaactctgattccgagcaggaaaatatctccatggtggaagggttaaaattgtattcggagatggaacagttgaaacaaaagctgaaactcattgagaatcctttgttgaggtatgtgtttggttatcagaagaattctaacatccaagcaaagggtgtccgttccagcggtcagaagatcactcatgtggtctcctccaccatgatggctggtctcctgcggtccctgcttacggacaggctttgccaggagcctggtgaggaagaaagagaaattcagttccatagtgatccattgtctgctataaatgcctgcttcgaaggtgacactgttattgtttgtcctggccattatgtggtacatggcactttctccattgctgactccattgagttggaaggatatggcctaccagatgacattgtgatagaaaagaggggcaaaggcgacacttttgtggactgcactggtgctgatattaaaatctcaggcataaaatttgttcagcatgatgctgtagagggaatcttaattgttcaccgtggtaagactacgctggaaaactgtgtgctgcagtgtgagacgaccggagtcacagtgcggacatcagcagagtttctaatgaagaactcggatttatatggcgccaagggtgctggtatagaaatctaccctgggagtcagtgcaccctgagtgacaatgggatccatcactgcaaggaagggatcctcattaaggacttcttagatgaacattatgacattcccaagatatccatggtgaataatataatacataataatgaaggttatggtgttgtcttggtgaaacctacaatcttctctgacctgcaagaaaatgctgaagatggaactgaagaaaataaagcgcttaaaattcagacaagtggagagccagatgtggctgaaagagtggatctagaagagctgattgagtgtgcaactggtaaaatggagctttgtgcaagaactgacccttctgagcaagtcgagggaaattgtgaaattgtaaatgaactaattgctgcctccacacagaaaggccagataaagaagaaaaggttgagtgaactggggatcacgcaagctgatgacaacttaatgtcacaggagatgtttgttgggattgtggggaaccagttcaagtggaatgggaaaggtagttttggcacatttcttttctgactacagtgatgtaagtagatagcaaaatactggattttgcacatgctgccctaagaatcactgctgccattgtagtttgctgtattgtctgtattttatatttgattatttgggcttgagtgaaaggtagatttatttccatttgcaggtgttgcacataaaacactccctctttataagaaaaatcataaatgcatataaaatagaaaatatttggagattgcttatctgaaagtcttgctttcttatacacatggttctctcatattaagcctggtagtaactttttagtgtaattacctttagcacttcaaagacgaggaagtaaggaagggaatgcaagactagtgcataaaaatgcaataggtgtcatatgtacagcattcttcttagagttgccttttcatcccaattacagtgagtctgatttccatcctgtatttgcataatacttgtcttaaaataaaagcttttatgattgggaatttatctgcctaatcagacttattattgagacgtcaatgggacgcatttttctgttgagctatgcagtcgtcaaaacagcgatagacagcataggaggtttgaagcagaaatgaaatgtgttattcagagccaatgttgtacatagagcattttcactattgctgaatgggaatgattaaaaacaaggtatttttcgggccaggcggtggctcacgcttgtaatcgcagcactttgggaggctgaggcaggaggatcacttgagcccaggagttcaagactagcctaggcaacatagtgagaccctgtctctactaaaaataaatttaaaaaaaattagctgagtgtggtggtgcatgcatgtagttccagctactcaggaggctgaggctagaggatccttgagcccaggaggttgaggctgcagtgaggtgtgattgcgccactgcattccagcttgggcgacagagcgagacccagtctcaaaaaaaaaaaaaagtatttttctcttaccgttacagtattctgattatattactgacacagtcaaaatgattaactgtacaacctgtatctgctgggtgttcttgttatcatattgtaaaacagctttaaaaatatttatattttaaaaactgtatgtgacattaatatgcctaatgattaaaattatagtgatgaaataacaaaa

SEQ ID NO: 181200 - DNA, 465 bp, Homo sapiens
  Payload ID: 15684
  Gene Symbol: SHCBP1
  Gene Name: SHC SH2-domain binding protein 1
  ENST ID: ENST00000569702
  CDS Start-End: 1-465
tgattcaggagtgtttgaccagacagcccttgcaattgagcatgtcagatttttctaccaaaacatttggaggagttgggatgaagaagaggaggatgaatacgattattttgtcagatgtgttgaacctcgattaagattgtatgtgtttggttatcagaagaattctaacatccaagcaaagggtgtccgttccagcggtcagaagatcactcatgtggtctcctccaccatgatggctggtctcctgcggtccctgcttacggacaggctttgccaggagcctggtgaggaagaaagagaaattcagttccatagtgatccattgtctgctataaatgcctgcttcgaaggtgacactgttattgtttgtcctggccattatgtggtacatggcactttctccattgctgactccattgagttggaaggatatggcctaccagatgacattgtgatagaaaa

SEQ ID NO: 181201 - DNA, 2317 bp, Homo sapiens
  Payload ID: 15685
  Gene Symbol: SHCBP1L
  Gene Name: SHC SH2-domain binding protein 1-like
  Uniprot ID: Q9BZQ2
  ENST ID: ENST00000367547
  CDS Start-End: 238-2199
agcgccccccagcaccctgaatgcgtccgcaggaccccgcgctctacccgcaggccccgcaccccctagctctgggccgcgcctcacatccctcccagagccgcaacaccccacccggcgggacgccctcgagcagccgctcgttgcgggcctgaagcgcagagcgcctattggccagagcggccgagggcgggaaaagtggccaacggctgcctcggccctcgggctgctgaggagatggcgtcgggctccaaggcctcggtgcccgcggactcattccgcaccatcagcccggacaggcgaggcgagaagtccgcctccgctgtctccggggacacggcggccgcgaccaccctgaagggcaccgcgatcccagtgcggtcggtggtggcctcccctcgcccggtgaaggggaaagcgggccgggagacggccaggctgcggctccagcgcctgcccgcggctcaggccgaggacacgggagaggcggcggcggcggcggcggaggagcccctgctgccagtgcctgaggatgaagaggaggcgcagcccctgcccccagtctgcgtgtcccgtatgagggggatgtggcgggacgagaaggtgtcgctgtattgcgacgaagtgctgcaggactgtaaggcagaagatgctgatgaagttatgggtaaatacctatcagaaaaattaaagttgaaagacaaatggcttggagtctggaagactaatcccagtgtattctttgtgaaatatgaagaagcttctatcccttttgttggtatattggttgaggtaacttgtgaaccataccaagactcatcatctcgtttcaaagttactgtttctgttgctgagcccttttcttccaacattgcaaatattccaagagatttggttgatgagattttggaggaactggaacacagtgtgcctcttttggaagtgtatcctgttgagggacaagatactgatatacatgttattgctttggccttggaagttgtcaggtttttttatgactttctttggagagactgggatgatgaagaaagttgtgagaattatactgcacttattgaagaaagaattaatttgtggtgtgatatacaggatggaacaatacctggtcctatcgcacaacgttttaaaaaaactttggagaaatataaaaacaaacgtgtcgagctcattgagtatcagagcaatattaaagaagatccatctgcagcagaggctgttgaatgctggaaaaaatactatgagatagtcatgctctgtggattactgaaaatgtgggaagatttacgcctccgagttcatggacctttctttccaagaattctgaggcgtaggaaaggaaaaagagaatttggaaagactataacacatattgtagcaaaaatgatgactactgaaatgataaaggatttatcttcagacacacttctccaacagcatggtgatttggatttggctttggataattgttatagtggagatacagtaataatttttccaggagaatatcaagctgcaaatcttgctttgttgacagatgacatcattataaagggagttggaaagagagaggaaattatgattacttctgaaccttctcgtgacagttttgtggtgtccaaagctgacaatgtgaaactaatgcatctatctttgatacaacaagggacggttgatggtatcgtggtggtggagtctggtcacatgactctagaaaactgcatattaaaatgtgaaggaacaggagtgtgtgttcttacaggggctgctttgacaattacagacagtgaaataactggcgcccagggtgctggtgttgaactgtatcctggaagcatagctattttggaaagaaatgaaattcatcactgtaataacctcagaaccagtaacagttcaaaaagcaccttaggtggagttaatatgaaggttcttccagcacccaaattgaagatgactaataatcatatttatagcaacaaaggctatggagtaagcattcttcaaccaatggaacagttttttatcgtagcagaagaagctctcaacaaaagggcttcttcaggagataaaaaagatgataaaatgctcttcaaagtaatgcaaaatctgaatctggaaatgaataataataagatagaagcaaacgtcaagggggatatcagaatagtcacaagttaaagcgtctgaattgatgttaaagttttatatttcacaaatttgtttaatacatgattctcataccccactgaaatggtagtttcaattcaaagcttaattaaaaaatatttaaatatca

SEQ ID NO: 181202 - DNA, 2292 bp, Homo sapiens
  Payload ID: 15685
  Gene Symbol: SHCBP1L
  Gene Name: SHC SH2-domain binding protein 1-like
  ENST ID: ENST00000423786
  CDS Start-End: 1-2175
atgcgtccgcaggaccccgcgctctacccgcaggccccgcaccccctagctctgggccgcgcctcacatccctcccagagccgcaacaccccaccggcgggacgccctcgagcagccgctcgttgcgggcctgaacgcagagcgcctattggccagagcggccgagggcgggaaaagtggccaacggctgcctcggccctcgggctgctgaggagatggcgtcggtccaaggcctcggtgcccgcggactcattccgcaccatcagcccggacaggcgaggcgagaagtccgcctccgctgtctccggggacacggcggccgcgaccaccctgaagggcaccgcgatcccagtgcggtcggtggtggcctcccctcgcccggtgaaggggaaagcgggccgggagacggccaggctgcggctccagcgcctgcccgcggctcaggccgaggacacgggagaggcggcggcggcggcggcggaggagcccctgctgccagtgcctgaggatgaagaggaggcgcagcccctgcccccagtctgcgtgtcccgtatgagggggatgtggcgggacgagaaggtgtcgctgtattgcgacgaagtgctgcaggactgtaaggcagaagatgctgatgaagttatgggtaaatacctatcagaaaaattaaagttgaaagacaaatggcttggagtctggaagactaatcccagtgtattctttgtgaaatatgaagaagcttctatcccttttgttggtatattggttgaggtaacttgtgaaccataccaagactcatcatctcgtttcaaagttactgtttctgttgctgagcccttttcttccaacattgcaaatattccaagagatttggttgatgagattttggaggaactggaacacagtgtgcctcttttggaagtgtatcctgttgagggacaagatactgatatacatgttattgctttggccttggaagttgtcaggtttttttatgactttctttggagagactgggatgatgaagaaagttgtgagaattatactgcacttattgaagaaagaattaatttgtggtgtgatatacaggatggaacaatacctggtcctatcgcacaacgttttaaaaaaactttggagaaatataaaaacaaacgtgtcgagctcattgagtatcagagcaatattaaagaagatccatctgcagcagaggctgttgaatgctggaaaaaatactatgagatagtcatgctctgtggattactgaaaatgtgggaagatttacgcctccgagttcatggacctttctttccaagaattctgaggcgtaggaaaggaaaaagagaatttggaaagactataacacatattgtagcaaaaatgatgactactgaaatgataaaggatttatcttcagacacacttctccaacagcatggtgatttggatttggctttggataattgttatagtggagatacagtaataatttttccaggagaatatcaagctgcaaatcttgctttgttgacagatgacatcattataaagggagttggaaagagagaggaaattatgattacttctgaaccttctcgtgacagttttgtggtgtccaaagctgacaatgtgaaactaatgcatctatctttgatacaacaagggacggttgatggtatcgtggtggtggagtctggtcacatgactctagaaaactgcatattaaaatgtgaaggaacaggagtgtgtgttcttacaggggctgctttgacaattacagacagtgaaataactggcgcccagggtgctggtgttgaactgtatcctggaagcatagctattttggaaagaaatgaaattcatcactgtaataacctcagaaccagtaacagttcaaaaagcaccttaggtggagttaatatgaaggttcttccagcacccaaattgaagatgactaataatcatatttatagcaacaaaggctatggagtaagcattcttcaaccaatggaacagttttttatcgtagcagaagaagctctcaacaaaagggcttcttcaggagataaaaaagatgataaaatgctcttcaaagtaatgcaaaatctgaatctggaaatgaataataataagatagaagcaaacgtcaagggggatatcagaatagtcacaagttaaagcgtctgaattgatgttaaagttttatatttcacaaatttgtttaatacatgattctcataccccactgaaatggtagtttcaattcaaagcttaattaaaaaatatttaaatatc

SEQ ID NO: 181203 - DNA, 2860 bp, Homo sapiens
  Payload ID: 15686
  Gene Symbol: SHISA2
  Gene Name: shisa family member 2
  Uniprot ID: Q6UWI4
  ENST ID: ENST00000319420
  CDS Start-End: 57-944
ctcggagaccgtcctgcgctctctggagacgcgctgtccgcgcccagggtggtgccatgtggggcgctcgccgctcgtccgtctcctcatcctggaacgccgcttcgctcctgcagctgctgctggctgcgctgctggcggcgggggcgagggccagcggcgagtactgccacggctggctggacgcgcagggcgtctggcgcatcggcttccagtgtcccgagcgcttcgacggcggcgacgccaccatctgctgcggcagctgcgcgttgcgctactgctgctccagcgccgaggcgcgcctggaccagggcggctgcgacaatgaccgccagcagggcgctggcgagcctggccgggcggacaaagacggccccgacggctcggcagtgcccatctacgtgccgttcctcattgttggctccgtgtttgtcgcctttatcatcttggggtccctggtggcagcctgttgctgcagatgtctccggcctaagcaggatccccagcagagccgagccccagggggtaaccgcttgatggagaccatccccatgatccccagtgccagcacctcccgggggtcgtcctcacgccagtccagcacagctgccagttccagctccagcgccaactcaggggcccgggcgcccccaacaaggtcacagaccaactgttgcttgccggaagggaccatgaacaacgtgtatgtcaacatgcccacgaatttctctgtgctgaactgtcagcaggccacccagattgtgccacatcaagggcagtatctgcatcccccatacgtggggtacacggtgcagcacgactctgtgcccatgacagctgtgccacctttcatggacggcctgcagcctggctacaggcagattcagtcccccttccctcacaccaacagtgaacagaagatgtacccagcggtgactgtataaccgagagtcactggtgggttcctttactgaagggagacgaaggcaggggtggattctcgaggtggaagtccgcacatgtcggtggtatttatggcacgattcctttggatggcttcatttgcccccagactgtatgaaaacatctccgaattagcatttctggatatgtttcatccagggtatcattgatttatgatggaaaaccggcctcagctggagatgactgtgatgttgctgatgggtgtataacaaatgcttgagtccgaagtgcccttgagatatggttgacgaaagaattttataaactgataaattaaggatttttattatgttgttattattatttcttttttgttgttgactgcacaggatcaaaatgcctgttatctcccttttacctgggactttttttttttttttttttttttttaatcagacagggtcttgctctgttgcccaggctggagtgcagtggtgcgatctcggctcactgcaacttcagcctcctggattcaggcaacactcctgcctcagcctcccacgtggctgggattacaggtgcctgcccccatggctaattttttgtattttttgtagagatggggtttcaccatgttggctgggctggtctcactctcctgacctcaagcaatctgcctgtctcagcctcccaaagtgctgggattacaggcgtgagccaccgcccccagcctgagcctttttttttttctaatgcatccaaggttaaggggaagacgcaaataacaggactattctaaaaggaaacctgtttgaactctgtgagatcagtcatcagtctcagtattccacaggcacaccttaatttcattgtaaaaagatatatatattttgtctatttttgtgcttttgggggcctattttgtgcttttttaccttatgtagagatcttattacaaagtgattttctacattaaaaagagactgaaataaattgtatagttacttaactaatgaagacatttcagaactctgggatgattttaatcttgaagtagtaggtggtatagtcataaaaccattcatccccttcttgattgtatcttaattttctggctttaaggtgacatctgagaggtaatgcattcttttttatattgaaatcataaactatcacccgctgcttctctgagttacttttaattttgccttgtggttatggtttggcgtttccttctgtttggttttcagagccccatgtctatatagtcctgagtgcaagtaattactatacttgtaaatgaagatcagtatttctgcctagatctgataaaaaaattttcttgtcttagttataaaaattcaaagaaatgtgttacaaagatacttagtatagctcctcagccataacctgagacttgggatgaaatttaaaccagatacgatttactttgcagatcataaggctttttatactcttgttatcaaaatggcttatttttcaggcactaaggattgttaagagaaaagcttttcaacgaaggattgcctttcttctcccacactgttcttgatttcctctctctttcaggcctcaacaggcactgtattcattgccaatgttccaaattatcaaattcaagtgaatttatttgtgtgttctttacttatataaaaaaagataactttaaggatgtgcaagtacatttccaactgctagcacaaccagtattttgtaattaaacaaatcgctgtatggtatggtcttctacacatttatgtctatagatatctatcgatcatctttctattctgtttcatgactgaataatgtaaaaccagtgttggcaattggtatcatcaatgatactcattttttaataaccaaaggcaggggaaaatcattttacttattaataaatattttatgatgtgaa

SEQ ID NO: 181204 - DNA, 1971 bp, Homo sapiens
  Payload ID: 15687
  Gene Symbol: SHISA3
  Gene Name: shisa family member 3
  Uniprot ID: A0PJX4
  ENST ID: ENST00000319234
  CDS Start-End: 219-935
cgcgcaccatgctgactcccggcctgcggaactcgtagtgcagcccctgtcgcctccccggcccctgctatcccacgcaggactggcttcggccgccggggccagcagcttgcgacgtgtccctggggaggcggaatcgctgtgcgccctgagcccgggctcagcccttcgctttccagctgcgtcctgctcccggccgcccagggagcccagtggcgatgagggcactgctggcgctttgccttctccttggctggctgcgctggggcccggcgggcgcccagcagtccggagagtactgccacggctgggtggacgtgcagggcaactaccacgagggcttccagtgcccagaggacttcgacacgctggacgctaccatctgctgcggctcctgcgcgctccgctactgttgcgccgcggccgacgccaggctggagcagggcggctgcaccaacgaccgccgcgaactggagcacccaggcatcactgcgcagcctgtctacgtcccctttctcatcgtcggctccatcttcattgcgttcatcatcctgggctctgtagtggctatttattgttgcacctgtttgagacccaaggagccctcgcagcagccaatccgcttctcactccgcagctatcagacagagaccctgcccatgatcctgacctccaccagccccagggcaccctcccggcagtccagcacagccacgagctccagctccacaggcggctccatccgcaggttctcctttgccagggctgagccgggctgcctggtgccctcaccgcccccgccatacaccaccagccactcaatccacctggctcagccatctggtttcctggtgtcaccccagtatttcgcttaccccctccagcaggagcccccactgcctgggaagagctgtccagacttcagttccagttgacacgcccaggccatgaatccacaactcagtcagatggcagacaggtggagccctgctcccattgccacatgcaattctgagaaaatttcccttgtaactgatcagtgtcatggaggagcatgctaggaaaacacagcaccttctaatttgaaagttcctgtctccaatcacagaaaggctaaaccagagaactgttttctggttttgcaaacatgtgatcattacatttcaatctatgctacttttattcaaaatatgcagcagtttgactttaaagttgcaaactggctaaaaacgttttactggacattcagctatattgcttagaaaagggctacatgtttctttttcatataagttgttcattgagttatgataggaatatattcataaataagcaaagaaaaatacctaattgtaattatcaaaggttcacttaaaaaattaactattaggtaaacttaagggggcagtgaaaaatctatttatgatttcgggagtaacctaaccatgaataatattagcataatgagaacatttactttttaaataaataactaaattttgtttacaatatgagtttttccagaatacaaggtttcaataatcacatgaggagtttaaagttttaaatatatactcagacattcattgtaacacagagtgtatgtaaaatcatttcccccactcactggagggagtatttattgcagactttttgttcagcaacatttagtgtttcagtgaaagttggacagttggggcttaaaacatttatttgtaaaatgagctatgttcaaatgtaaatatttgtaatttaatgtatttaccacattgactgtactaattatttagtagtcatactgtaatttttatgttaataataactggagttcaaagtctagctattggtataatcatctaatattatatatatctccagtgcccctgaattttatgtttgatgactatatatttgggcatatatcttgttggattagaataaataaaacactttatattttcatgaactcta

SEQ ID NO: 181205 - DNA, 1341 bp, Homo sapiens
  Payload ID: 15688
  Gene Symbol: SHISA4
  Gene Name: shisa family member 4
  Uniprot ID: Q96DD7
  ENST ID: ENST00000362011
  CDS Start-End: 288-881
ccaccgcggagccggggacagggggagcagggcagtgctctgctgggtgaggggcacccagctccagaggctaggtgggcgtcgctggtgggtggactcctgggcgctgcgcggagccgcgccggctgggttagcgcgggcggggcgcttagtcccacccccagaggaggcggaagaggagcccgagcctggccgcgggctgggccccgccgcagctccagctggccggcttggtcctgcggtcccttctctgggaggcccgaccccggccgcgcccagcccccaccatgccacccgcggggctccgccgggccgcgccgctcaccgcaatcgctctgttggtgctgggggctcccctggtgctggccggcgaggactgcctgtggtacctggaccggaatggctcctggcatccggggtttaactgcgagttcttcaccttctgctgcgggacctgctaccatcggtactgctgcagggacctgaccttgcttatcaccgagaggcagcagaagcactgcctggccttcagccccaagaccatagcaggcatcgcctcagctgtgatcctctttgttgctgtggttgccaccaccatctgctgcttcctctgttcctgttgctacctgtaccgccggcgccagcagctccagagcccatttgaaggccaggagattccaatgacaggcatcccagtgcagccagtatacccatacccccaggaccccaaagctggccctgcacccccacagcctggcttcatatacccacctagtggtcctgctccccaatatccactctacccagctgggcccccagtctacaaccctgcagctcctcctccctatatgccaccacagccctcttacccgggagcctgaggaaccagccatgtctctgctgccccttcagtgatgccaaccttgggagatgccctcatcctgtacctgcatctggtcctgggggtggcaggagtcctccagccaccaggccccagaccaagccaagccctgggccctactggggacagagccccagggaagtggaacaggagctgaactagaactatgaggggttggggggagggcttggaattatgggctatttttactgggggcaagggagggagatgacagcctgggtcacagtgcctgttttcaaatagtccctctgctcccaagatcccagccaggaaggctggggccctactgtttgtcccctctgggctggggtggggggagggaggaggttccgtcagcagctggcagtagccctcctctctggctgccccactggccacatctctggcctgctagattaaagctgtaaagacataactca

SEQ ID NO: 181206 - DNA, 2369 bp, Homo sapiens
  Payload ID: 15689
  Gene Symbol: SHISA5
  Gene Name: shisa family member 5
  Uniprot ID: Q8N114
  ENST ID: ENST00000296444
  CDS Start-End: 338-1060
atgcatccggtgagcagaaggaaactccgtgcgtcgcccggcgcctgtccgagtctgggaaccggtaccaagttttcgcgcagaccccgggcgcgaagctggccccgaggctgggaagtcgtccgcttccttccttcctcctccttccaccttcctccctcctccctcctccctcctcctccctcctcctcctcctgctcccccggacagaggttccgggaaccagccgggccggggcggggcggggcgagggagaggggcggccgcgcggatcactgaggctgtggcggcactgcgcccggcgctcgcgtccgtccgcccgtccgcccgcccagccatgactgcgccggtccccgcgccgcggatcctgttgccgttgctgttgctgctgctgctaacgccgcctccgggtgcacgtggtgaggtgtgtatggcttcccgtggactcagcctcttccccgagtcctgtccagatttctgctgtggtacctgtgatgaccaatactgctgctctgacgtgctgaagaaatttgtgtggagcgaggaaaggtgtgctgtgcctgaggccagcgtgcctgccagtgtagagccggtggagcagctgggctcggcgctgaggtttcgccctggctacaacgaccccatgtcagggttcggagcgaccttggccgttggcctgaccatctttgtgctgtctgtcgtcactatcatcatctgcttcacctgctcctgctgctgcctttacaagacgtgccgccgaccacgtccggttgtcaccaccaccacatccaccactgtggtgcatgccccttatcctcagcctccaagtgtgccgcccagctaccctggaccaagctaccagggctaccacaccatgccgcctcagccagggatgccagcagcaccctacccaatgcagtacccaccaccttacccagcccagcccatgggcccaccggcctaccacgagaccctggctggaggagcagccgcgccctaccccgccagccagcctccttacaacccggcctacatggatgccccgaaggcggccctctgagcattccctggcctctctggctgccacttggttatgttgtgtgtgtgcgtgagtggtgtgcaggcgcggttccttacgccccatgtgtgctgtgtgtgtccaggcacggttccttacgccccatgtgtgctgtgtgtgtcctgcctgtatatgtggcttcctctgatgctgacaaggtggggaacaatccttgccagagtgggctgggaccagactttgttctcttcctcacctgaaattatgcttcctaaaatctcaagccaaactcaaagaatggggtggtggggggcaccctgtgaggtggcccctgagaggtgggggcctctccagggcacatctggagttcttctccagcttaccctagggtgaccaagtagggcctgtcacaccagggtggcgcagctttctgtgtgatgcagatgtgtcctggtttcggcagcgtagccagctgctgcttgaggccatggctcgtccccggagttgggggtacccgttgcagagccagggacatgatgcaggcgaagcttgggatctggccaagttggactttgatcctttgggcagatgtcccattgctccctggagcctgtcatgcctgttggggatcaggcagcctcctgatgccagaacacctcaggcagagccctactcagctgtacctgtctgcctggactgtcccctgtccccgcatctcccctgggaccagctggagggccacatgcacacacagcctagctgcccccagggagctctgctgcccttgctggccctgcccttcccacaggtgagcagggctcctgtccaccagcacactcagttctcttccctgcagtgttttcattttattttagccaaacattttgcctgttttctgtttcaaacatgatagttgatatgagactgaaacccctgggttgtggagggaaattggctcagagatggacaacctggcaactgtgagtccctgcttcccgacaccagcctcatggaatatgcaacaactcctgtaccccagtccacggtgttctggcagcagggacacctgggccaatgggccatctggaccaaaggtggggtgtggggccctggatggcagctctggcccagacatgaatacctcgtgttcctcctccctctattactgtttcaccagagctgtcttagctcaaatctgttgtgtttctgagtctagggtctgtacacttgtttataataaatgcaatcgtttggagctgctgccccctttcttcctggcctcggctgctggaattggaatcaggctgtactctttccatccatttgggcttct

SEQ ID NO: 181207 - DNA, 1839 bp, Homo sapiens
  Payload ID: 15689
  Gene Symbol: SHISA5
  Gene Name: shisa family member 5
  Uniprot ID: Q8N114
  ENST ID: ENST00000426002
  CDS Start-End: 195-608
gggcggggccatcctgtgtctttaagagggtggaacggggcttcgcgtctgtgcttcctgtggctgacgtcatctggaggagatttgctttctttttctccaaaaggggaggaaattgaaactgagtggcccacgatgggaagaggggaaagcccaggggtacaggaggcctctgggtgaaggcagaggctaacatggggttcggagcgaccttggccgttggcctgaccatctttgtgctgtctgtcgtcactatcatcatctgcttcacctgctcctgctgctgcctttacaagacgtgccgccgaccacgtccggttgtcaccaccaccacatccaccactgtggtgcatgccccttatcctcagcctccaagtgtgccgcccagctaccctggaccaagctaccagggctaccacaccatgccgcctcagccagggatgccagcagcaccctacccaatgcagtacccaccaccttacccagcccagcccatgggcccaccggcctaccacgagaccctggctggaggagcagccgcgccctaccccgccagccagcctccttacaacccggcctacatggatgccccgaaggcggccctctgagcattccctggcctctctggctgccacttggttatgttgtgtgtgtgcgtgagtggtgtgcaggcgcggttccttacgccccatgtgtgctgtgtgtgtccaggcacggttccttacgccccatgtgtgctgtgtgtgtcctgcctgtatatgtggcttcctctgatgctgacaaggtggggaacaatccttgccagagtgggctgggaccagactttgttctcttcctcacctgaaattatgcttcctaaaatctcaagccaaactcaaagaatggggtggtggggggcaccctgtgaggtggcccctgagaggtgggggcctctccagggcacatctggagttcttctccagcttaccctagggtgaccaagtagggcctgtcacaccagggtggcgcagctttctgtgtgatgcagatgtgtcctggtttcggcagcgtagccagctgctgcttgaggccatggctcgtccccggagttgggggtacccgttgcagagccagggacatgatgcaggcgaagcttgggatctggccaagttggactttgatcctttgggcagatgtcccattgctccctggagcctgtcatgcctgttggggatcaggcagcctcctgatgccagaacacctcaggcagagccctactcagctgtacctgtctgcctggactgtcccctgtccccgcatctcccctgggaccagctggagggccacatgcacacacagcctagctgcccccagggagctctgctgcccttgctggccctgcccttcccacaggtgagcagggctcctgtccaccagcacactcagttctcttccctgcagtgttttcattttattttagccaaacattttgcctgttttctgtttcaaacatgatagttgatatgagactgaaacccctgggttgtggagggaaattggctcagagatggacaacctggcaactgtgagtccctgcttcccgacaccagcctcatggaatatgcaacaactcctgtaccccagtccacggtgttctggcagcagggacacctgggccaatgggccatctggaccaaaggtggggtgtggggccctggatggcagctctggcccagacatgaatacctcgtgttcctcctccctctattactgtttcaccagagctgtcttagctcaaatctgttgtgtttctgagtctagggtctgtacacttgtttataataaatgcaatcgtttgga

SEQ ID NO: 181208 - DNA, 1933 bp, Homo sapiens
  Payload ID: 15689
  Gene Symbol: SHISA5
  Gene Name: shisa family member 5
  Uniprot ID: Q8N114
  ENST ID: ENST00000443308
  CDS Start-End: 36-737
cgctcgcgtccgtccgcccgtccgcccgcccagccatgactgcgccggtccccgcgccgcggatcctgttgccgttgctgttgctgctgctgctaacgccgcctccgggtgcacgtggtgaggtgtgtatggcttcccgtggactcagcctcttccccgagtcctgtccagatttctgctgtggtacctgtgatgaccaatactgctgctctgacgtgctgaagaaatttgtgtggagcgaggaaagcgtgcctgccagtgtagagccggtggagcagctgggctcggcgctgaggtttcgccctggctacaacgaccccatgtcagggttcggagcgaccttggccgttggcctgaccatctttgtgctgtctgtcgtcactatcatcatctgcttcacctgctcctgctgctgcctttacaagacgtgccgccgaccacgtccggttgtcaccaccaccacatccaccactgtggtgcatgccccttatcctcagcctccaagtgtgccgcccagctaccctggaccaagctaccagggctaccacaccatgccgcctcagccagggatgccagcagcaccctacccaatgcagtacccaccaccttacccagcccagcccatgggcccaccggcctaccacgagaccctggctggaggagcagccgcgccctaccccgccagccagcctccttacaacccggcctacatggatgccccgaaggcggccctctgagcattccctggcctctctggctgccacttggttatgttgtgtgtgtgcgtgagtggtgtgcaggcgcggttccttacgccccatgtgtgctgtgtgtgtccaggcacggttccttacgccccatgtgtgctgtgtgtgtcctgcctgtatatgtggcttcctctgatgctgacaaggtggggaacaatccttgccagagtgggctgggaccagactttgttctcttcctcacctgaaattatgcttcctaaaatctcaagccaaactcaaagaatggggtggtggggggcaccctgtgaggtggcccctgagaggtgggggcctctccagggcacatctggagttcttctccagcttaccctagggtgaccaagtagggcctgtcacaccagggtggcgcagctttctgtgtgatgcagatgtgtcctggtttcggcagcgtagccagctgctgcttgaggccatggctcgtccccggagttgggggtacccgttgcagagccagggacatgatgcaggcgaagcttgggatctggccaagttggactttgatcctttgggcagatgtcccattgctccctggagcctgtcatgcctgttggggatcaggcagcctcctgatgccagaacacctcaggcagagccctactcagctgtacctgtctgcctggactgtcccctgtccccgcatctcccctgggaccagctggagggccacatgcacacacagcctagctgcccccagggagctctgctgcccttgctggccctgcccttcccacaggtgagcagggctcctgtccaccagcacactcagttctcttccctgcagtgttttcattttattttagccaaacattttgcctgttttctgtttcaaacatgatagttgatatgagactgaaacccctgggttgtggagggaaattggctcagagatggacaacctggcaactgtgagtccctgcttcccgacaccagcctcatggaatatgcaacaactcctgtaccccagtccacggtgttctggcagcagggacacctgggccaatgggccatctggaccaaaggtggggtgtggggccctggatggcagctctggcccagacatgaatacctcgtgttcctcctccctctattactgtttcaccagagctgtcttagctcaaatctgttgtgtttctgagtctagggtc

SEQ ID NO: 181209 - DNA, 556 bp, Homo sapiens
  Payload ID: 15689
  Gene Symbol: SHISA5
  Gene Name: shisa family member 5
  ENST ID: ENST00000415268
  CDS Start-End: 61-246
gaggctgtggcggcactgcgcccggcgctcgcgtccgtccgcccgtccgcccgcccagccatgactgcgccggtccccgcgccgcggatcctgttgccgttgctgttgctgctgctgctaacgccgcctccgggtgggctacagatggtgccactgccttggagccctgttgcccaggctggtctcaaactcctggaaggcacagacatttcctggacacctgctgcaggcccagcgcggggctaagtgctttatgaacgctggtatgcacgtggtgaggtgtgtatggcttcccgtggactcagcctcttccccgagtcctgtccagatttctgctgtggtacctgtgatgaccaatactgctgctctgacgtgctgaagaaatttgtgtggagcgaggaaaggtgtgctgtgcctgaggccagcgtgcctgccagtgtagagccggtggagcagctgggctcggcgctgaggtttcgccctggctacaacgaccccatgtcagggttcggagcgaccttggccgttggcctgaccatctttgtgctgtctgtcg

SEQ ID NO: 181210 - DNA, 2306 bp, Homo sapiens
  Payload ID: 15689
  Gene Symbol: SHISA5
  Gene Name: shisa family member 5
  ENST ID: ENST00000417962
  CDS Start-End: 1-142
gttgctgctgctgctaacgccgcctccgggtggtgagccgggggtgggggcggcccgtcctgccctgggaccgggcagacacttccccgcgctgcctctccaacgagccgggcagcaccagccccactatgccccccactgacccctgattgccccgaggccgtcagcgaacccccacgactgcggacccctcctccaccccagcaccctccttgcctgaacaaccctgcctagacaccaggcagctgccacctttgtctgtcctggaacggtggggaggggtctgccctcccgcccatgttccaggggatggagtccccagaggctaggccctagctcagaggctcagattgggctgtgaagaccttgctgcatatgggttcacctgagccaccaggcacgggccatgctgatgataccagctttcagcacgtggtgaggtgtgtatggcttcccgtggactcagcctcttccccgagtcctgtccagatttctgctgtggtacctgtgatgaccaatactgctgctctgacgtgctgaagaaatttgtgtggagcgaggaaaggtgtgctgtgcctgaggccagcgtgcctgccagtgtagagccggtggagcagctgggctcggcgctgaggtttcgccctggctacaacgaccccatgtcagggttcggagcgaccttggccgttggcctgaccatctttgtgctgtctgtcgtcactatcatcatctgcttcacctgctcctgctgctgcctttacaagacgtgccgccgaccacgtccggttgtcaccaccaccacatccaccactgtggtgcatgccccttatcctcagcctccaagtgtgccgcccagctaccctggaccaagctaccagggctaccacaccatgccgcctcagccagggatgccagcagcaccctacccaatgcagtacccaccaccttacccagcccagcccatgggcccaccggcctaccacgagaccctggctggaggagcagccgcgccctaccccgccagccagcctccttacaacccggcctacatggatgccccgaaggcggccctctgagcattccctggcctctctggctgccacttggttatgttgtgtgtgtgcgtgagtggtgtgcaggcgcggttccttacgccccatgtgtgctgtgtgtgtccaggcacggttccttacgccccatgtgtgctgtgtgtgtcctgcctgtatatgtggcttcctctgatgctgacaaggtggggaacaatccttgccagagtgggctgggaccagactttgttctcttcctcacctgaaattatgcttcctaaaatctcaagccaaactcaaagaatggggtggtggggggcaccctgtgaggtggcccctgagaggtgggggcctctccagggcacatctggagttcttctccagcttaccctagggtgaccaagtagggcctgtcacaccagggtggcgcagctttctgtgtgatgcagatgtgtcctggtttcggcagcgtagccagctgctgcttgaggccatggctcgtccccggagttgggggtacccgttgcagagccagggacatgatgcaggcgaagcttgggatctggccaagttggactttgatcctttgggcagatgtcccattgctccctggagcctgtcatgcctgttggggatcaggcagcctcctgatgccagaacacctcaggcagagccctactcagctgtacctgtctgcctggactgtcccctgtccccgcatctcccctgggaccagctggagggccacatgcacacacagcctagctgcccccagggagctctgctgcccttgctggccctgcccttcccacaggtgagcagggctcctgtccaccagcacactcagttctcttccctgcagtgttttcattttattttagccaaacattttgcctgttttctgtttcaaacatgatagttgatatgagactgaaacccctgggttgtggagggaaattggctcagagatggacaacctggcaactgtgagtccctgcttcccgacaccagcctcatggaatatgcaacaactcctgtaccccagtccacggtgttctggcagcagggacacctgggccaatgggccatctggaccaaaggtggggtgtggggccctggatggcagctctggcccagacatgaatacctcgtgttcctcctccctctattactgtttcaccagagctgtcttagctcaaatctgttgtgtttctgagtctagggtctgtacacttgtttataataaatgcaatcgtttgg

SEQ ID NO: 181211 - DNA, 2081 bp, Homo sapiens
  Payload ID: 15689
  Gene Symbol: SHISA5
  Gene Name: shisa family member 5
  Uniprot ID: Q8N114
  ENST ID: ENST00000444115
  CDS Start-End: 215-844
gtgtgccctgggagctgccagtttctagctcagtcctggcccactgcgccagcgctgagcctgccagggctggggctggggatcaccttgggatgatggtgtcagtcccagggggcaggagatcgagtgtcctctgagctggcgactgggcctgtagaagggaaccggcatttgtggagtgtctactgagtgccaagcacgtggtgaggtgtgtatggcttcccgtggactcagcctcttccccgagtcctgtccagatttctgctgtggtacctgtgatgaccaatactgctgctctgacgtgctgaagaaatttgtgtggagcgaggaaaggtgtgctgtgcctgaggccagcgtgcctgccagtgtagagccggtggagcagctgggctcggcgctgaggtttcgccctggctacaacgaccccatgtcagggttcggagcgaccttggccgttggcctgaccatctttgtgctgtctgtcgtcactatcatcatctgcttcacctgctcctgctgctgcctttacaagacgtgccgccgaccacgtccggttgtcaccaccaccacatccaccactgtggtgcatgccccttatcctcagcctccaagtgtgccgcccagctaccctggaccaagctaccagggctaccacaccatgccgcctcagccagggatgccagcagcaccctacccaatgcagtacccaccaccttacccagcccagcccatgggcccaccggcctaccacgagaccctggctggaggagcagccgcgccctaccccgccagccagcctccttacaacccggcctacatggatgccccgaaggcggccctctgagcattccctggcctctctggctgccacttggttatgttgtgtgtgtgcgtgagtggtgtgcaggcgcggttccttacgccccatgtgtgctgtgtgtgtccaggcacggttccttacgccccatgtgtgctgtgtgtgtcctgcctgtatatgtggcttcctctgatgctgacaaggtggggaacaatccttgccagagtgggctgggaccagactttgttctcttcctcacctgaaattatgcttcctaaaatctcaagccaaactcaaagaatggggtggtggggggcaccctgtgaggtggcccctgagaggtgggggcctctccagggcacatctggagttcttctccagcttaccctagggtgaccaagtagggcctgtcacaccagggtggcgcagctttctgtgtgatgcagatgtgtcctggtttcggcagcgtagccagctgctgcttgaggccatggctcgtccccggagttgggggtacccgttgcagagccagggacatgatgcaggcgaagcttgggatctggccaagttggactttgatcctttgggcagatgtcccattgctccctggagcctgtcatgcctgttggggatcaggcagcctcctgatgccagaacacctcaggcagagccctactcagctgtacctgtctgcctggactgtcccctgtccccgcatctcccctgggaccagctggagggccacatgcacacacagcctagctgcccccagggagctctgctgcccttgctggccctgcccttcccacaggtgagcagggctcctgtccaccagcacactcagttctcttccctgcagtgttttcattttattttagccaaacattttgcctgttttctgtttcaaacatgatagttgatatgagactgaaacccctgggttgtggagggaaattggctcagagatggacaacctggcaactgtgagtccctgcttcccgacaccagcctcatggaatatgcaacaactcctgtaccccagtccacggtgttctggcagcagggacacctgggccaatgggccatctggaccaaaggtggggtgtggggccctggatggcagctctggcccagacatgaatacctcgtgttcctcctccctctattactgtttcaccagagctgtcttagctcaaatctgttgtgtttctgagtctagggtctgtacacttgtttataataaatgcaatcgtttggagctgct

SEQ ID NO: 181212 - DNA, 2250 bp, Homo sapiens
  Payload ID: 15689
  Gene Symbol: SHISA5
  Gene Name: shisa family member 5
  Uniprot ID: Q8N114
  ENST ID: ENST00000442747
  CDS Start-End: 391-1020
agtcctggcccactgcgccagcgctgagcctgccagggctggggctggggatcaccttgggatgatggtgtcagtcccagggggcaggagatcgagtgtcctctgagctggcgactgggcctgtagaagggaaccggcatttgtggagtgtctactgagtgccaaggtctgcgctgggcactgtcctcgcaccgcctcacctagtcctcacgtagccctcgggcaagtgaggatccgccgggactgcggctgggagggatggctgtggctgtcccccagcccacacagtaggcgctcagtgtcagggtgcatattcccggggacgccctccaggcctgagagctgggggccgccgccgccccccatgcatccgcacgtggtgaggtgtgtatggcttcccgtggactcagcctcttccccgagtcctgtccagatttctgctgtggtacctgtgatgaccaatactgctgctctgacgtgctgaagaaatttgtgtggagcgaggaaaggtgtgctgtgcctgaggccagcgtgcctgccagtgtagagccggtggagcagctgggctcggcgctgaggtttcgccctggctacaacgaccccatgtcagggttcggagcgaccttggccgttggcctgaccatctttgtgctgtctgtcgtcactatcatcatctgcttcacctgctcctgctgctgcctttacaagacgtgccgccgaccacgtccggttgtcaccaccaccacatccaccactgtggtgcatgccccttatcctcagcctccaagtgtgccgcccagctaccctggaccaagctaccagggctaccacaccatgccgcctcagccagggatgccagcagcaccctacccaatgcagtacccaccaccttacccagcccagcccatgggcccaccggcctaccacgagaccctggctggaggagcagccgcgccctaccccgccagccagcctccttacaacccggcctacatggatgccccgaaggcggccctctgagcattccctggcctctctggctgccacttggttatgttgtgtgtgtgcgtgagtggtgtgcaggcgcggttccttacgccccatgtgtgctgtgtgtgtccaggcacggttccttacgccccatgtgtgctgtgtgtgtcctgcctgtatatgtggcttcctctgatgctgacaaggtggggaacaatccttgccagagtgggctgggaccagactttgttctcttcctcacctgaaattatgcttcctaaaatctcaagccaaactcaaagaatggggtggtggggggcaccctgtgaggtggcccctgagaggtgggggcctctccagggcacatctggagttcttctccagcttaccctagggtgaccaagtagggcctgtcacaccagggtggcgcagctttctgtgtgatgcagatgtgtcctggtttcggcagcgtagccagctgctgcttgaggccatggctcgtccccggagttgggggtacccgttgcagagccagggacatgatgcaggcgaagcttgggatctggccaagttggactttgatcctttgggcagatgtcccattgctccctggagcctgtcatgcctgttggggatcaggcagcctcctgatgccagaacacctcaggcagagccctactcagctgtacctgtctgcctggactgtcccctgtccccgcatctcccctgggaccagctggagggccacatgcacacacagcctagctgcccccagggagctctgctgcccttgctggccctgcccttcccacaggtgagcagggctcctgtccaccagcacactcagttctcttccctgcagtgttttcattttattttagccaaacattttgcctgttttctgtttcaaacatgatagttgatatgagactgaaacccctgggttgtggagggaaattggctcagagatggacaacctggcaactgtgagtccctgcttcccgacaccagcctcatggaatatgcaacaactcctgtaccccagtccacggtgttctggcagcagggacacctgggccaatgggccatctggaccaaaggtggggtgtggggccctggatggcagctctggcccagacatgaatacctcgtgttcctcctccctctattactgtttcaccagagctgtcttagctcaaatctgttgtgtttctgagtctagggtctgtacacttgtttataataaatgcaatcgtttgg

SEQ ID NO: 181213 - DNA, 575 bp, Homo sapiens
  Payload ID: 15689
  Gene Symbol: SHISA5
  Gene Name: shisa family member 5
  ENST ID: ENST00000417841
  CDS Start-End: 239-575
actgcgcccggcgctcgcgtccgtccgcccgtccgcccgcccagccatgactgcgccggtccccgcgccgcggatcctgttgccgttgctgttgctgctgctgctaacgccgcctccgggtgccctagctcagaggctcagattgggctgtgaagaccttgctgcatatgggttcacctgagccaccaggcacgggccatgctgatgataccagctttcagcacgtggtgaggtgtgtatggcttcccgtggactcagcctcttccccgagtcctgtccagatttctgctgtggtacctgtgatgaccaatactgctgctctgacgtgctgaagaaatttgtgtggagcgaggaaaggtgtgctgtgcctgaggccagcgtgcctgccagtgtagagccggtggagcagctgggctcggcgctgaggtttcgccctggctacaacgaccccatgtcagggttcggagcgaccttggccgttggcctgaccatctttgtgctgtctgtcgtcactatcatcatctgcttcacctgctcctgctgctgcctttacaagacgtgccgccgaccacgtc

SEQ ID NO: 181214 - DNA, 884 bp, Homo sapiens
  Payload ID: 15689
  Gene Symbol: SHISA5
  Gene Name: shisa family member 5
  ENST ID: ENST00000424965
  CDS Start-End: 72-443
cgcggatcactgaggctgtggcggcactgcgcccggcgctcgcgtccgtccgcccgtccgcccgcccagccatgactgcgccggtccccgcgccgcggatcctgttgccgttgctgttgctgctgctgctaacgccgcctccgggtgcacgtggtgaggtgtgtatggcttcccgtggactcagcctcttccccgagtcctgtccagatttctgctgtggtacctgtgatgaccaatactgctgctctgacgtgctgaagaaatttgtgtggagcgaggaaaggtgtgctgtgcctgaggccagcgtgcctgccagtgtagagccggtggagcagctgggctcggcgctgaggtttcgccctggctacaacgaccccatgtcaggatttgagctgggacaacaaggaggagacagtgcggaacaagctcccagaggggcataggaggaggagtggcttcctggggttgtggcagcagggaggtgactggggccagctcagaggcacctctgactccccaaggtgtgcatgtgggacctgttctgttagcccagctgccgccgtggtgtgcatagcactgggcctcgtgtgccgtgtgcttggcgtgccctgctgcctcctgccccaggctattttgcccatgcatcgagaagagcaggttcggagcgaccttggccgttggcctgaccatctttgtgctgtctgtcgtcactatcatcatctgcttcacctgctcctgctgctgcctttacaagacgtgccgccgaccacgtccggttgtcaccaccaccacatccaccactgtggtgcatgccccttatcctcagcctccaagtgtgccgcccagctaccctggaccaagctaccagggctaccacaccatgc

SEQ ID NO: 181215 - DNA, 559 bp, Homo sapiens
  Payload ID: 15689
  Gene Symbol: SHISA5
  Gene Name: shisa family member 5
  ENST ID: ENST00000441507
  CDS Start-End: 47-181
actgcgcccggcgctcgcgtccgtccgcccgtccgcccgcccagccatgactgcgccggtccccgcgccgcggatcctgttgccgttgctgttgctgctgctgctaacgccgcctccgggtgccctagctcagaggctcagattgggctgtgaagaccttgctgcatatgggttcacctgagccaccaggcacgggccatgctgatgataccagctttcagccagatcccctcagcatgacctcgtttattgagacttgtaaggatgtcagtagatcccaactctgtgctgagagtcttgtgatggctccagggctacagatggtgccactgccttggagccctgttgcccaggctggtctcaaactcctggaaggcacagacatttcctggacacctgctgcaggcccagcgcggggctaagtgctttatgaacgctggtatgcacgtggtgaggtgtgtatggcttcccgtggactcagcctcttccccgagtcctgtccagatttctgctgtggtacctgtgatgaccaatactgctgctctgacgtgctgaagaa

SEQ ID NO: 181216 - DNA, 1677 bp, Homo sapiens
  Payload ID: 15689
  Gene Symbol: SHISA5
  Gene Name: shisa family member 5
  ENST ID: ENST00000612611
  CDS Start-End: 304-816
gaggggcatgccttgggaaggtgtggatgctggtctggggaggggcgaggtgccccgggtcacgtctagctctttggcaggttcggagcgaccttggccgttggcctgaccatctttgtgctgtctgtcgtcactatcatcatctgcttcacctgctcctgctgctgcctttacaagacgtgccgccgaccacgtccggttgtcaccaccaccacatccaccactgtggtgcatgccccttatcctcagcctccaagtgtgccgcccagctaccctggaccaagctaccagggctaccacaccatgccgcctcagccaggatgccagcagcaccctacccaatgcagtacccaccaccttacccagcccagcccatgggcccaccggcctaccacgagaccctggctggaggagcagccgcgccctaccccgccagccagcctccttacaacccggcctacatggatgccccgaggcggccctctgagcattccctggcctctctggctgccacttggttatgttgtgtgtgtgcgtgagtggtgtgcaggcgcggttccttacgccccatgtgtgctgtgtgtgtcctgcctgtatatgtggcttcctctgatgctgacaaggtggggaacaatccttgccagagtgggctgggaccagactttgttctcttcctcacctgaaattatgcttcctaaaatctcaagccaaactcaaagaatggggtggtggggggcaccctgtgaggtggcccctgagaggtgggggcctctccagggcacatctggagttcttctccagcttaccctagggtgaccaagtagggcctgtcacaccagggtggcgcagctttctgtgtgatgcagatgtgtcctggtttcggcagcgtagccagctgctgcttgaggccatggctcgtccccggagttgggggtacccgttgcagagccagggacatgatgcaggcgaagcttgggatctggccaagttggactttgatcctttgggcagatgtcccattgctccctggagcctgtcatgcctgttggggatcaggcagcctcctgatgccagaacacctcaggcagagccctactcagctgtacctgtctgcctggactgtcccctgtccccgcatctcccctgggaccagctggagggccacatgcacacacagcctagctgcccccagggagctctgctgcccttgctggccctgcccttcccacaggtgagcagggctcctgtccaccagcacactcagttctcttccctgcagtgttttcattttattttagccaaacattttgcctgttttctgtttcaaacatgatagttgatatgagactgaaacccctgggttgtggagggaaattggctcagagatggacaacctggcaactgtgagtccctgcttcccgacaccagcctcatggaatatgcaacaactcctgtaccccagtccacggtgttctggcagcagggacacctgggccaatgggccatctggaccaaaggtggggtgtggggccctggatggcagctctggcccagacatgaatacctcgtgttcctcctccctctattactgtttcaccagagctgtcttagctcaaatctgttgtgtttctgagtctagggtctgtacacttgtttataataaatgcaatcgtttgg

SEQ ID NO: 181217 - DNA, 2385 bp, Homo sapiens
  Payload ID: 15689
  Gene Symbol: SHISA5
  Gene Name: shisa family member 5
  Uniprot ID: Q8N114
  ENST ID: ENST00000619810
  CDS Start-End: 447-1076
gttgctgctgctgctaacgccgcctccgggtggtgagccgggggtgggggcggcccgtcctgccctgggaccgggcagacacttccccgcgctgcctctccaacgagccgggcagcaccagccccactatgccccccactgacccctgattgccccgaggccgtcagcgaacccccacgactgcggacccctcctccaccccagcaccctccttgcctgaacaaccctgcctagacaccaggcagctgccacctttgtctgtcctggaacggtggggaggggtctgccctcccgcccatgttccaggggatggagtccccagaggctaggccctagctcagaggctcagattgggctgtgaagaccttgctgcatatgggttcacctgagccaccaggcacgggccatgctgatgataccagctttcagcacgtggtgaggtgtgtatggcttcccgtggactcagcctcttccccgagtcctgtccagatttctgctgtggtacctgtgatgaccaatactgctgctctgacgtgctgaagaaatttgtgtggagcgaggaaaggtgtgctgtgcctgaggccagcgtgcctgccagtgtagagccggtggagcagctgggctcggcgctgaggtttcgccctggctacaacgaccccatgtcagggttcggagcgaccttggccgttggcctgaccatctttgtgctgtctgtcgtcactatcatcatctgcttcacctgctcctgctgctgcctttacaagacgtgccgccgaccacgtccggttgtcaccaccaccacatccaccactgtggtgcatgccccttatcctcagcctccaagtgtgccgcccagctaccctggaccaagctaccagggctaccacaccatgccgcctcagccagggatgccagcagcaccctacccaatgcagtacccaccaccttacccagcccagcccatgggcccaccggcctaccacgagaccctggctggaggagcagccgcgccctaccccgccagccagcctccttacaacccggcctacatggatgccccgaaggcggccctctgagcattccctggcctctctggctgccacttggttatgttgtgtgtgtgcgtgagtggtgtgcaggcgcggttccttacgccccatgtgtgctgtgtgtgtccaggcacggttccttacgccccatgtgtgctgtgtgtgtcctgcctgtatatgtggcttcctctgatgctgacaaggtggggaacaatccttgccagagtgggctgggaccagactttgttctcttcctcacctgaaattatgcttcctaaaatctcaagccaaactcaaagaatggggtggtggggggcaccctgtgaggtggcccctgagaggtgggggcctctccagggcacatctggagttcttctccagcttaccctagggtgaccaagtagggcctgtcacaccagggtggcgcagctttctgtgtgatgcagatgtgtcctggtttcggcagcgtagccagctgctgcttgaggccatggctcgtccccggagttgggggtacccgttgcagagccagggacatgatgcaggcgaagcttgggatctggccaagttggactttgatcctttgggcagatgtcccattgctccctggagcctgtcatgcctgttggggatcaggcagcctcctgatgccagaacacctcaggcagagccctactcagctgtacctgtctgcctggactgtcccctgtccccgcatctcccctgggaccagctggagggccacatgcacacacagcctagctgcccccagggagctctgctgcccttgctggccctgcccttcccacaggtgagcagggctcctgtccaccagcacactcagttctcttccctgcagtgttttcattttattttagccaaacattttgcctgttttctgtttcaaacatgatagttgatatgagactgaaacccctgggttgtggagggaaattggctcagagatggacaacctggcaactgtgagtccctgcttcccgacaccagcctcatggaatatgcaacaactcctgtaccccagtccacggtgttctggcagcagggacacctgggccaatgggccatctggaccaaaggtggggtgtggggccctggatggcagctctggcccagacatgaatacctcgtgttcctcctccctctattactgtttcaccagagctgtcttagctcaaatctgttgtgtttctgagtctagggtctgtacacttgtttataataaatgcaatcgtttggagctgctgccccctttcttcctggcctcggctgctggaattggaatcaggctgtactctttccatccatttgggcttct

SEQ ID NO: 181218 - DNA, 7262 bp, Homo sapiens
  Payload ID: 15690
  Gene Symbol: SHISA6
  Gene Name: shisa family member 6
  Uniprot ID: Q6ZSJ9
  ENST ID: ENST00000409168
  CDS Start-End: 1-1503
atggcgctgcggcgcctcctgctgctgctgctgctctcgctggagtccctggacctgctgcccagcgtccacggagcccgcggccgcgccgccaaccggaccctgagtgcaggcggcgctgccgtcgggggccggagggccgggggcgccctggcacggggcggccgcgagctgaacggcaccgcccgggcgcccggaatcccggaggcgggaagccggcgggggcagcccgcggcggctgtggcggcggcggccagcgcggccgtcacctacgagacgtgctggggctactacgacgtgagcggccagtacgacaaggagttcgagtgtaacaacagcgagagcggctacctgtactgctgcggtacctgctactaccgcttctgctgcaagaagcgccacgagaagctggaccagcgccagtgcaccaactaccagagcccggtgtgggtacagacgcccagcaccaaggtggtgtcgccggggcccgagaacaagtacgacccggagaaggacaagaccaacttcaccgtctacatcacctgcggggtgatcgccttcgtcatcgtggccggcgtcttcgccaaggtctcctacgacaaggcccaccgccctccacgggagatgaacatccacagggctctggctgacatcttaagacaacagggaccaatccccatagcacactgtgaaagagaaactatctcggctatcgatacctctcccaaagagaacacgccggtcagatcgtcctccaaaaaccactacactcctgtgcgtacggccaagcagactccagagaagccacggatgaacaacatcctgacatcagccaccgagccctatgacctctccttctcccgctcgttccagaacttggcccacctgcccccatcctacgagtctgcagtaaagaccaaccccagcaagtattcatctctgaagaggctaaccgacaaggaggctgacgagtattacatgagacggcggcacctgcccgacctggctgcccgcggcaccctccccctcaatgtcatccagatgtcccaacagaagccgttgccaagggaacgaccccgccggcccatccgggccatgtcccaggacagggtcctgtccccggatcggggcctgccagatgagttcagcatgccctacgaccgcatcctgtccgacgagcagctgctctccacggagcgcctgcactcccaggacccgctgctgtccccggagcggacggcctttcccgagcagtcgctgtccagggccatctcgcacacggacgtctttgtgtccacacccgtgctggaccgctaccgcatgagcaagatgcactctcatcccagtgcctccaataactcatacgccaccctgggccagagccagacggcagccaagcgtcatgcctttgcctcacgcagacacaacacggtggagcagctgcactacatcccgggccaccacacctgctacacagccagcaagaccgaagtgaccgtgtgaccggcggggcagggccggggctgctgggcgtggcagagcagagcgggggccgggaggggccaggagcagagcttctagccttgccactctcccttcccttgtcccctctgtaggaagtgggggtgggccacctttgcccaaaaagccatacccccggggacacagccccgatggcctggtccaatacacttagacccaggaccaagagcaatcgctcttgctcctccagaagaatcagtggggagtgaggagggggctaggccccattctcacccccgaccaccttcaccaactccctttccgtcccgcgcctccttctccccatccgggggactcagctgcaggttctgtcagcagagagacccttgcttgactgtggtctgaagctgcctgggtttgaaggggccagcgggtccaatcagtgggctgaccggataggctactcggtctcattcattcatctagaaccgcatcacagaaatctcctagtgcctaaaaactgcctgctcgctctctcagagccagggagctgctgtgtccataagcacaataatgattcttttcttgcctgctggaactctctggtccccactgagtgacccttcctttgctgacccctgagggcccaaccctggccctgtgcccctcccctcaactccaggaccaggaggggttcccttccttcagctgcctccccattggtgggaactccacccccttccagctgactgcccgcccataaggaccctgggcctgtcctttcagcgggctgtgctccttccctggccctgaggatttcacccttgagttttctggggttttggctgtagccttcgcagaggggagtagcaatggggtgctggccctcccagacacccgatcatctccgcactccctccaggcctctagacctgaccatgactgccactcaggctgccttctccacccctgctctgctcccaggaggcacctgcggtggccagagagccagggtggggagggccactgtgatgtgcggggtctcgggctcaacattcgcatcctgcagggctccacctgttcccacatgcacctccggcaggacctagacagaagtttctagagagcagcttttcagcccccagacaaggaggatgagaggtggttgtcctgcatcctctccgctcatccttccttccccatctctgtctacctgctcagttcagagatcactcctactgcctgtgtccccttcccccacatcctccctgcaactttattcctcctagctgatccttcagatccgtgcctcctctggatcaaagggacaaagacctattagcaaaagcaaacaaaggtcctccaggcgactggcctaggggctaactgggcaggtccccacagcatcatccctttgtgcaggcactggggtacctggtagaccatggtcctcagctctgttgggggaccgccactgcccgcccacctcagcctcttccccgcctccagcctgggggttggcatggtgtgacggcctcctggggaggtgacagtgaattcagcagcatccgctcccccaagaccagagagcctggtgggggaaagaaggggttccctcattctcagggccagggcacccgctgggttggggctgggggaatcaactccaggctattgggtgaaggtgtgatcctaaaaacagtcagatccaacagcagtgcccttataaatggggttttacctgccctcagttctgcactcatggccctttaaaaaggcgagtgtagaaggagaatttattggtgtcagccctggagatttttaatctaaccaagtccacaaaccacagagaaagcaatggactgtgtcctttcactgatttcaagagttccaaagctctcatctccttctcccctctgcagggtgtgcctcccaacaggaacaggaaaccatcaccctggatcttagggggatggaggctgggggttgtgaaagccactgtcagaccccacactggggatgcattcctggagtcgtgcggctggaaggccagggactaccctctctgctttcctcccaacagacacataaaccttcttaagggctggtccccaggggtttataagagtttgttccagaaggtgaggctaagagggttggaaaggaagaagtgagtctgaatagagcaggtggctcccagctgggcccctgagcccagcacctttgaatcgtctaatctgtggccatcccttggaaggcaggatgctggtggtgaggggaaaggacctgagtggctgagaatgcccttcccaggtgtctacatgcaggtatacaccaaaccagaaagctgatcccatctccagtgtcaaagcttctcagcaccaagttctccagcccccagggtgacacttttccccaggggtcctccccaagccctgtctctgacagggtttctgtctctctcaggggttgttgatgagttgattccaagacatttctcatcccagccttaccactgtctggctgaaaggctctgatgtcagttgggttggaaaattctactgcaatgcttacttcttttcaaggatttcttctgcttcacctttgggtctagaagcaaggaatgaagggagggagagagggagggagggaggggaggagggaagaaaaaagaagtagagataggtctacagacttgctccaattcagtcccacatttcaaaatccagaaaactatgtcatagctgggacagagaggtatcccatttattcagctgtcccatccatcttcatggaacaagcaaagccacatcaataggcaagttcacgtagcagataaaagaggcttctggggctggaacctagatgccatgatttctagcccaaccaggctggtggcctctaccatacatagaagtaccatccacccttacagtaaaagcctccctcctgctcacaaaggaagcctaaagcccaagatttccctctccttgttttattcatttttgcacatctctgttgctctaacagaaatgaactggaatctgcacaggttctctcctgccctgaaagttctgcctggtttccttggcctctgatggcattgaagctttcacaatccctcctgcatctccaccttccctgtcttgctccaggctcctggctccatgccttcctgtgtcaaaaaggctttgccaagaattacttcacctcctaaccaggcttctgccctcagggctcccccagtgtcttgggagtgtcttgggccacacgactgcctcttagaaagttccaaccttgcccccaattcaaatttctcctcccctctttccactctccctcccagaaactcctgatttccagaaaacctcagatttccaggccaggtcactcattccttcctctcatctccctcttcctccatctaccttcctccattcaccttcctccattcctaatttcttttccctggtcttgctataatctccagctctaaaaatcagagctctcaatgaaaacaatggaagaataagacattctttcggtcttctgtttgcctcactggtgtatccttcatctcctgcccctgtgagttgataccccagtgcacggagccaagggcttttcccctctgagctctgggagggaagggaatggagctctgggtttgagatgtcatggcctgtgatagtcagtttggttcctgccactagcaagtcccctgaagctcccaacccagcctgatgttagcccagaagctcctgctctggccaaagactcctatccttgagggctctcagccactgctccaacacacttgcccccttcctgcttgtgtatgtcacttatcctcctttgtccacaaagacttgagggcctcctgagtctccaagcatggaggaatatccatgccaacatccctgccatcaaactcaatccattttcttcagagataccttgtctgtcaccagcctccaacttcatattccttccacaggcaactgtgcacttgacccaaggtaaaatgaaagggctgccaatcactcggactccagaaggtgcctgccctgagaagagctggcatgttacctcccacatacatttcctgtcatcctgtccgaatctgggaaattttgctctggagtattttcaagaaagcgcattgtgttttaatgaagtatttttcagggttccaatgttattttttataaatgcagcattttaatggcagattcaatatgaaggacatgtcttcctgggctctatatttgattttggaaggcagcatactctaggagaaaaaaagcatagggctgaggctctgaagacacagcttccagccctggctttgtctccgagggggagtcatgttccccactcagtgcctcagtttccccatctgtaaaatgaggggctttgactagatgagctctgaagtttcatccagctcttacactgtagggctttcattccctgccagcacctgctctccccgttcctccccacctccactgagctgcacacatcccacaatgcctgccccacagcgatgtcctcagatgtcctggacagccaccgcactcctcactagagcctggggtgggcctgatgggctcggccacccagggatgccctcgtacctgaagtttaagggcctaaccattcaataggtcaccaactgtgtgccatggaagccctcttgtaaagacacacctaaaccatcctaagtgactgtggaattctggggaattctgagtttggagtttccatttggatacggtccttatagctggagggaggcggttccaatttcagagagggagctggctggagagaaaggtctggaggttggcccataagggcatgaagtttgtacttgagggcagctgggaaattcatttcaagctgcagaggaacgtgttcacaggctgttgtgtggcaatgaatgtcatgataacccactctggaatatgtgtcctgaagaccaagtctggacactgaggctccattccaactggaggaggaggcatctccatctgggctgctaggaaggggcactcatcccatcctagtacctttgtagcccttcgtcatgacactaccgtcctcccggtgaaggcttgtgaagcaagaatggagagtccaagtttgtgatattcaaacccatcttgtaaatcagcaaacacattaaccttccatcagtcagagaaataatgttgtggctgtgtgtttccttaatgctctccctcctgagggaggagaagaccctgctcaactttgctgcccaccctgcagtgacccctgaatgccacaccatgggaggactcattcattggctttgtagtggcaaatattcctctagttctataactcaactagacattttgtagtaaagaattcttgaaattctctaataaaaagcaattcttactgtaatatttttagtttggggacacaatttcctaaggggggattaatgaacatttttatgcattagcccaatttatgaattccatgtttattatatggtagtactgatgaaaagtacctttctatctgtatctttgcagtttcttcgttactcatatgtaagcctcatggtaagcagtgctctagtaactgcttctctgtacaaatctcatcgttctacttacctgtcaaagcacattctacatgtactgtaaacagatacactttagtaagatttagtcttaaggatttttccacttttgtcagtaacagatatttatggattaaaaaataaagccgtttcaacataa

SEQ ID NO: 181219 - DNA, 7518 bp, Homo sapiens
  Payload ID: 15690
  Gene Symbol: SHISA6
  Gene Name: shisa family member 6
  Uniprot ID: Q6ZSJ9
  ENST ID: ENST00000432116
  CDS Start-End: 161-1759
cgccgccactgccgcccgcgcctcgatggcgccatcgccccggagccgctgaccgctcagcgcctccagcccggcccgcgcggcgggtcctccgagcccggcccgccgggggagcggcctgccgcggaagcctccccgcgccctcccgcccggccccgccatggcgctgcggcgcctcctgctgctgctgctgctctcgctggagtccctggacctgctgcccagcgtccacggagcccgcggccgcgccgccaaccggaccctgagtgcaggcggcgctgccgtcgggggccggagggccgggggcgccctggcacggggcggccgcgagctgaacggcaccgcccgggcgcccggaatcccggaggcgggaagccggcgggggcagcccgcggcggctgtggcggcggcggccagcgcggccgtcacctacgagacgtgctggggctactacgacgtgagcggccagtacgacaaggagttcgagtgtaacaacagcgagagcggctacctgtactgctgcggtacctgctactaccgcttctgctgcaagaagcgccacgagaagctggaccagcgccagtgcaccaactaccagagcccggtgtgggtacagacgcccagcaccaaggtggtgtcgccggggcccgagaacaagtacgacccggagaaggacaagaccaacttcaccgtctacatcacctgcggggtgatcgccttcgtcatcgtggccggcgtcttcgccaaggtctcctacgacaaggcccaccgccctccacgggagatgaacatccacagggctctggctgacatcttaagacaacagggaccaatccccatagcacactgtgaaagagaaactatctcggctatcgatacctctcccaaagagaacacgccggtcagatcgtcctccaaaaaccactacactcctgtgcgtacggccaagcagactccagggcattatgggaaggatgcttaccgaagtggaggacctgatctccataacttcatctcatctggatttgtcacattaggaagaggacacaccaaggagaagccacggatgaacaacatcctgacatcagccaccgagccctatgacctctccttctcccgctcgttccagaacttggcccacctgcccccatcctacgagtctgcagtaaagaccaaccccagcaagtattcatctctgaagaggctaaccgacaaggaggctgacgagtattacatgagacggcggcacctgcccgacctggctgcccgcggcaccctccccctcaatgtcatccagatgtcccaacagaagccgttgccaagggaacgaccccgccggcccatccgggccatgtcccaggacagggtcctgtccccggatcggggcctgccagatgagttcagcatgccctacgaccgcatcctgtccgacgagcagctgctctccacggagcgcctgcactcccaggacccgctgctgtccccggagcggacggcctttcccgagcagtcgctgtccagggccatctcgcacacggacgtctttgtgtccacacccgtgctggaccgctaccgcatgagcaagatgcactctcatcccagtgcctccaataactcatacgccaccctgggccagagccagacggcagccaagcgtcatgcctttgcctcacgcagacacaacacggtggagcagctgcactacatcccgggccaccacacctgctacacagccagcaagaccgaagtgaccgtgtgaccggcggggcagggccggggctgctgggcgtggcagagcagagcgggggccgggaggggccaggagcagagcttctagccttgccactctcccttcccttgtcccctctgtaggaagtgggggtgggccacctttgcccaaaaagccatacccccggggacacagccccgatggcctggtccaatacacttagacccaggaccaagagcaatcgctcttgctcctccagaagaatcagtggggagtgaggagggggctaggccccattctcacccccgaccaccttcaccaactccctttccgtcccgcgcctccttctccccatccgggggactcagctgcaggttctgtcagcagagagacccttgcttgactgtggtctgaagctgcctgggtttgaaggggccagcgggtccaatcagtgggctgaccggataggctactcggtctcattcattcatctagaaccgcatcacagaaatctcctagtgcctaaaaactgcctgctcgctctctcagagccagggagctgctgtgtccataagcacaataatgattcttttcttgcctgctggaactctctggtccccactgagtgacccttcctttgctgacccctgagggcccaaccctggccctgtgcccctcccctcaactccaggaccaggaggggttcccttccttcagctgcctccccattggtgggaactccacccccttccagctgactgcccgcccataaggaccctgggcctgtcctttcagcgggctgtgctccttccctggccctgaggatttcacccttgagttttctggggttttggctgtagccttcgcagaggggagtagcaatggggtgctggccctcccagacacccgatcatctccgcactccctccaggcctctagacctgaccatgactgccactcaggctgccttctccacccctgctctgctcccaggaggcacctgcggtggccagagagccagggtggggagggccactgtgatgtgcggggtctcgggctcaacattcgcatcctgcagggctccacctgttcccacatgcacctccggcaggacctagacagaagtttctagagagcagcttttcagcccccagacaaggaggatgagaggtggttgtcctgcatcctctccgctcatccttccttccccatctctgtctacctgctcagttcagagatcactcctactgcctgtgtccccttcccccacatcctccctgcaactttattcctcctagctgatccttcagatccgtgcctcctctggatcaaagggacaaagacctattagcaaaagcaaacaaaggtcctccaggcgactggcctaggggctaactgggcaggtccccacagcatcatccctttgtgcaggcactggggtacctggtagaccatggtcctcagctctgttgggggaccgccactgcccgcccacctcagcctcttccccgcctccagcctgggggttggcatggtgtgacggcctcctggggaggtgacagtgaattcagcagcatccgctcccccaagaccagagagcctggtgggggaaagaaggggttccctcattctcagggccagggcacccgctgggttggggctgggggaatcaactccaggctattgggtgaaggtgtgatcctaaaaacagtcagatccaacagcagtgcccttataaatggggttttacctgccctcagttctgcactcatggccctttaaaaaggcgagtgtagaaggagaatttattggtgtcagccctggagatttttaatctaaccaagtccacaaaccacagagaaagcaatggactgtgtcctttcactgatttcaagagttccaaagctctcatctccttctcccctctgcagggtgtgcctcccaacaggaacaggaaaccatcaccctggatcttagggggatggaggctgggggttgtgaaagccactgtcagaccccacactggggatgcattcctggagtcgtgcggctggaaggccagggactaccctctctgctttcctcccaacagacacataaaccttcttaagggctggtccccaggggtttataagagtttgttccagaaggtgaggctaagagggttggaaaggaagaagtgagtctgaatagagcaggtggctcccagctgggcccctgagcccagcacctttgaatcgtctaatctgtggccatcccttggaaggcaggatgctggtggtgaggggaaaggacctgagtggctgagaatgcccttcccaggtgtctacatgcaggtatacaccaaaccagaaagctgatcccatctccagtgtcaaagcttctcagcaccaagttctccagcccccagggtgacacttttccccaggggtcctccccaagccctgtctctgacagggtttctgtctctctcaggggttgttgatgagttgattccaagacatttctcatcccagccttaccactgtctggctgaaaggctctgatgtcagttgggttggaaaattctactgcaatgcttacttcttttcaaggatttcttctgcttcacctttgggtctagaagcaaggaatgaagggagggagagagggagggagggaggggaggagggaagaaaaaagaagtagagataggtctacagacttgctccaattcagtcccacatttcaaaatccagaaaactatgtcatagctgggacagagaggtatcccatttattcagctgtcccatccatcttcatggaacaagcaaagccacatcaataggcaagttcacgtagcagataaaagaggcttctggggctggaacctagatgccatgatttctagcccaaccaggctggtggcctctaccatacatagaagtaccatccacccttacagtaaaagcctccctcctgctcacaaaggaagcctaaagcccaagatttccctctccttgttttattcatttttgcacatctctgttgctctaacagaaatgaactggaatctgcacaggttctctcctgccctgaaagttctgcctggtttccttggcctctgatggcattgaagctttcacaatccctcctgcatctccaccttccctgtcttgctccaggctcctggctccatgccttcctgtgtcaaaaaggctttgccaagaattacttcacctcctaaccaggcttctgccctcagggctcccccagtgtcttgggagtgtcttgggccacacgactgcctcttagaaagttccaaccttgcccccaattcaaatttctcctcccctctttccactctccctcccagaaactcctgatttccagaaaacctcagatttccaggccaggtcactcattccttcctctcatctccctcttcctccatctaccttcctccattcaccttcctccattcctaatttcttttccctggtcttgctataatctccagctctaaaaatcagagctctcaatgaaaacaatggaagaataagacattctttcggtcttctgtttgcctcactggtgtatccttcatctcctgcccctgtgagttgataccccagtgcacggagccaagggcttttcccctctgagctctgggagggaagggaatggagctctgggtttgagatgtcatggcctgtgatagtcagtttggttcctgccactagcaagtcccctgaagctcccaacccagcctgatgttagcccagaagctcctgctctggccaaagactcctatccttgagggctctcagccactgctccaacacacttgcccccttcctgcttgtgtatgtcacttatcctcctttgtccacaaagacttgagggcctcctgagtctccaagcatggaggaatatccatgccaacatccctgccatcaaactcaatccattttcttcagagataccttgtctgtcaccagcctccaacttcatattccttccacaggcaactgtgcacttgacccaaggtaaaatgaaagggctgccaatcactcggactccagaaggtgcctgccctgagaagagctggcatgttacctcccacatacatttcctgtcatcctgtccgaatctgggaaattttgctctggagtattttcaagaaagcgcattgtgttttaatgaagtatttttcagggttccaatgttattttttataaatgcagcattttaatggcagattcaatatgaaggacatgtcttcctgggctctatatttgattttggaaggcagcatactctaggagaaaaaaagcatagggctgaggctctgaagacacagcttccagccctggctttgtctccgagggggagtcatgttccccactcagtgcctcagtttccccatctgtaaaatgaggggctttgactagatgagctctgaagtttcatccagctcttacactgtagggctttcattccctgccagcacctgctctccccgttcctccccacctccactgagctgcacacatcccacaatgcctgccccacagcgatgtcctcagatgtcctggacagccaccgcactcctcactagagcctggggtgggcctgatgggctcggccacccagggatgccctcgtacctgaagtttaagggcctaaccattcaataggtcaccaactgtgtgccatggaagccctcttgtaaagacacacctaaaccatcctaagtgactgtggaattctggggaattctgagtttggagtttccatttggatacggtccttatagctggagggaggcggttccaatttcagagagggagctggctggagagaaaggtctggaggttggcccataagggcatgaagtttgtacttgagggcagctgggaaattcatttcaagctgcagaggaacgtgttcacaggctgttgtgtggcaatgaatgtcatgataacccactctggaatatgtgtcctgaagaccaagtctggacactgaggctccattccaactggaggaggaggcatctccatctgggctgctaggaaggggcactcatcccatcctagtacctttgtagcccttcgtcatgacactaccgtcctcccggtgaaggcttgtgaagcaagaatggagagtccaagtttgtgatattcaaacccatcttgtaaatcagcaaacacattaaccttccatcagtcagagaaataatgttgtggctgtgtgtttccttaatgctctccctcctgagggaggagaagaccctgctcaactttgctgcccaccctgcagtgacccctgaatgccacaccatgggaggactcattcattggctttgtagtggcaaatattcctctagttctataactcaactagacattttgtagtaaagaattcttgaaattctctaataaaaagcaattcttactgtaatatttttagtttggggacacaatttcctaaggggggattaatgaacatttttatgcattagcccaatttatgaattccatgtttattatatggtagtactgatgaaaagtacctttctatctgtatctttgcagtttcttcgttactcatatgtaagcctcatggtaagcagtgctctagtaactgcttctctgtacaaatctcatcgttctacttacctgtcaaagcacattctacatgtactgtaaacagatacactttagtaagatttagtcttaaggatttttccacttttgtcagtaacagatatttatggattaaaaaataaagccgtttcaacataa

SEQ ID NO: 181220 - DNA, 7575 bp, Homo sapiens
  Payload ID: 15690
  Gene Symbol: SHISA6
  Gene Name: shisa family member 6
  Uniprot ID: Q6ZSJ9
  ENST ID: ENST00000441885
  CDS Start-End: 161-1816
cgccgccactgccgcccgcgcctcgatggcgccatcgccccggagccgctgaccgctcagcgcctccagcccggcccgcgcggcgggtcctccgagcccggcccgccgggggagcggcctgccgcggaagcctccccgcgccctcccgcccggccccgccatggcgctgcggcgcctcctgctgctgctgctgctctcgctggagtccctggacctgctgcccagcgtccacggagcccgcggccgcgccgccaaccggaccctgagtgcaggcggcgctgccgtcgggggccggagggccgggggcgccctggcacggggcggccgcgagctgaacggcaccgcccgggcgcccggaatcccggaggcgggaagccggcgggggcagcccgcggcggctgtggcggcggcggccagcgcggccgtcacctacgagacgtgctggggctactacgacgtgagcggccagtacgacaaggagttcgagtgtaacaacagcgagagcggctacctgtactgctgcggtacctgctactaccgcttctgctgcaagaagcgccacgagaagctggaccagcgccagtgcaccaactaccagagcccggtgtgggtacagacgcccagcaccaaggtggtgtcgccggggcccgagaacaagtacgacccggagaaggacaagaccaacttcaccgtctacatcacctgcggggtgatcgccttcgtcatcgtggccggcgtcttcgccaaggtctcctacgacaaggcccaccgccctccacgggagatgaacatccacagggctctggctgacatcttaagacaacagggaccaatccccatagcacactgtgaaagagaaactatctcggctatcgatacctctcccaaagagaacacgccggtcagatcgtcctccaaaaaccactacactcctgtgcgtacggccaagcagactccagggcattatgggaaggatgcttaccgaagtggaggacctgatctccataacttcatctcatctggatttgtcacattaggaagaggacacaccaagggtgatcatcaatataaccatccgattttgagcagtgttacccagatcccgccacatgagaagccacggatgaacaacatcctgacatcagccaccgagccctatgacctctccttctcccgctcgttccagaacttggcccacctgcccccatcctacgagtctgcagtaaagaccaaccccagcaagtattcatctctgaagaggctaaccgacaaggaggctgacgagtattacatgagacggcggcacctgcccgacctggctgcccgcggcaccctccccctcaatgtcatccagatgtcccaacagaagccgttgccaagggaacgaccccgccggcccatccgggccatgtcccaggacagggtcctgtccccggatcggggcctgccagatgagttcagcatgccctacgaccgcatcctgtccgacgagcagctgctctccacggagcgcctgcactcccaggacccgctgctgtccccggagcggacggcctttcccgagcagtcgctgtccagggccatctcgcacacggacgtctttgtgtccacacccgtgctggaccgctaccgcatgagcaagatgcactctcatcccagtgcctccaataactcatacgccaccctgggccagagccagacggcagccaagcgtcatgcctttgcctcacgcagacacaacacggtggagcagctgcactacatcccgggccaccacacctgctacacagccagcaagaccgaagtgaccgtgtgaccggcggggcagggccggggctgctgggcgtggcagagcagagcgggggccgggaggggccaggagcagagcttctagccttgccactctcccttcccttgtcccctctgtaggaagtgggggtgggccacctttgcccaaaaagccatacccccggggacacagccccgatggcctggtccaatacacttagacccaggaccaagagcaatcgctcttgctcctccagaagaatcagtggggagtgaggagggggctaggccccattctcacccccgaccaccttcaccaactccctttccgtcccgcgcctccttctccccatccgggggactcagctgcaggttctgtcagcagagagacccttgcttgactgtggtctgaagctgcctgggtttgaaggggccagcgggtccaatcagtgggctgaccggataggctactcggtctcattcattcatctagaaccgcatcacagaaatctcctagtgcctaaaaactgcctgctcgctctctcagagccagggagctgctgtgtccataagcacaataatgattcttttcttgcctgctggaactctctggtccccactgagtgacccttcctttgctgacccctgagggcccaaccctggccctgtgcccctcccctcaactccaggaccaggaggggttcccttccttcagctgcctccccattggtgggaactccacccccttccagctgactgcccgcccataaggaccctgggcctgtcctttcagcgggctgtgctccttccctggccctgaggatttcacccttgagttttctggggttttggctgtagccttcgcagaggggagtagcaatggggtgctggccctcccagacacccgatcatctccgcactccctccaggcctctagacctgaccatgactgccactcaggctgccttctccacccctgctctgctcccaggaggcacctgcggtggccagagagccagggtggggagggccactgtgatgtgcggggtctcgggctcaacattcgcatcctgcagggctccacctgttcccacatgcacctccggcaggacctagacagaagtttctagagagcagcttttcagcccccagacaaggaggatgagaggtggttgtcctgcatcctctccgctcatccttccttccccatctctgtctacctgctcagttcagagatcactcctactgcctgtgtccccttcccccacatcctccctgcaactttattcctcctagctgatccttcagatccgtgcctcctctggatcaaagggacaaagacctattagcaaaagcaaacaaaggtcctccaggcgactggcctaggggctaactgggcaggtccccacagcatcatccctttgtgcaggcactggggtacctggtagaccatggtcctcagctctgttgggggaccgccactgcccgcccacctcagcctcttccccgcctccagcctgggggttggcatggtgtgacggcctcctggggaggtgacagtgaattcagcagcatccgctcccccaagaccagagagcctggtgggggaaagaaggggttccctcattctcagggccagggcacccgctgggttggggctgggggaatcaactccaggctattgggtgaaggtgtgatcctaaaaacagtcagatccaacagcagtgcccttataaatggggttttacctgccctcagttctgcactcatggccctttaaaaaggcgagtgtagaaggagaatttattggtgtcagccctggagatttttaatctaaccaagtccacaaaccacagagaaagcaatggactgtgtcctttcactgatttcaagagttccaaagctctcatctccttctcccctctgcagggtgtgcctcccaacaggaacaggaaaccatcaccctggatcttagggggatggaggctgggggttgtgaaagccactgtcagaccccacactggggatgcattcctggagtcgtgcggctggaaggccagggactaccctctctgctttcctcccaacagacacataaaccttcttaagggctggtccccaggggtttataagagtttgttccagaaggtgaggctaagagggttggaaaggaagaagtgagtctgaatagagcaggtggctcccagctgggcccctgagcccagcacctttgaatcgtctaatctgtggccatcccttggaaggcaggatgctggtggtgaggggaaaggacctgagtggctgagaatgcccttcccaggtgtctacatgcaggtatacaccaaaccagaaagctgatcccatctccagtgtcaaagcttctcagcaccaagttctccagcccccagggtgacacttttccccaggggtcctccccaagccctgtctctgacagggtttctgtctctctcaggggttgttgatgagttgattccaagacatttctcatcccagccttaccactgtctggctgaaaggctctgatgtcagttgggttggaaaattctactgcaatgcttacttcttttcaaggatttcttctgcttcacctttgggtctagaagcaaggaatgaagggagggagagagggagggagggaggggaggagggaagaaaaaagaagtagagataggtctacagacttgctccaattcagtcccacatttcaaaatccagaaaactatgtcatagctgggacagagaggtatcccatttattcagctgtcccatccatcttcatggaacaagcaaagccacatcaataggcaagttcacgtagcagataaaagaggcttctggggctggaacctagatgccatgatttctagcccaaccaggctggtggcctctaccatacatagaagtaccatccacccttacagtaaaagcctccctcctgctcacaaaggaagcctaaagcccaagatttccctctccttgttttattcatttttgcacatctctgttgctctaacagaaatgaactggaatctgcacaggttctctcctgccctgaaagttctgcctggtttccttggcctctgatggcattgaagctttcacaatccctcctgcatctccaccttccctgtcttgctccaggctcctggctccatgccttcctgtgtcaaaaaggctttgccaagaattacttcacctcctaaccaggcttctgccctcagggctcccccagtgtcttgggagtgtcttgggccacacgactgcctcttagaaagttccaaccttgcccccaattcaaatttctcctcccctctttccactctccctcccagaaactcctgatttccagaaaacctcagatttccaggccaggtcactcattccttcctctcatctccctcttcctccatctaccttcctccattcaccttcctccattcctaatttcttttccctggtcttgctataatctccagctctaaaaatcagagctctcaatgaaaacaatggaagaataagacattctttcggtcttctgtttgcctcactggtgtatccttcatctcctgcccctgtgagttgataccccagtgcacggagccaagggcttttcccctctgagctctgggagggaagggaatggagctctgggtttgagatgtcatggcctgtgatagtcagtttggttcctgccactagcaagtcccctgaagctcccaacccagcctgatgttagcccagaagctcctgctctggccaaagactcctatccttgagggctctcagccactgctccaacacacttgcccccttcctgcttgtgtatgtcacttatcctcctttgtccacaaagacttgagggcctcctgagtctccaagcatggaggaatatccatgccaacatccctgccatcaaactcaatccattttcttcagagataccttgtctgtcaccagcctccaacttcatattccttccacaggcaactgtgcacttgacccaaggtaaaatgaaagggctgccaatcactcggactccagaaggtgcctgccctgagaagagctggcatgttacctcccacatacatttcctgtcatcctgtccgaatctgggaaattttgctctggagtattttcaagaaagcgcattgtgttttaatgaagtatttttcagggttccaatgttattttttataaatgcagcattttaatggcagattcaatatgaaggacatgtcttcctgggctctatatttgattttggaaggcagcatactctaggagaaaaaaagcatagggctgaggctctgaagacacagcttccagccctggctttgtctccgagggggagtcatgttccccactcagtgcctcagtttccccatctgtaaaatgaggggctttgactagatgagctctgaagtttcatccagctcttacactgtagggctttcattccctgccagcacctgctctccccgttcctccccacctccactgagctgcacacatcccacaatgcctgccccacagcgatgtcctcagatgtcctggacagccaccgcactcctcactagagcctggggtgggcctgatgggctcggccacccagggatgccctcgtacctgaagtttaagggcctaaccattcaataggtcaccaactgtgtgccatggaagccctcttgtaaagacacacctaaaccatcctaagtgactgtggaattctggggaattctgagtttggagtttccatttggatacggtccttatagctggagggaggcggttccaatttcagagagggagctggctggagagaaaggtctggaggttggcccataagggcatgaagtttgtacttgagggcagctgggaaattcatttcaagctgcagaggaacgtgttcacaggctgttgtgtggcaatgaatgtcatgataacccactctggaatatgtgtcctgaagaccaagtctggacactgaggctccattccaactggaggaggaggcatctccatctgggctgctaggaaggggcactcatcccatcctagtacctttgtagcccttcgtcatgacactaccgtcctcccggtgaaggcttgtgaagcaagaatggagagtccaagtttgtgatattcaaacccatcttgtaaatcagcaaacacattaaccttccatcagtcagagaaataatgttgtggctgtgtgtttccttaatgctctccctcctgagggaggagaagaccctgctcaactttgctgcccaccctgcagtgacccctgaatgccacaccatgggaggactcattcattggctttgtagtggcaaatattcctctagttctataactcaactagacattttgtagtaaagaattcttgaaattctctaataaaaagcaattcttactgtaatatttttagtttggggacacaatttcctaaggggggattaatgaacatttttatgcattagcccaatttatgaattccatgtttattatatggtagtactgatgaaaagtacctttctatctgtatctttgcagtttcttcgttactcatatgtaagcctcatggtaagcagtgctctagtaactgcttctctgtacaaatctcatcgttctacttacctgtcaaagcacattctacatgtactgtaaacagatacactttagtaagatttagtcttaaggatttttccacttttgtcagtaacagatatttatggattaaaaaataaagccgtttcaacataa

SEQ ID NO: 181221 - DNA, 1329 bp, Homo sapiens
  Payload ID: 15690
  Gene Symbol: SHISA6
  Gene Name: shisa family member 6
  ENST ID: ENST00000343478
  CDS Start-End: 1-403
gaccaacttcaccgtctacatcacctgcggggtgatcgccttcgtcatcgtggccggcgtcttcgccaaggtctcctacgacaaggcccaccgccctccacgggagatgaacatccacagggctctggctgacatcttaagacaacagggaccaatccccatagcacactgtgaaagagaaactatctcggctatcgatacctctcccaaagagaacacgccggtcagatcgtcctccaaaaaccactacactcctgtgcgtacggccaagcagactccagggcattatgggaaggatgcttaccgaagtggaggacctgatctccataacttcatctcatctggatttgtcacattaggaagaggacacaccaagggtacagtggaaaccattttttactaaaatacagaggttgcctagggaacgccatctgaaatgagaagatggtgtggaggccagaggcttgtctgggacaggaataagtggggtggttccatggcagcttgtcctggtgacatgcgtggcttctgacaggagttactggaggtcacaggtgtgactttagagggcgatagacttccaagagacacccatcccactccacccatggcggggacacagatgccggcggctccttgtgggaagggaccacagggagtgtggtggaaaactgccggtggatgtagcagcatttgcaatgtgtgtgttcgcctcttggctattattccttttccttttgaaagctacattttataaaccaatgtcaatgttctgtactgtggtatctaagccggtgtgcatgtggagagtttcagcatcctaagtgtgtctccataaacactctatgatgtggacacaaaggtagaaggttatgcagaccttcaagcctcaagatgaaagctaacctagagtttctgctgagctgctttacaacctagctgacagcttgcagagcatctgtgcagggggcatggactcctcctcaattctgtcttttgtttaaacaaggtcctacgagtgttgtgagcattctgtcacatcaagagtcactggatccctaactcctttaattaccgtcccaacacctgtgtgctgttatagatcaaatgtgaattctgttgtaggggtagtgtatccctgtcttcccctgagatacgtgtcttgtgtgagtaaacaaggaactgtgcaatattttcttacattccatgcacctactttttaaattccttatgtgatgtttgttcatcctatagagaaaaaaaaatctgtatctgtgtatgtattttctgttgtgtctatttgtgtctaaataaagtttatcgaggata

SEQ ID NO: 181222 - DNA, 6033 bp, Homo sapiens
  Payload ID: 15691
  Gene Symbol: SHISA7
  Gene Name: shisa family member 7
  Uniprot ID: A6NL88
  ENST ID: ENST00000376325
  CDS Start-End: 1-1617
atgccggccctcctgctcctcgtactcctggcctctagcgccggccaggccagggcgcgcccgtccaacgccacgagcgccgagcccgcgggcccgctgcccgccctgctggcgcacctgcggcgcctgaccggggcgctgacgggcggcgggggcgcggcgagcccaggcgccaacggcaccaggaccggccccgcgggcggggcgggcgcggcggcccgggcgccccctcccgccgagctctgccacggctactacgatgtcatgggccagtacgacgccaccttcaactgcagcaccggctcctaccgcttctgctgtggcacctgccactaccgcttctgctgtgagcaccgtcacatgcgcctggcgcaggcctcctgctccaactacgacacgccgcgctgggccaccacgccgccgccgctagctgggggcgccgggggcgctgggggtgcgggcggggggccagggcccggccaggccgggtggttggaagggggccggactgggggtgccgggggccgcgggggcgagggccccgggggcagcacagcctacgtcgtgtgcggggtcatcagcttcgccctggccgtgggcgtcggcgccaaagtggccttcagcaaggcgtcccgtgcgccccgggcgcaccgggatatcaacgtgcccagagctctggtggacattctgagacatcaggcggggcctgggacccgcccggaccgggcccgaagcagctccctgaccccggggatcggcggtcccgacagcatgccccccaggacgcccaagaacctctacaacaccgtgaagacccccaacctcgactggcgagccttgccgccgcccagcccctccttgcactactccacgctgtcctgctctcggtccttccacaacctctcgcatctgcccccgtcctacgaggctgccgtgaaatccgagctgaaccgctactcttccctcaagaggctggccgagaaggatctggacgaggcctacctgaagcgccggcccctggaattgccccgcggcacgctgcccctgcacgcgctgcggcggccgggcacggggggcggctatcgcatggaggcctggggcggcccagaggagctgggcctggcgcccgcgcccaacccccggcgggtcatgtcccaggagcacctgctgggcgatggtggccgttcgcgctacgagttcacgctgccgcgcgcgcgcctggtgtcgcaggagcacctgctgctgtcctcgcccgaggccctgcgccagagtcgcgagcacctgctgtcgcccccgcgcagccccgcgctgccccccgaccccaccgcccgggccagcctggccgcctcgcactccaacctgctgctggggcccggggggcccccaacaccgctgcgcgggctgccgccaccgtccagcctgcacgcccaccaccaccacgccctgcacggctcgccgcagccggcctggatgtccgacgccggcgggggcgggggcacactggcccgcaggccgcccttccagcgccagggcacgctggagcagctgcagttcatcccgggccaccacctgccccagcacctgcgcacggccagcaagaacgaggtgactgtctgaggccagggccgggtctggggggctgcggcctcccgggccccccgtcccagcctggatcccccgacacaggcgcacacatgccaggggcctggggcccagatcggcccttggacaggagtgaaagcctccttctgggatgtcctggcagacaagattcctcctcctattacttcactgcttgagccaaggcctccttcccatgatgtcatcccagaggaagaggccggctcatgaggtcatcactagcaaaaatgtctgtgttctgtgatgtcatcacagggacaaagcctcgttcccatgaggtcatcacagaggaagaggccggcccgtgaggtcagcgctggaggccatgtccatgttctatggtgtcctcagaggcttccttcttgtggtataataacagagacgacgccttgttccatgacattccttcctgtggtgtcactgcagagacaatctcacctggatgatgtcatctctaactccaaggcctcttttggcatcatcgccatggggaagatattttctccctgtgtctttgcagcagagaagatgcctctgtcctatgatgtcatcattacagacaaagccatcttcctgggacacgtcgcaggggaaaatgcctcaccgattgtgtcctcactagacataaggtccccttttcacaacatcatcacagggaccctgcctccttcctgtgatgccatcaccagagaaggtgccttgccctatgacgtcatcagagggaccgtgcctcttcctgtgatgtcatcaccagagatgaccacccactctgggacctctccaggaggaggtcccttctgtgatgtcgcccagatgctatgtgctctgagatggcacaaagagatgcctccactgctgccaccatgttgtagaaggcagggcaggcccagagtccaggaccaccccagggaagatgccagagagcagagaggggccctgtcctgagatgttgtctgaaggaagcatcgctggggagccgcccatgtggagggcctcctccagagatgatggtctgtgtaggctgttggcagtgacacccctacccccaatgctgtgatggcatcaccagagcttcctcctcagaggcactgcccactctggaaggccatcggtattggtggtgtcaccagagttactgccttgtcccaccatgacttagcttggttgctccctccccagactccagggacatgtccagcaggatctctgccagaccctctgaggggaaatggggccttggatcccacatctgtgccatgactcctgggagacaggacctccagatggccttctgctcccaggaggccactctggatcaccaggatcctggagttctggcactcataggtgtcccatagcctggcctcacttttctttctgccatatctagagacaatcacctctgtcaacaaagtcctagccttctactggggggaggtgcttggggtacacctactcttgccctcactgacactgtcagcatcacacaacacccgccactcatgatggcaccacacccggggtcaagtgttacccatgtctgaggatggaatccttccccaggattacctatgacccacaactatggtatcatcttcttccaggatttaccatgactaatggtgtcaccatctgccaagactccccatagccaatggtgtcaccatcctccatgattcctcacaaccatggtgtcatcatctttcaggagccaccacagctgacggtgtcatcatctcctagattccaccatgaccagtgatgacattaccttccagaatccactacacctgacagagacatcctctactgaaatccactaggactgatgattccaccatttcccataatccctcatgattttggtgtcatcacctcccaagacccatgatgcccaatagtgtcatcatcatttgcagggatgcatggtgtcatcatctccagggatccacttcaaccatgtgccaccacctcccaggatttcattcaaacatgtgccactacctcccagtatccacttcaactatggtgttatcacctgccaggatccacgagagccaatgctgtcaccatccactaggatccaccataaccctggtgtcatcatctcctgtgatccatgaggtccagtgctgtcaccatccactaggatccaccatgaccctggtgtcatcatctcctgtgatccatgaggtccagtgctgtcaccatccactaggatccaccataaccctggtgtcatcatctcccaggatccatgaggtccagtgctgtctgtcaccatccactagtatccaccataaccctggtgtcatcttctcccaggatccatgaggtccagtgctgtcaccatccactaggatccgccataaccctggtgtcatcatccgtgatccatgaggtccagtgctgtcaccatccactaggatccaccataaccctggtgtcatcatctcccaggatccatgaggtccagtgttgtcaccatctactaggatccaccatgaccctggtgttatcatctcccaggatccatgaggtccagtgttgtcaccatctattaggatccaccatgaccctggtgttatcatctcccaggatccatgaggtccagtgctgtcaccacccactaggatccaccataaccctggtgtcatcccagagtccactgcaaccatgtgccatcatcccccaagagccatcatcttaggagccaagtaccgtgacgggctgtatttcagttgtcctctggggccgcatggtacttacagttgttcacttaaggggaaccagcacaacaggccatattcccgtttccactaaaaggacaggggtggggccagctgtccccctctgaagacttcacccctactctggccctccttatgtcactgcctcactcctgaccgaggatgatgcctgcatcaatcccaccacagatgtggcctcagccaacctcaccttaccccccggtgaggcacccaggcccctcctgacagcagcgctgtccctcacccagccatctgattggtgacagggtcaacccagcaacctctcattatcaccagagaggaagcatttcaaccctcaggtgacgccactgccccctgcccaatccctgtcacttgggcccctaccaggatcagcactccactggccccggccaaattctcctcagagatccctgacccccgcgggataggtcaaagctggtgaccgactggggccttcagtgctgtcttctgctggcctcatcctgcagcagggacactggagagcaatggtccctgccagcacatctgcgggaccaggggtgctccttcacctccctccctaacaccttaacacccggggagcctccgggggtggcaggaagtccccagcacccaatgcacaatcttccctcaattctctttgtacatagccatgttgcgggggcggccattcccccactcttaaagggctacacgcccctcccccagcccctagggcgaggtggggggggcctcttcttcctcccctgggccgtccccctccctcttatgtctccccgcaaacactggcacctcacactccttcttgtcaggagcttggggcagacaactggcccttggttcccaccacactgaggaaatgggggttacccaaatccacctgggccctggtgccagtttttcaaccccacggcttctagctgctctgaggggctcctcccatcccttccagggcctccccagccccgcactgctcaggccaactgtgacttccccagaaaggagccagcttgagcacccaccccctcccagccccctcccctctgctcaacacctccgcggaacactcagctttctccagctgccgggatttgggggtctgggcctttcagcttttttatcccccctccactagctctagcccagcctggattccagggatcccacccctagccctgtccctattcagttggcacaggctgcctgaccctggggccttgatttgatctcaaataagccatagaggagagaggtcttgaggggtgggagcaggtgtgtactgacaattcccctccacatgtcttgagctgggacctcgtcatctgagacttccccatgccccaacaaatgcaaatgcacacaaacccatgcatacacaagcacacacacacaggcatctccccgtctggttgggggagcatgggagggggcacttcacagggagaagataaatagttccacacctgaagaccctccaacagcttctgcctccctcctcatcacttcctctctccaccccctctccaacactggccccttcccctaattaattccctggtgaggacagccagaggagctgcgacttggtattttttggaataaatagacattttcctga

SEQ ID NO: 181223 - DNA, 2321 bp, Homo sapiens
  Payload ID: 15691
  Gene Symbol: SHISA7
  Gene Name: shisa family member 7
  ENST ID: ENST00000416792
  CDS Start-End: 1-461
gcgggggcgagggccccgggggcagcacagcctacgtcgtgtgcggggtcatcagcttcgccctggccgtgggcgtcggcgccaaagtggccttcagcaaggcgtcccgtgcgccccgggcgcaccgggatatcaacgtgcccagagctctggtggacattctgagacatcaggcggggcctgggacccgcccggaccgggcccgaagcagctccctgaccccggggatcggcggtcccgacagcatgccccccaggacgcccaagaacctctacaacaccgtgaagacccccaacctcgctacctgcacctcaacgtcaacagccccaagcaccacgccgccacactggactggcgagccttgccgccgcccagcccctccttgcactactccacgctgtcctgctctcggtccttccacaacctctcgcatctgcccccgtcctacgaggctgccgtgaaatccgagctgaaccgctactcttccctcaagaggctggccgagaaggatctggacgaggcctacctgaagcgccggcccctggaattgccccgcggcacgctgcccctgcacgcgctgcggcggccgggcacggggggcggctatcgcatggaggcctggggcggcccagaggagctgggcctggcgcccgcgcccaacccccggcgggtcatgtcccaggagcacctgctgggcgatggtggccgttcgcgctacgagttcacgctgccgcgcgcgcgcctggtgtcgcaggagcacctgctgctgtcctcgcccgaggccctgcgccagagtcgcgagcacctgctgtcgcccccgcgcagccccgcgctgccccccgaccccaccgcccgggccagcctggccgcctcgcactccaacctgctgctggggcccggggggcccccaacaccgctgcgcgggctgccgccaccgtccagcctgcacgcccaccaccaccacgccctgcacggctcgccgcagccggcctggatgtccgacgccggcgggggcgggggcacactggcccgcaggccgcccttccagcgccagggcacgctggagcagctgcagttcatcccgggccaccacctgccccagcacctgcgcacggccagcaagaacgaggtgactgtctgaggccagggccgggtctggggggctgcggcctcccgggccccccgtcccagcctggatcccccgacacaggcgcacacatgccaggggcctggggcccagatcggcccttggacaggagtgaaagcctccttctgggatgtcctggcagacaagattcctcctcctattacttcactgcttgagccaaggcctccttcccatgatgtcatcccagaggaagaggccggctcatgaggtcatcactagcaaaaatgtctgtgttctgtgatgtcatcacagggacaaagcctcgttcccatgaggtcatcacagaggaagaggccggcccgtgaggtcagcgctggaggccatgtccatgttctatggtgtcctcagaggcttccttcttgtggtataataacagagacgacgccttgttccatgacattccttcctgtggtgtcactgcagagacaatctcacctggatgatgtcatctctaactccaaggcctcttttggcatcatcgccatggggaagatattttctccctgtgtctttgcagcagagaagatgcctctgtcctatgatgtcatcattacagacaaagccatcttcctgggacacgtcgcaggggaaaatgcctcaccgattgtgtcctcactagacataaggtccccttttcacaacatcatcacagggaccctgcctccttcctgtgatgccatcaccagagaaggtgccttgccctatgacgtcatcagagggaccgtgcctcttcctgtgatgtcatcaccagagatgaccacccactctgggacctctccaggaggaggtcccttctgtgatgtcgcccagatgctatgtgctctgagatggcacaaagagatgcctccactgctgccaccatgttgtagaaggcagggcaggcccagagtccaggaccaccccagggaagatgccagagagcagagaggggccctgtcctgagatgttgtctgaaggaagcatcgctggggagccgcccatgtggagggcctcctccagagatgatggtctgtgtaggctgttggcagtgacacccctacccccaatgctgtgatggcatcaccagagcttcctcctcagaggcactgcccactctggaaggccatcggtattggtggtgtcaccagagttactgccttgtcccaccatgact

SEQ ID NO: 181224 - DNA, 486 bp, Homo sapiens
  Payload ID: 15692
  Gene Symbol: SHISA8
  Gene Name: shisa family member 8
  Uniprot ID: B8ZZ34
  ENST ID: ENST00000457093
  CDS Start-End: 1-486
gtcgggccgcgcgggagcccccgaggcgcagggtcccgcggcgcccggcacgacagccccggaggggggcgaccgctgccgcggctactacgacgtgatgggccagtgggacccgcccttcaactgcagctccggagcctacagcttctgctgcggcacgtgcggctaccgcttctgctgccacgacgggccgcggcgcctcgaccagagccgctgttccaactacgacacgccggcctgggtccagacaggccggccgcccgcccgcgcccgcgacaccgcagcgccccgggaccccggccgcgagcgcagccatacggccgtctacgctgtgtgcggcgtcgcagcgctgctggtgctggccggcatcggggcgcgcctgggactggagagggcgcacagcccgcgcgcgcggcgcacagtgaccagggcgctgacagagcttctgaagcagccgggcccccaggagccactgcctcccaccct

SEQ ID NO: 181225 - DNA, 1405 bp, Homo sapiens
  Payload ID: 15692
  Gene Symbol: SHISA8
  Gene Name: shisa family member 8
  ENST ID: ENST00000621082
  CDS Start-End: 1-1194
atggcgcgggccggggcgcggggactgctcggcggccgccgtcctcccggcctccggctcgcgctcgcgcttcggctcgcgttgctgctggcgcggccgccgtcgggccgcgcgggagcccccgaggcgcagggtcccgcggcgcccggcacgacagccccggaggggggcgaccgctgccgcggctactacgacgtgatgggccagtgggacccgcccttcaactgcagctccggagcctacagcttctgctgcggcacgtgcggctaccgcttctgctgccacgacgggccgcggcgcctcgaccagagccgctgttccaactacgacacgccggcctgggtccagacaggccggccgcccgcccgcgcccgcgacaccgcagcgccccgggaccccggccgcgagcgcagccatacggccgtctacgctgtgtgcggcgtcgcagcgctgctggtgctggccggcatcggggcgcgcctgggactggagagggcgcacagcccgcgcgcgcggcgcacagtgaccagggcgctgacagagcttctgaagcagccgggcccccaggagccactgcctcccaccctgggcccacccctgggtggctgtgtccaggtgcagatgggggacggcctcccccggggctccccccacaacagcgcagacaagaagcgcctcaacaacgcgccccgggggtcggccgccccggggcccccgcgcggcccgcggctgcagggcggcggcagcctgacgctgcagccagactacgccaagtacgccacgttcaaggccgccgcgctcaaggccgcagaggccgccccgcgggacttctgtcagcgtttccccgccctcgagccgtccccgcggcaacccccggcgcgggctccgcgaccatccccggacttgcctgcgccgctggacgcctgcccctgggccccgccggtctacgcgccccctgccgcgccgggcccctatgccgcctggacctccagtcgcccggcccggcccgccccgctcagccacccgacggctcgggccttccaggtaccccggcgacccgggcacgcggcccggcgccagttcagtgtgaagatgcctgagaccttcaacccgcagctccccggcctttacggcagcgcgggccgcgggtcccggtacctaaggaccaatagcaagaccgaggtcaccgtgtgaagcggggccgcggtgccctcgaggcatgggctggggtcctgtctgcccgtcggagcctcaggccacagggagaggagcgcctgccgtaaggccagctcttctgtctgcctcaacggcagtggtgtcttggagcctgcaggccgcgggttcgtcttgtaaataagcccttttatgtggttcctgcccctgagaataaagaagccccagcgtg

SEQ ID NO: 181226 - DNA, 4043 bp, Homo sapiens
  Payload ID: 15693
  Gene Symbol: SHISA9
  Gene Name: shisa family member 9
  Uniprot ID: B4DS77
  ENST ID: ENST00000423335
  CDS Start-End: 309-974
gtggccggccggacctgcaccccgcgcttgaccccgctcatcctccccccgcccggccgggcgcgctcctccccggccggcccctcggcgcgcggcgcgctggaggcgaacgcgggctgaggcgaacgcgggctgagccgagcgcagtggccgccgaccaccgagcgccccgcgccgctccctgcatgtgcggcccgcggcggctcgcagctcccggcagcagcctcggcagcttcggccgcgcctcgagaggcggccgcagaggctccagcggcggccgagcggccgagcccgggctgggagacaccatgcgccgcgtccttcggctgctcctcggttgcttcctcaccgagctgtgcgcccgcgtgtgccgggcgcaggagcgagcgggacacgggcagctggcgcaactgggcggcgtgttgctgctggcggggggcaaccgctccggggccgcctccggagaggccagcgagggcgctgaggcatcggacgcgcccccgacccgggcgcccacgccggacttctgccggggctacttcgatgtcatgggccagtgggacccgccgttcaactgcagctcgggcgacttcatcttctgctgcgggacttgtggcttccggttctgctgcacgtttaagaagcggcgactgaaccaaagcacctgcaccaactacgacacgccgctctggctcaacaccggcaagccccccgcccgcaaggacgaccccttgcacgaccccaccaaggacaagaccaacctgatcgtctacatcatctgcggggtggtggccgtcatggtgctcgtgggcatcttcaccaagctggggctggagaaagcgcaccggccccaaagggagcacatgtccaggctctatgacaatctgctgtttatggaggcacagatttctttccaagaggacgaacctgcccctggagagtggagtgtcggacttcaaacctggacagtctgagtgcacggatccttggccgctaggctgcactgcgtttgagtgcaaacctgcaggaattccagacttctcagatcacagagaagtacgcgatgccctgcaaacaacagctcatgcatcggggccagttcaagaagctaccgtaagatgaagtctaggaatgctttctatatcggccccggcaggcccagacgtcttggtggaggcgttggtgagaaatgaccttggggacagaagcacatatgtgaagctctctacacttgaagccagtagggaacacatgtcattattttgtccaccttcaaacagaattggaaatccaagtggcaaatggcagataagggtcctgtgtgtttttaaaacatgcttcagaagaactggcaccccttggaaagaaatagcaacaaataatgataaatgcacctcctcctcttgccttttgccttccagtttctctcctgcctctcatctttctatgcatttgtggttatcctaaggctttgaccagcttcccaggctggagaagtccatgtgtgcatgcatctactgttggccacagaaaagtcttaatttatttttctttgcagggtatgttgacttctctttgggcactgagtccttgcattttaaaaatcaacttcattgaagtataatttacacaataaaatgcacacattgtaagtgtgtagtttgatgagcttggacaaatgtctatacctgtgtaatcattactctagaaagctcactcatgcccattgcccttgcatttttgaaaaataattgatgcttcttgtgcaagaagaagtgctcaggaactctattcaagtgtttaaaagtcaacacatagattggacattgggatacctggaggctttgaagcaagataccgggactctgagttctgtttggaaatattggtgtcatatatttgtcattgtaattggaaagaaaagagatgcaccattttcttcttgttctttggataagctaagctcattcccatcttggagctgttgcactggcccttgtgtggctggtccctcctcatcaccagggtcccagctccaatgtcatcttctctgagaagccgtccctgaccaggcttagttgcttcccaccccagcctgacacactccagcccatcacccagtcagtgttatttgcttcatttttacattatggtctaaaattaacttgctagtttactggtttactagtttattatctgtctccttccattatccctctccttccctccttcccttccccttccttccttccttccttccttccttcgagacacagtcgtactctgtcaccccggctggagtgcagtggtgtgatcttgcctcactacaacccctgcctcctgggttttagcgattcttctgcctcagcctcccgagtagctgggactacaggcacccaccatgatgccaggctaatttttgtatttttattggagacagggtttcaccatgttggccaggctggtctcgaactcttgacctcaagtgatccacctgtctcggcctcccaaagtgctgggattacaggcatgagccactgcacctggcccttttattattcatagtaagacacacagggaccacaattgtctcttctactcagtagttggattctgagtgcctagttcagtatttggcaagtaagagttctgcatttgatatcctggtttacctggcacaacaaagtatctccaaattcattcattcattctttcattcattcgataggtatttactgaacatctaacttatgcccaacactgtgctgagagatatgagataaccatgaatagtacaaaagcaatccctgcccttgaagagcaaacagccaaatatcaggagacaggtaacacacaaggaaatgtacaagaaagttgagccagcacttttataagtactggttctagtactagctttcataagaaagtactggttctagtactagctttcagtactctcttgtgaaattttcaatattcagtcatttcaacctcaaaaatggcaacataattatgtttcaacataattgttgttttaaacaaacaattttgtttcaacataattctcctgaactgggtggaaggctatcaagaaaaagcttagcttcttcttcaggtaactgcaagagacagggttctctagagaaacagaacaaatatacaaagagattcattataaggaattggaagtccaaaatctccagagcctctgtacttgtacaagtctgaaggccgacaggcaggagaattctctctttttggggcaaaggtcagtgttttgttctatccaggctttcagatgattggttgaggctcactcacattagaagggcaatctgtcttactgccattagaatgcaacctgttttacttagcttactgatttcaatgttaatctatttcaagagcaccctcacagaaacacccagaataatgtttgatgaaatatctgggcaccctgtgacccagtcaagttgacacatgacactaaccatcacagtacgcttagggtcttgtcactcggagtgtggcctgtgaaccagcagcatttttatcttctgggagcttgggcacgatctcaggccccacctcctgcttattgattcagaatctgcattttaacaagatccccaggtgatctggatgcaccgtaacatctgagaagcactcaaactatgtgccgcaaacaaacgccaaattcttaggcatttgtgtggcttggagcacatagttggttctttctactgtctaattcattacattttttcagcacattcctgtctataaaatgtttttttgtatgcaccccaatatatgcacatttataagcatatgcatgaacccacgaacaatgattaggtacattatgaagcatacgtaaggacagaaatttcaaaccaagcttgagggtgaaataaatattatttgaaaacctgttgctaattgtgatgacttcatactatcattagttactatctcaatgcataatgtacagtgacgggtgaagtttatcattaataaaaaaaatctggattttaaccatt

SEQ ID NO: 181227 - DNA, 6724 bp, Homo sapiens
  Payload ID: 15693
  Gene Symbol: SHISA9
  Gene Name: shisa family member 9
  Uniprot ID: B4DS77
  ENST ID: ENST00000558583
  CDS Start-End: 446-1720
ctcttcagcgcacttggcgagctggtgaggtgagagggatactgcgagagggctaggggcggccagtccggggctgccggccaaggctaggcgctgccagcccgattctcctctgctctccacccccgcctcacccagtggccggccggacctgcaccccgcgcttgaccccgctcatcctccccccgcccggccgggcgcgctcctccccggccggcccctcggcgcgcggcgcgctggaggcgaacgcgggctgaggcgaacgcgggctgagccgagcgcagtggccgccgaccaccgagcgccccgcgccgctccctgcatgtgcggcccgcggcggctcgcagctcccggcagcagcctcggcagcttcggccgcgcctcgagaggcggccgcagaggctccagcggcggccgagcggccgagcccgggctgggagacaccatgcgccgcgtccttcggctgctcctcggttgcttcctcaccgagctgtgcgcccgcgtgtgccgggcgcaggagcgagcgggacacgggcagctggcgcaactgggcggcgtgttgctgctggcggggggcaaccgctccggggccgcctccggagaggccagcgagggcgctgaggcatcggacgcgcccccgacccgggcgcccacgccggacttctgccggggctacttcgatgtcatgggccagtgggacccgccgttcaactgcagctcgggcgacttcatcttctgctgcgggacttgtggcttccggttctgctgcacgtttaagaagcggcgactgaaccaaagcacctgcaccaactacgacacgccgctctggctcaacaccggcaagccccccgcccgcaaggacgaccccttgcacgaccccaccaaggacaagaccaacctgatcgtctacatcatctgcggggtggtggccgtcatggtgctcgtgggcatcttcaccaagctggggctggagaaagcgcaccggccccaaagggagcacatgtccagggcccttgcggatgtcatgagaccacagggccactgcaacactgatcacatggagagagacctaaacatcgttgtccacgtccagcattatgagaacatggacacgagaacccccataaataatcttcatgccacccagatgaacaacgcagtgcccacctctcctctgctccagcagatgggccatccacattcgtacccgaacctgggccagatctccaacccctatgaacagcagccaccaggaaaagagctcaacaagtacgcctccttaaaggcagtcggaagttctgatggtgactgggcagtatcgacacttaagtcaccaaaagctgacaaggtcaatgacgacttctacaccaagcgacggcacctggctgagctggctgccaaggggaacttacctctgcaccccgtaagagtggaggacgagccccgggccttcagccctgagcacggtcctgccaagcagaatggacagaagtcccgcaccaacaagatgcccccacatcccctggcctacacctctaccaccaactttaagggctgggaccccaacgagcagtccctccggcggcaggcttacagcaacaagggcaagcttggcacggccgagacaggctccagcgaccccttgggaactcgcccccagcactacccacccccacagccatacttcatcaccaacagcaaaacagaagtgactgtctgagctttcaccacagggagcaccctggagaccacactcaactgagagaggcaaaaaacaaccccgcccacaccctccccatcctcccctaatacatgcgtccacacactcactctcaacaagaaccaactctaaacctactggggacacagagtcgcgcttttcctaggtcatgcctgtaacgtgtcggcgggcagctgagaaagaccgaagcgtggacattcagcaatacagcaaaggggaaaatgaggcacactctttccacttcaggcccaagatggccaactcacatgcccaaaccgtggggctgagttttcttttcctcctaacttgaaactgaaatccatggtgacaaaatataaaagtagcacaatttagagaaattgtccatttgagcacatacactacttgccacgtgctgtctgtttctaggttcgaaagccagggtggaaatgggggtagagaatgagggaggacacaagagaagagtgtattctggaagaggagttgttctgggaggaatttgcccacattagaagcatttttctaattccaagaagtggtgacgtggacgtaaaattttgacgagcatgaaacagtaactggaccccaaccattctatttatagtacttttcatatcatccatgttgaaagcaaaaaacaacacaccctcaaactcacagaaagtaaatagaccctgaacccaccgacaatgatgggaaggaaaaaacaaaaaacaaaaaacattttagagaactcccataaggaccatgaccgtggaaatgggagggatgggcttttacggagagggtccggagagtatcaaataactttttaaaaagaggattaaaatgtaagcccactacaaaacagataaaaacggcaaattaggtgttttttttttttcaaaaatcttgaagacttgttgacattaacaacaacaaatccacagttggaaaagtccacaggagatcagatgaggatccagaagcctctgatttctgggttttgcctccaagacctgaaacagccacagaaacaagtcctctataaactgtatgtccctgacatccctttcccttcagcgcgttgccgccgccgctgccaaacttcaactgctttggactgaaaatgtcataagcgtgggtggtgccttcaatgtgttactgttgtttaatgacagtcttgtttcccaagtgcaacctgtgttcttttagccttccttcctcttctttttctgcagtagtagaagatgtttccatccttcctttgtaggtgagcccaccccataacaccctctgaggggctgctacaatgtcaggggtacccaagaacgaagacctccctactctctacactatcaaaattagtccttccattttctagccctctcaaacctgtcagatgtttcttggtcccgtaattcccatggtccctccaaattacctccccacatacttcatgtgttcatctcccatccagaatgtcctgaggttgtttttctggttggttctcataatccatagtccttggggtcccagcaaagtcagttttcctacaagttgtgtttgttttgtggaagcccaaagaagtggattgagagagaagagatttttatctaaggtggaaggtttttcaactagcccctaaaggtctttggtagttaattaacattcaacagacccacagcaactctggtgtcagaagctataaatggtctggccaaacaagactcagagtattttctgaaatcctgagctgcaaggttctgcctcacctgtctctccactctgacatcacgaaatcagcaaaaccagatatttattctcctcactcccagcagatacgaggacaccaacaatgcagttgatccctctgggcctgagtctcccatctgaaacatggggaattggggtaggtcaagctttttgaaactgcaaaacctctacctgtttttaaaaatgagatcttttgaccaggcacagtggctcacacctaaaatcccagcactttgggaggctgaagcaggtggatcatctgaggtcaggagtttgagatcagcctggtcaacatggtgaaaccccgtctctactaaaaatacaaacattagctgggcatggtggtgggtgcctgtaatcccaactactcgagaggctgaggcaggagaatcgcttaaacttgggaggttgcagtgagctgagaccacaccactgccctctagcctgggtgacggagtgagactatctcaaaaaaaaaaaaaaaaagaaaaaaaaagagatctttcaaagaacgcataataggagatctccatgtataaaaaggtaccatgctgtacaaagctggggtcagagatttagtgcccaccttctcagcctccttgggaagaccccagagcttcccagagtcaagtaaataccactgggcatggtcagagtttccttgacgttaatgagctatgtacctgcaacacactttggcatctctgtatatcaccttcacaatatttgtatctaaattgattcattttaatgcattttgtttttaaaatgaaaacttcctgtcttcatcacaaatttaaaaaaaatcatcagttgccataaatagaaagcaaacataaaaataagtacaaaggaaacaagcagcgatgattaaattccagctggagtctgttgtctgtgagtctgaactaaagcctggggttctttctttctctctccatctctctgtttctgtttctctctctctcttaaaatgatatcatcaggtattaaataattgttaaaaataccagcacccaatgaagactttctctttgtactaataagatggaccaaaaagtaaatgaaaggggaatcatttcctatgcaagtcagtgttgaacaatgctgtagctatgtactgcctatgatcattgtgcatacactaggggtgcatagcccacacttcagaaaaccctgggttgacttatctgtgaggctctttccagctcaaagtttccataattcttatctcccttttacctcgtggttgctctttgcccccagtccacttcgtcccacccttatctcaactctgattaagagtctttcttggcctctaaatctgtagtattgtattccttctgcatgctccttctcctctgaataaacttcatcaattgaactgggctccttggggtctgcagttgtaattttggcagcaaaggtgcagactggtcattaagatgtagccacaatgatggcccaagaaggacacgtactttccaagtagtcctgtctaggatggaaagctcaggaagtgcttcatagtttattatcttccagttggttttgggagatgaactgaagagggaagtttggatagggaaggtctttttattcttttttttttaatgtatccatggagtatttattattattattattattattattattattattatactttaagttttagggtacatgtgcacaatgtgcaggttagttacatatgtatacacgtgtcatgctggtgtgctgcacccattaactcgtcatttagcattagctatatctcctaatgctatccctcccccctccccccaccccacaacagtccccagagtgtgatgttccccttcttgtgtccatgtgttctcattgttcaattcccatctatgagtgagaacatgcagtgtttggtttttttgtccttgcgatagtttactgagaatgatgatttccaatttcatccatgtccctacaaaggacatgaactcatcattttttatggctgcatagtattccatggtgtatatgtgccacattttcttaatccagtctatccttgttggacttttgggttggttccaagtctttgctattgtgaatagtgccgcaataaacatacgtgtgcatgtgtctttatagcagcatgatttatagtcctttgggtatatacccagtaatgggatggctgggtcaaatggtatttctagttctagatccctgaggaatcgccacactgacttccacaatggttgaactagtttacagtcccaccagcagtgtaaaagtgttcctatttctccacatcctctccagcacctgttgtttcctgactttttaatgattgccattctaactggcgtgagatggtatctcattgtggttttgatttgcatttctctgatggccagtgatgatgagcattttttcatgtgtcttttgactgcataaatgtcttttgagaagtgtctgttcatatccttcgcccactttttgatggggttgtttgtttttttcttgtaaatttgtttgagttcattgtagattctggatattagccctttgtcagatgagtaggttgcgaaaattttctcccattttgtaggttgcctgttcactctgatggtagtttcttttgctgtgcagaagctctttagtttaattagatcccatttgtcaattttggcttcctcttgggagggtagacagacctcacaatatggaaagacgggacaacctatggaactatctgtgacttccatgtaccaagacaaggacgctatagctagggtagtgagacctagaagagagaaaccagaacaaagcagacaggctgtcctcttcctaattccatgccctgacatcagcccctattttttgcctttagctgtcccccagtttccaacccaatgggaccagagtctgacttccctttgccctttcacagtgtctcagcctccatctgccttgggctccgcctggcctccccatctaactcttcccagttttttgtgtaaatggagcatattttatgtgcgaatattttagtaaccgtatgttctgcaagtaaacctgtgttaatacttgtcaacaactgcagagtttatgatacgaataattcttcctacaatgaagaaaaaaacacatttgtttgttttctaagaatgtttatttgtaaacatatgtattcactatattaatatgaatttcttacctggcaataaaactgattatatg

SEQ ID NO: 181228 - DNA, 3691 bp, Homo sapiens
  Payload ID: 15694
  Gene Symbol: SHOC2
  Gene Name: SHOC2 leucine-rich repeat scaffold protein
  Uniprot ID: Q9UQ13
  ENST ID: ENST00000265277
  CDS Start-End: 235-1845
gaactctaatgaatcattgattgaccagcactattttaccagttggaatgaatgatcagaaatgggcatagtgcttttagatccaacatgtaacagatggatgttactccatgctgattacttcttcaagccagtacttttttgattgtgtaggatctttgtctcttcatctttgaattcaattactggaaaataaaaggagttcatgtagtttttgtccaggcttgagtcaccatgagtagtagtttaggaaaagaaaaagactctaaagaaaaagatcccaaagtaccatcagccaaggaaagagaaaaggaggcaaaagcctctggaggttttgggaaagagagcaaagaaaaagaacctaagaccaaagggaaagatgccaaagatggaaagaaggactccagtgctgcccaaccaggggtggcattttcagttgacaatacgatcaaacggccaaacccagcacctgggactagaaaaaaatccagcaatgcagaggtgattaaagagctcaacaaatgccgggaagagaattcaatgcgtttggacttatccaagagatctatacacatattgccatcatcaatcaaagagttgactcaattaacagaactttatttatacagtaacaaattgcagtccctcccagcagaggtgggatgtttagtaaatctcatgacactggctctaagtgaaaattcacttaccagtttgcctgactctcttgataacttgaagaagctgcggatgcttgatttacggcataataaactgagagaaattccttcagtggtgtataggctggattctctcaccactctttaccttcgctttaatcgtataactactgtggaaaaggacatcaaaaacttgtcaaaactcagcatgcttagcattcgagagaacaaaattaaacaactacctgctgaaattggaaacctgtccagtttaagtcgtcttggtctgagatataacagactgtcagcaatacccagatcattagcaaaatgcagtgcacttgaagaattaaatttagagaacaataacatttctactttaccagagagtcttttatcaagtcttgtgaaactgaatagtttgaccttagctagaaattgcttccagttgtatccagtgggtggtccatctcagttttctaccatctattccctcaacatggaacacaatcgaatcaacaaaattccatttggaattttctccagagcaaaagtattaagtaagctgaatatgaaggacaatcagttaacatcacttcccttggattttggaacttggaccagtatggtagaattgaatttagccactaatcagctcacaaagatccctgaggatgtgtctggtctcgtttctcttgaggttcttatcttatcaaacaatcttctaaagaagcttccccatggtcttggaaaccttaggaagttaagagagttggatctagaagagaacaaattggaatccttgccaaatgaaattgcatatcttaaggatttacagaaattagtcttgacaaacaaccagttgaccactcttcccagaggcattggtcaccttactaatctcacacatctgggccttggagagaacctacttactcaccttcctgaagaaattggtacactggagaacctagaagaactgtatttgaatgacaaccccaacctgcatagccttccctttgagctggcactctgcagcaagctttcaatcatgagtattgagaactgtccactcagtcaccttccacctcagattgttgctggggggccttctttcatcattcagttcttaaagatgcagggtccatatcgtgccatggtctgatataaatctgctggtcccacacactgttcaaaaatagactgccattaatgtttcttatctatatctgtatctatttatgtagatattggtatatggcagatttataaaaattgcattatgtgtttctgctaatagaggaatcatagccatttagaattttttttaaattctgtacaaaaggcttatataagttttctttgctgaatttgatggatgtttttctgttgtgtaatctgatatgccagtttgcttaaaacatttgccaacacattatgaagttattaaatttaagggacagaggtagtatagttagatatactttctcttaggaaaaataatgggcaaaaatttttgttgcaacttttcatatatattttccccttaccaattgttttatccttatagtattgtaggccctgaaagtagaatttttctttaacttattttgagatttgagatttaaattttatgtattgtttacagtcagagtaaatcactggatttcttttgtttgttttgatttgctctgttttattcagtcaaatctagagtttgaatcctctgctaaagaatttgcatccactggtgtaaacagtgaaaggtatttgcttgttgaaaaaaaaaactggcaaagtgaaaagatacagtcaaaaatctagaatttctttaattttgcttctctgacgagttgtgaagcaaaatacctgaagtgagtctttgggtaggggaagggtattgagaccttttctagtatgaatattttttaagtttgggggaagagaaacttgcagtgaaaaggagttttttcattcctgaaagttgcagatccacaaaactaacaggataattgggcaaataaattacatataaacacacacaatctatatatgtatatacaatgctatatagatatgtatttattatatcataaactacagtaggtaactttaaggatttcttcctatccttgtacaatgacatgaatgtctttctttgaaaactgcaatgtatgtatgtttcaaggttatttaacagtgtactatggttttatatcttgacttgccttgtacatctttcaattctggaatatctgtgtctaagcacaatatcttcacactgtgctgtattgctgctgaactaaatgcacttttccccacatatggggcactggcttcaaacaattcagttcagtatcattacttttaatctcatctttcctttcttggtagttgttaatacagttatggaaaagaggcacattgcatagaagccattggggagttcagtggaagttctgtaagatgtgcatgtactatttgatgcgttttctttgcttcactgcttttaatacttagcagtattgttggtctaagtcaatttgattattgaggagtctcagagcaaggtgcgttctagatgtcatcctaaaaaacacttcatatataattaatcactattttgtataattacatattgctgcttgtgtgtttttttttttttccatttagttgggcgttgtgttttacacaaaaccatttttgaattaaggctatgatattaagatagaaatttggactgttgttctgcttttcctggcactcaaattcatgactagttttgaggtcaaacctatgttcgtaatgagagattttataaggatcaactaagaaatggaaggcaggtgaagatataaaaccctagaatgcttaaatgtgctgtaaaactattgtagatgtcactggattttaccaagtaatatcctttcttttttttttccccccatctgctgtggcttttcagttaaaattttgtttataaaaggaatttgtttattacagctctacct

SEQ ID NO: 181229 - DNA, 3943 bp, Homo sapiens
  Payload ID: 15694
  Gene Symbol: SHOC2
  Gene Name: SHOC2 leucine-rich repeat scaffold protein
  Uniprot ID: Q9UQ13
  ENST ID: ENST00000369452
  CDS Start-End: 346-2094
gggggaggggcgggcggggggcggcggttgggcagcgtcgcttcttaggaggaggaggaagaggaggaaggagggcgagcgaggaggatggcggagtcggggctcctgacggaactctaatgaatcattgattgaccagcactattttaccagttggaatgaatgatcagaaatgggcatagtgcttttagatccaacatgtaacagatggatgttactccatgctgattacttcttcaagccagtacttttttgattgtgtaggatctttgtctcttcatctttgaattcaattactggaaaataaaaggagttcatgtagtttttgtccaggcttgagtcaccatgagtagtagtttaggaaaagaaaaagactctaaagaaaaagatcccaaagtaccatcagccaaggaaagagaaaaggaggcaaaagcctctggaggttttgggaaagagagcaaagaaaaagaacctaagaccaaagggaaagatgccaaagatggaaagaaggactccagtgctgcccaaccaggggtggcattttcagttgacaatacgatcaaacggccaaacccagcacctgggactagaaaaaaatccagcaatgcagaggtgattaaagagctcaacaaatgccgggaagagaattcaatgcgtttggacttatccaagagatctatacacatattgccatcatcaatcaaagagttgactcaattaacagaactttatttatacagtaacaaattgcagtccctcccagcagaggtgggatgtttagtaaatctcatgacactggctctaagtgaaaattcacttaccagtttgcctgactctcttgataacttgaagaagctgcggatgcttgatttacggcataataaactgagagaaattccttcagtggtgtataggctggattctctcaccactctttaccttcgctttaatcgtataactactgtggaaaaggacatcaaaaacttgtcaaaactcagcatgcttagcattcgagagaacaaaattaaacaactacctgctgaaattggtgaattatgtaacctcattacgctggatgtagctcacaatcaacttgaacaccttccaaaggagattggaaactgtacacagataaccaaccttgacttgcagcacaatgaactgctagacctcccagatactataggaaacctgtccagtttaagtcgtcttggtctgagatataacagactgtcagcaatacccagatcattagcaaaatgcagtgcacttgaagaattaaatttagagaacaataacatttctactttaccagagagtcttttatcaagtcttgtgaaactgaatagtttgaccttagctagaaattgcttccagttgtatccagtgggtggtccatctcagttttctaccatctattccctcaacatggaacacaatcgaatcaacaaaattccatttggaattttctccagagcaaaagtattaagtaagctgaatatgaaggacaatcagttaacatcacttcccttggattttggaacttggaccagtatggtagaattgaatttagccactaatcagctcacaaagatccctgaggatgtgtctggtctcgtttctcttgaggttcttatcttatcaaacaatcttctaaagaagcttccccatggtcttggaaaccttaggaagttaagagagttggatctagaagagaacaaattggaatccttgccaaatgaaattgcatatcttaaggatttacagaaattagtcttgacaaacaaccagttgaccactcttcccagaggcattggtcaccttactaatctcacacatctgggccttggagagaacctacttactcaccttcctgaagaaattggtacactggagaacctagaagaactgtatttgaatgacaaccccaacctgcatagccttccctttgagctggcactctgcagcaagctttcaatcatgagtattgagaactgtccactcagtcaccttccacctcagattgttgctggggggccttctttcatcattcagttcttaaagatgcagggtccatatcgtgccatggtctgatataaatctgctggtcccacacactgttcaaaaatagactgccattaatgtttcttatctatatctgtatctatttatgtagatattggtatatggcagatttataaaaattgcattatgtgtttctgctaatagaggaatcatagccatttagaattttttttaaattctgtacaaaaggcttatataagttttctttgctgaatttgatggatgtttttctgttgtgtaatctgatatgccagtttgcttaaaacatttgccaacacattatgaagttattaaatttaagggacagaggtagtatagttagatatactttctcttaggaaaaataatgggcaaaaatttttgttgcaacttttcatatatattttccccttaccaattgttttatccttatagtattgtaggccctgaaagtagaatttttctttaacttattttgagatttgagatttaaattttatgtattgtttacagtcagagtaaatcactggatttcttttgtttgttttgatttgctctgttttattcagtcaaatctagagtttgaatcctctgctaaagaatttgcatccactggtgtaaacagtgaaaggtatttgcttgttgaaaaaaaaaactggcaaagtgaaaagatacagtcaaaaatctagaatttctttaattttgcttctctgacgagttgtgaagcaaaatacctgaagtgagtctttgggtaggggaagggtattgagaccttttctagtatgaatattttttaagtttgggggaagagaaacttgcagtgaaaaggagttttttcattcctgaaagttgcagatccacaaaactaacaggataattgggcaaataaattacatataaacacacacaatctatatatgtatatacaatgctatatagatatgtatttattatatcataaactacagtaggtaactttaaggatttcttcctatccttgtacaatgacatgaatgtctttctttgaaaactgcaatgtatgtatgtttcaaggttatttaacagtgtactatggttttatatcttgacttgccttgtacatctttcaattctggaatatctgtgtctaagcacaatatcttcacactgtgctgtattgctgctgaactaaatgcacttttccccacatatggggcactggcttcaaacaattcagttcagtatcattacttttaatctcatctttcctttcttggtagttgttaatacagttatggaaaagaggcacattgcatagaagccattggggagttcagtggaagttctgtaagatgtgcatgtactatttgatgcgttttctttgcttcactgcttttaatacttagcagtattgttggtctaagtcaatttgattattgaggagtctcagagcaaggtgcgttctagatgtcatcctaaaaaacacttcatatataattaatcactattttgtataattacatattgctgcttgtgtgtttttttttttttccatttagttgggcgttgtgttttacacaaaaccatttttgaattaaggctatgatattaagatagaaatttggactgttgttctgcttttcctggcactcaaattcatgactagttttgaggtcaaacctatgttcgtaatgagagattttataaggatcaactaagaaatggaaggcaggtgaagatataaaaccctagaatgcttaaatgtgctgtaaaactattgtagatgtcactggattttaccaagtaatatcctttcttttttttttccccccatctgctgtggcttttcagttaaaattttgtttataaaaggaatttgtttattacagctctacctaga

SEQ ID NO: 181230 - DNA, 2967 bp, Homo sapiens
  Payload ID: 15694
  Gene Symbol: SHOC2
  Gene Name: SHOC2 leucine-rich repeat scaffold protein
  ENST ID: ENST00000451838
  CDS Start-End: 1-1119
cttgataacttgaagaagctgcggatgcttgatttacggcataataaactgagagaaattccttcagtggtgtataggctggattctctcaccactctttaccttcgctttaatcgtataactactgtggaaaaggacatcaaaaacttgtcaaaactcagcatgcttagcattcgagagaacaaaattaaacaactacctgctgaaattggaaacctgtccagtttaagtcgtcttggtctgagatataacagactgtcagcaatacccagatcattagcaaaatgcagtgcacttgaagaattaaatttagagaacaataacatttctactttaccagagagtcttttatcaagtcttgtgaaactgaatagtttgaccttagctagaaattgcttccagttgtatccagtgggtggtccatctcagttttctaccatctattccctcaacatggaacacaatcgaatcaacaaaattccatttggaattttctccagagcaaaagtattaagtaagctgaatatgaaggacaatcagttaacatcacttcccttggattttggaacttggaccagtatggtagaattgaatttagccactaatcagctcacaaagatccctgaggatgtgtctggtctcgtttctcttgaggttcttatcttatcaaacaatcttctaaagaagcttccccatggtcttggaaaccttaggaagttaagagagttggatctagaagagaacaaattggaatccttgccaaatgaaattgcatatcttaaggatttacagaaattagtcttgacaaacaaccagttgaccactcttcccagaggcattggtcaccttactaatctcacacatctgggccttggagagaacctacttactcaccttcctgaagaaattggtacactggagaacctagaagaactgtatttgaatgacaaccccaacctgcatagccttccctttgagctggcactctgcagcaagctttcaatcatgagtattgagaactgtccactcagtcaccttccacctcagattgttgctggggggccttctttcatcattcagttcttaaagatgcagggtccatatcgtgccatggtctgatataaatctgctggtcccacacactgttcaaaaatagactgccattaatgtttcttatctatatctgtatctatttatgtagatattggtatatggcagatttataaaaattgcattatgtgtttctgctaatagaggaatcatagccatttagaattttttttaaattctgtacaaaaggcttatataagttttctttgctgaatttgatggatgtttttctgttgtgtaatctgatatgccagtttgcttaaaacatttgccaacacattatgaagttattaaatttaagggacagaggtagtatagttagatatactttctcttaggaaaaataatgggcaaaaatttttgttgcaacttttcatatatattttccccttaccaattgttttatccttatagtattgtaggccctgaaagtagaatttttctttaacttattttgagatttgagatttaaattttatgtattgtttacagtcagagtaaatcactggatttcttttgtttgttttgatttgctctgttttattcagtcaaatctagagtttgaatcctctgctaaagaatttgcatccactggtgtaaacagtgaaaggtatttgcttgttgaaaaaaaaaactggcaaagtgaaaagatacagtcaaaaatctagaatttctttaattttgcttctctgacgagttgtgaagcaaaatacctgaagtgagtctttgggtaggggaagggtattgagaccttttctagtatgaatattttttaagtttgggggaagagaaacttgcagtgaaaaggagttttttcattcctgaaagttgcagatccacaaaactaacaggataattgggcaaataaattacatataaacacacacaatctatatatgtatatacaatgctatatagatatgtatttattatatcataaactacagtaggtaactttaaggatttcttcctatccttgtacaatgacatgaatgtctttctttgaaaactgcaatgtatgtatgtttcaaggttatttaacagtgtactatggttttatatcttgacttgccttgtacatctttcaattctggaatatctgtgtctaagcacaatatcttcacactgtgctgtattgctgctgaactaaatgcacttttccccacatatggggcactggcttcaaacaattcagttcagtatcattacttttaatctcatctttcctttcttggtagttgttaatacagttatggaaaagaggcacattgcatagaagccattggggagttcagtggaagttctgtaagatgtgcatgtactatttgatgcgttttctttgcttcactgcttttaatacttagcagtattgttggtctaagtcaatttgattattgaggagtctcagagcaaggtgcgttctagatgtcatcctaaaaaacacttcatatataattaatcactattttgtataattacatattgctgcttgtgtgtttttttttttttccatttagttgggcgttgtgttttacacaaaaccatttttgaattaaggctatgatattaagatagaaatttggactgttgttctgcttttcctggcactcaaattcatgactagttttgaggtcaaacctatgttcgtaatgagagattttataaggatcaactaagaaatggaaggcaggtgaagatataaaaccctagaatgcttaaatgtgctgtaaaactattgtagatgtcactggattttaccaagtaatatcctttcttttttttttccccccatctgctgtggcttttcagttaaaattttgtttataaaaggaatttgtttattacagctctacctag

SEQ ID NO: 181231 - DNA, 5308 bp, Homo sapiens
  Payload ID: 15695
  Gene Symbol: SHTN1
  Gene Name: shootin 1
  Uniprot ID: A0MZ66
  ENST ID: ENST00000260777
  CDS Start-End: 626-2341
attgcgtcccgctctacctctgtggttctttgggagcgacccccgggaagcgtccaaagtggagttcccacacacgctgcgaacccacagccggttttctctgaactcgcgtccctgagtccgggaggtggaggcggagaaaagggtgcggagcgaccccacgcagggccgccccccctcccaccagcgcgtcctgccgcgccggcagccacaggctggcatagcggctgccgacccgccctcgttcctccaccccctgaacgggactgctgggcccgccccgccccgcctgcaggtgaagcggccgcagccgccgagtaggtgcgtggggatgatctcactcgcgcgctccgcgccaggaggaggaggagcgggagcggatccaacttccgggtagtggagccgcaagccaccggcatcttgctttttcttccccctcctcctgtgtgccccgcgccgctccctctttcccttttattcccggccccacccgccaaaatgaacagctcggacgaagagaagcagctgcagctcattaccagtctgaaggagcaagtgtgacaaaattaggcaagaacgagatgaagccgttaaaaaactggaagaatttcagaaaatttctcacatggtcatagaggaagttaatttcatgcagaaccatcttgaaatagagaagacttgtcgagaaagtgctgaagctttggcaacaaagctaaataaagaaaataaaacgttgaaaagaatcagcatgttgtacatggccaagctgggaccagatgtaataactgaagagataaacattgatgatgaagattcgactacagacacagacggtgccgccgagacttgtgtctcagtacagtgtcagaagcaaattaaagaacttcgagatcaaattgtatctgttcaggaggaaaagaagattttagccattgagctggaaaatctcaagagcaaactcgtagaagtaattgaagaagtaaataaagttaaacaagaaaagactgttttaaattcagaagttcttgaacagagaaaagtcttagaaaaatgcaatagagtgtccatgttagctgtagaagagtatgaggagatgcaagtaaacctggagctggagaaggaccttcgaaagaaagcagagtcatttgcacaagagatgttcattgagcaaaacaagctaaagagacaaagccaccttctgctgcagagctccatccctgatcagcagcttttgaaagctttagacgaaaatgcaaaactcacccagcaacttgaagaagagagaattcagcatcaacaaaaggtcaaagaattagaagagcaactagaaaatgaaacactccacaaagaaatacacaacctcaaacagcaactggagcttctagaggaagataaaaaggaattggaattgaaatatcagaattctgaagagaaagccagaaatttaaagcactctgttgatgaactccagaaacgagtgaaccagtctgagaattcagtacctccaccacctcctcctccaccaccacttccccctccacctcccaatcctatccgatccctcatgtccatgatccggaaacgatcccaccccagtggcagtggtgctaagaaagaaaaggcaactcaaccagaaacaactgaagaagtcacagatctaaagaggcaagcagttgaagagatgatggatagaattaaaaagggagttcatcttagacccgttaatcagacagccagaccgaagacaaagccagaatcttcgaaaggctgcgaaagtgcagtggatgaactaaaaggaatactggggacacttaacaaatccactagttcaagaagcttaaaatcccttgaccctgaaaacagtgaaactgagttagaaaggattttgcgtcgcagaaaggtgacagcagaagcagatagcagtagtccaactgggatattagccacctcagagtccaaatccatgccagtgttgggttctgtatccagtgtaacaaaaacagccttgaacaagaaaactctggaggcagaattcaacagcccgtcccccccaacacctgagccaggtgaagggccccgtaaattggaaggatgcacaagttccaaggttacgtttcagcctcccagtagcattggatgcaggaaaaaatacattgacggtgaaaaacaagccgaaccagttgtagttttagatcctgtttctacacatgaaccccaaaccaaagaccaggttgctgaaaaagatccaactcaacacaaggaggatgaaggcgaaattcaaccagaaaacaaagaagacagcattgaaaacgtgagagagacagacagctccaactgctgatccataaaccagaagcctgacatgtttggaagtccttttcaataagcacatgattagtgttgttatattggcaagggctgtagacattctgctctggtcactgtattcagaatacaggttcttttctggtgtcacttttgtaagtagcaactataaacataagtaagctgtttagcaaaacacacattcctagtaggttttggttttttgatctttataaagatgaggtttttttcctagttactgtattaagtatgacttcttttagaaggttacaaaaaaattcagatgttgatacctttttaggaaatgtgcataccactcatcaaatggaatgctgaaagtttgaggtgcttgtatataatcggataaacaaaactgatcaacccaatgtgattttaaaagcccccaaagaagcttctgttttgggtctgatcctcttgatggagaaactgcagcagcatggaaattgttgggtactgtggcatacaagttattttctacagtagactgagataaactgaaaactcaggagctggcatcaaactcgtagtcccatagtcagtgttaattacacacattgttaactattggatgaaaaatacatgctattgattgtgtccaaagcctcccgaggacctccgtggggatgctctggtagcctgaatacagaactgaggtgaaagtccaaaccttgaattttacagtagtaagttggtaaaccatgtgctctgtgctatgagttaattatgttttcccaaatactaatgtggcacaagtaccatattttatcagagttcttatgtacagtatggtgaagataagtgacaagcacacatttttcttgcttcactgctgttctatattacacaggtttgttgttgttttttttaaaaaagaaattaagcagtagttagtctctaaaaatacaatgtttcaggctaccacagtgaataaatagaaatgtaatcagggattaaaaaaaaaacttatgcagcttttcaaagttgattgtttcaaaattggtgtttatttaaaataagtggtaatgtacttgaatgcactttttatgacaatgattcagtaatggtaattttactattaaagaaagtgaaaggtttagttttgttagcatggctcagcatgtagctgtcaggtgtttttcacctaagggcaaaagaaaatgatagtaataattgcagtagttgtattgtattgtatttttgcacgtgtggtaagcataggcttgaagaggtgggtaggcaggtacatgtacttcctaaatttggagataattatctttctgtaagttcgttatgcttgactgtttccatgttctcccaataatgattttatagttacttatcactttactcatggagaattaaaacgtaatgtttttcaactgtatctttctttaactggataatactgctatatgatatgcttactacagactgcattaattcacgaaacgaattctgttatgctgtaatttgaactctcctcaccacaacttattaaaaaggcaccaatagtttcccattaagggtcagttgtggttattattaacgtttctggtttagttccccaagcttgacattctttaatagaaaattgtatatgatttgacaactttagtaatttttaatagtccctaagatggtttattgagttttctttcatgtttctttgtgctgtcttccttcttgcatctgtgatctgtctgccagcatgcaactcacacacatttaggaatataaaaatatgtacactgtctttccatatttcatcacaccatcacagaataatatggttatcaaaataccctcctttctagagtaagaagttgccctttgggtgaaatgtgttagctggactagggaacaattagtaacaggtattttgaaagtattcctgccttttttaagctgcttactttctctcactgtgattacaaagcattttaaattaatttgacatgaaggtatttgatggaagatattcactcacctttttctgcctacagtttttcccttttcactttggttttgagggggttttgcccctggctggggtgacactgtcaaccaaagcaagggatcccaaataggaagacataggagaaccgtgcttatatctgcaaggtatgttcatagctattgcacacacaaaacttacatacgtcctgcttacacaattttaagttggaaaagactgcatctttatgtttttgatttctctaaaaggttatttatgcttccttctgtttgggaaagataaattaagtcttgtgcgctatagaggattttttttctttaagaaaaacgaatgttgatgcattttatagcccgagtgaggaacagagatagaggtactttgtgccattgctattaaagaaaaagaaaatgtctctttttttttctggaagaataagattttaattaaagcacttgcacccttttgtatgtgagctggtctcaaacaaagtcctcacccacagcagtttcagcagctgaacagtcccatggaagttctgactggcaggcatcaacagggctattagcacccagcatagtttgccctgagtacggaggatggatgctttggctctaactactcaccaataattgctccttccttaccttctttgttaatggtaaactgctggaaatggagtagtacaggtaacaattatttttaattgtctttccagaccagtttttggttgtgtgttcagtaaatgatagtctgtatcacagccttcaagtctggattatttttctaaatgcatactctacctgttcagttacactcgttgtggaacaacattagcttatataccagtaagttgtcgagaatggataaccatctgtcattatcactgaccttcaaagactcatcaagcagtccctgcataaggattggagtggtttgaagtttctcttccaagcactaacatgtccc

SEQ ID NO: 181232 - DNA, 5361 bp, Homo sapiens
  Payload ID: 15695
  Gene Symbol: SHTN1
  Gene Name: shootin 1
  Uniprot ID: A0MZ66
  ENST ID: ENST00000355371
  CDS Start-End: 499-2394
attgcgtcccgctctacctctgtggttctttgggagcgacccccgggaagcgtccaaagtggagttcccacacacgctgcgaacccacagccggttttctctgaactcgcgtccctgagtccgggaggtggaggcggagaaaagggtgcggagcgaccccacgcagggccgccccccctcccaccagcgcgtcctgccgcgccggcagccacaggctggcatagcggctgccgacccgccctcgttcctccaccccctgaacgggactgctgggcccgccccgccccgcctgcaggtgaagcggccgcagccgccgagtaggtgcgtggggatgatctcactcgcgcgctccgcgccaggaggaggaggagcgggagcggatccaacttccgggtagtggagccgcaagccaccggcatcttgctttttcttccccctcctcctgtgtgccccgcgccgctccctctttcccttttattcccggccccacccgccaaaatgaacagctcggacgaagagaagcagctgcagctcattaccagtctgaaggagcaagcaataggcgaatatgaagaccttagagcagagaaccagaaaacaaaggagaagtgtgacaaaattaggcaagaacgagatgaagccgttaaaaaactggaagaatttcagaaaatttctcacatggtcatagaggaagttaatttcatgcagaaccatcttgaaatagagaagacttgtcgagaaagtgctgaagctttggcaacaaagctaaataaagaaaataaaacgttgaaaagaatcagcatgttgtacatggccaagctgggaccagatgtaataactgaagagataaacattgatgatgaagattcgactacagacacagacggtgccgccgagacttgtgtctcagtacagtgtcagaagcaaattaaagaacttcgagatcaaattgtatctgttcaggaggaaaagaagattttagccattgagctggaaaatctcaagagcaaactcgtagaagtaattgaagaagtaaataaagttaaacaagaaaagactgttttaaattcagaagttcttgaacagagaaaagtcttagaaaaatgcaatagagtgtccatgttagctgtagaagagtatgaggagatgcaagtaaacctggagctggagaaggaccttcgaaagaaagcagagtcatttgcacaagagatgttcattgagcaaaacaagctaaagagacaaagccaccttctgctgcagagctccatccctgatcagcagcttttgaaagctttagacgaaaatgcaaaactcacccagcaacttgaagaagagagaattcagcatcaacaaaaggtcaaagaattagaagagcaactagaaaatgaaacactccacaaagaaatacacaacctcaaacagcaactggagcttctagaggaagataaaaaggaattggaattgaaatatcagaattctgaagagaaagccagaaatttaaagcactctgttgatgaactccagaaacgagtgaaccagtctgagaattcagtacctccaccacctcctcctccaccaccacttccccctccacctcccaatcctatccgatccctcatgtccatgatccggaaacgatcccaccccagtggcagtggtgctaagaaagaaaaggcaactcaaccagaaacaactgaagaagtcacagatctaaagaggcaagcagttgaagagatgatggatagaattaaaaagggagttcatcttagacccgttaatcagacagccagaccgaagacaaagccagaatcttcgaaaggctgcgaaagtgcagtggatgaactaaaaggaatactggggacacttaacaaatccactagttcaagaagcttaaaatcccttgaccctgaaaacagtgaaactgagttagaaaggattttgcgtcgcagaaaggtgacagcagaagcagatagcagtagtccaactgggatattagccacctcagagtccaaatccatgccagtgttgggttctgtatccagtgtaacaaaaacagccttgaacaagaaaactctggaggcagaattcaacagcccgtcccccccaacacctgagccaggtgaagggccccgtaaattggaaggatgcacaagttccaaggttacgtttcagcctcccagtagcattggatgcaggaaaaaatacattgacggtgaaaaacaagccgaaccagttgtagttttagatcctgtttctacacatgaaccccaaaccaaagaccaggttgctgaaaaagatccaactcaacacaaggaggatgaaggcgaaattcaaccagaaaacaaagaagacagcattgaaaacgtgagagagacagacagctccaactgctgatccataaaccagaagcctgacatgtttggaagtccttttcaataagcacatgattagtgttgttatattggcaagggctgtagacattctgctctggtcactgtattcagaatacaggttcttttctggtgtcacttttgtaagtagcaactataaacataagtaagctgtttagcaaaacacacattcctagtaggttttggttttttgatctttataaagatgaggtttttttcctagttactgtattaagtatgacttcttttagaaggttacaaaaaaattcagatgttgatacctttttaggaaatgtgcataccactcatcaaatggaatgctgaaagtttgaggtgcttgtatataatcggataaacaaaactgatcaacccaatgtgattttaaaagcccccaaagaagcttctgttttgggtctgatcctcttgatggagaaactgcagcagcatggaaattgttgggtactgtggcatacaagttattttctacagtagactgagataaactgaaaactcaggagctggcatcaaactcgtagtcccatagtcagtgttaattacacacattgttaactattggatgaaaaatacatgctattgattgtgtccaaagcctcccgaggacctccgtggggatgctctggtagcctgaatacagaactgaggtgaaagtccaaaccttgaattttacagtagtaagttggtaaaccatgtgctctgtgctatgagttaattatgttttcccaaatactaatgtggcacaagtaccatattttatcagagttcttatgtacagtatggtgaagataagtgacaagcacacatttttcttgcttcactgctgttctatattacacaggtttgttgttgttttttttaaaaaagaaattaagcagtagttagtctctaaaaatacaatgtttcaggctaccacagtgaataaatagaaatgtaatcagggattaaaaaaaaaacttatgcagcttttcaaagttgattgtttcaaaattggtgtttatttaaaataagtggtaatgtacttgaatgcactttttatgacaatgattcagtaatggtaattttactattaaagaaagtgaaaggtttagttttgttagcatggctcagcatgtagctgtcaggtgtttttcacctaagggcaaaagaaaatgatagtaataattgcagtagttgtattgtattgtatttttgcacgtgtggtaagcataggcttgaagaggtgggtaggcaggtacatgtacttcctaaatttggagataattatctttctgtaagttcgttatgcttgactgtttccatgttctcccaataatgattttatagttacttatcactttactcatggagaattaaaacgtaatgtttttcaactgtatctttctttaactggataatactgctatatgatatgcttactacagactgcattaattcacgaaacgaattctgttatgctgtaatttgaactctcctcaccacaacttattaaaaaggcaccaatagtttcccattaagggtcagttgtggttattattaacgtttctggtttagttccccaagcttgacattctttaatagaaaattgtatatgatttgacaactttagtaatttttaatagtccctaagatggtttattgagttttctttcatgtttctttgtgctgtcttccttcttgcatctgtgatctgtctgccagcatgcaactcacacacatttaggaatataaaaatatgtacactgtctttccatatttcatcacaccatcacagaataatatggttatcaaaataccctcctttctagagtaagaagttgccctttgggtgaaatgtgttagctggactagggaacaattagtaacaggtattttgaaagtattcctgccttttttaagctgcttactttctctcactgtgattacaaagcattttaaattaatttgacatgaaggtatttgatggaagatattcactcacctttttctgcctacagtttttcccttttcactttggttttgagggggttttgcccctggctggggtgacactgtcaaccaaagcaagggatcccaaataggaagacataggagaaccgtgcttatatctgcaaggtatgttcatagctattgcacacacaaaacttacatacgtcctgcttacacaattttaagttggaaaagactgcatctttatgtttttgatttctctaaaaggttatttatgcttccttctgtttgggaaagataaattaagtcttgtgcgctatagaggattttttttctttaagaaaaacgaatgttgatgcattttatagcccgagtgaggaacagagatagaggtactttgtgccattgctattaaagaaaaagaaaatgtctctttttttttctggaagaataagattttaattaaagcacttgcacccttttgtatgtgagctggtctcaaacaaagtcctcacccacagcagtttcagcagctgaacagtcccatggaagttctgactggcaggcatcaacagggctattagcacccagcatagtttgccctgagtacggaggatggatgctttggctctaactactcaccaataattgctccttccttaccttctttgttaatggtaaactgctggaaatggagtagtacaggtaacaattatttttaattgtctttccagaccagtttttggttgtgtgttcagtaaatgatagtctgtatcacagccttcaagtctggattatttttctaaatgcatactctacctgttcagttacactcgttgtggaacaacattagcttatataccagtaagttgtcgagaatggataaccatctgtcattatcactgaccttcaaagactcatcaagcagtccctgcataaggattggagtggtttgaagtttctcttccaagcactaacatgtccc

SEQ ID NO: 181233 - DNA, 2190 bp, Homo sapiens
  Payload ID: 15695
  Gene Symbol: SHTN1
  Gene Name: shootin 1
  Uniprot ID: A0MZ66
  ENST ID: ENST00000392901
  CDS Start-End: 469-1965
gcgtgctaggaggcgaggcgaggggcatgcgtgctaggaggcgaggcgaggggcatgcgtgctaggaggcgaggcgaggggcatgcgtgctaggaggcgaggcgaggggcatgcgtgctaggaggcgaggcgagggccaggtgctagggctagaaaggaggcagggctggcgctctagggactcctggagctctcctcctgtgagcctggacccggcacctcacgcagcccatctcccacagcttccgtcgacggaggccggggcctcaccaggaaagtggtttgccctccaatcagtggtctgccttcattttccagattgatgaagtctgcctcagagaaggggcaataggcgaatatgaagaccttagagcagagaaccagaaaacaaaggagaagtgtgacaaaattaggcaagaacgagatgaagccgttaaaaaactggaagaatttcagaaaatttctcacatggtcatagaggaagttaatttcatgcagaaccatcttgaaatagagaagacttgtcgagaaagtgctgaagctttggcaacaaagctaaataaagaaaataaaacgttgaaaagaatcagcatgttgtacatggccaagctgggaccagatgtaataactgaagagataaacattgatgatgaagattcgactacagacacagacggtgccgccgagacttgtgtctcagtacagtgtcagaagcaaattaaagaacttcgagatcaaattgtatctgttcaggaggaaaagaagattttagccattgagctggaaaatctcaagagcaaactcgtagaagtaattgaagaagtaaataaagttaaacaagaaaagactgttttaaattcagaagttcttgaacagagaaaagtcttagaaaaatgcaatagagtgtccatgttagctgtagaagagtatgaggagatgcaagtaaacctggagctggagaaggaccttcgaaagaaagcagagtcatttgcacaagagatgttcattgagcaaaacaagctaaagagacaaagccaccttctgctgcagagctccatccctgatcagcagcttttgaaagctttagacgaaaatgcaaaactcacccagcaacttgaagaagagagaattcagcatcaacaaaaggtcaaagaattagaagagcaactagaaaatgaaacactccacaaagaaatacacaacctcaaacagcaactggagcttctagaggaagataaaaaggaattggaattgaaatatcagaattctgaagagaaagccagaaatttaaagcactctgttgatgaactccagaaacgagtgaaccagtctgagaattcagtacctccaccacctcctcctccaccaccacttccccctccacctcccaatcctatccgatccctcatgtccatgatccggaaacgatcccaccccagtggcagtggtgctaagaaagaaaaggcaactcaaccagaaacaactgaagaagtcacagatctaaagaggcaagcagttgaagagatgatggatagaattaaaaagggagttcatcttagacccgttaatcagacagccagaccgaagacaaagccagaatcttcgaaaggctgcgaaagtgcagtggatgaactaaaaggaatactggggacacttaacaaatccactagttcaagaagcttaaaatcccttgaccctgaaaacagtgaaactgagttagaaaggattttgcgtcgcagaaaggtgacagcagaagcagatagcagtagtccaactgggatattagccacctcagagtccaaatccatgccagtgttgggttctgtatccagtgtaacaaaaacagccttgaacaagaaaactctggaggcagaattcaacagcccgtcccccccaacacctgagccaggtgaagggccccgtaaattggaaggatgcacaagttccaaggttacgtttcaataatctgaatcagaaaatactgcaactccttcctccttttgtctgccttttgttctccaaaagtaagtggaaattacatttccaagaaaggaaatgaaataattgcaggcccaaggtctgcaaaatatgtgttgaattgacagtgaaaaggatccatgtgttgacagacacagttgttagatgccataaaggcagatgtgaagctcaatttatttctcatcttgcttg

SEQ ID NO: 181234 - DNA, 2400 bp, Homo sapiens
  Payload ID: 15695
  Gene Symbol: SHTN1
  Gene Name: shootin 1
  Uniprot ID: A0MZ66
  ENST ID: ENST00000392903
  CDS Start-End: 499-2175
attgcgtcccgctctacctctgtggttctttgggagcgacccccgggaagcgtccaaagtggagttcccacacacgctgcgaacccacagccggttttctctgaactcgcgtccctgagtccgggaggtggaggcggagaaaagggtgcggagcgaccccacgcagggccgccccccctcccaccagcgcgtcctgccgcgccggcagccacaggctggcatagcggctgccgacccgccctcgttcctccaccccctgaacgggactgctgggcccgccccgccccgcctgcaggtgaagcggccgcagccgccgagtaggtgcgtggggatgatctcactcgcgcgctccgcgccaggaggaggaggagcgggagcggatccaacttccgggtagtggagccgcaagccaccggcatcttgctttttcttccccctcctcctgtgtgccccgcgccgctccctctttcccttttattcccggccccacccgccaaaatgaacagctcggacgaagagaagcagctgcagctcattaccagtctgaaggagcaagcaataggcgaatatgaagaccttagagcagagaaccagaaaacaaaggagaagtgtgacaaaattaggcaagaacgagatgaagccgttaaaaaactggaagaatttcagaaaatttctcacatggtcatagaggaagttaatttcatgcagaaccatcttgaaatagagaagacttgtcgagaaagtgctgaagctttggcaacaaagctaaataaagaaaataaaacgttgaaaagaatcagcatgttgtacatggccaagctgggaccagatgtaataactgaagagataaacattgatgatgaagattcgactacagacacagacggtgccgccgagacttgtgtctcagtacagtgtcagaagcaaattaaagaacttcgagatcaaattgtatctgttcaggaggaaaagaagattttagccattgagctggaaaatctcaagagcaaactcgtagaagtaattgaagaagtaaataaagttaaacaagaaaagactgttttaaattcagaagttcttgaacagagaaaagtcttagaaaaatgcaatagagtgtccatgttagctgtagaagagtatgaggagatgcaagtaaacctggagctggagaaggaccttcgaaagaaagcagagtcatttgcacaagagatgttcattgagcaaaacaagctaaagagacaaagccaccttctgctgcagagctccatccctgatcagcagcttttgaaagctttagacgaaaatgcaaaactcacccagcaacttgaagaagagagaattcagcatcaacaaaaggtcaaagaattagaagagcaactagaaaatgaaacactccacaaagaaatacacaacctcaaacagcaactggagcttctagaggaagataaaaaggaattggaattgaaatatcagaattctgaagagaaagccagaaatttaaagcactctgttgatgaactccagaaacgagtgaaccagtctgagaattcagtacctccaccacctcctcctccaccaccacttccccctccacctcccaatcctatccgatccctcatgtccatgatccggaaacgatcccaccccagtggcagtggtgctaagaaagaaaaggcaactcaaccagaaacaactgaagaagtcacagatctaaagaggcaagcagttgaagagatgatggatagaattaaaaagggagttcatcttagacccgttaatcagacagccagaccgaagacaaagccagaatcttcgaaaggctgcgaaagtgcagtggatgaactaaaaggaatactggggacacttaacaaatccactagttcaagaagcttaaaatcccttgaccctgaaaacagtgaaactgagttagaaaggattttgcgtcgcagaaaggtgacagcagaagcagatagcagtagtccaactgggatattagccacctcagagtccaaatccatgccagtgttgggttctgtatccagtgtaacaaaaacagccttgaacaagaaaactctggaggcagaattcaacagcccgtcccccccaacacctgagccaggtgaagggccccgtaaattggaaggatgcacaagttccaaggttacgtttcaataatctgaatcagaaaatactgcaactccttcctccttttgtctgccttttgttctccaaaagtaagtggaaattacatttccaagaaaggaaatgaaataattgcaggcccaaggtctgcaaaatatgtgttgaattgacagtgaaaaggatccatgtgttgacagacacagttgttagatgccataaaggcagatgtgaagctcaatttatttctcatcttgcttg

SEQ ID NO: 181235 - DNA, 6730 bp, Homo sapiens
  Payload ID: 15695
  Gene Symbol: SHTN1
  Gene Name: shootin 1
  Uniprot ID: A0MZ66
  ENST ID: ENST00000615301
  CDS Start-End: 287-1657
aggctggcatagcggctgccgacccgccctcgttcctccaccccctgaacgggactgctgggcccgccccgccccgcctgcaggtgaagcggccgcagccgccgagtaggtgcgtggggatgatctcactcgcgcgctccgcgccaggaggaggaggagcgggagcggatccaacttccgggtagtggagccgcaagccaccggcatcttgctttttcttccccctcctcctgtgtgccccgcgccgctccctctttcccttttattcccggccccacccgccaaaatgaacagctcggacgaagagaagcagctgcagctcattaccagtctgaaggagcaagcaataggcgaatatgaagaccttagagcagagaaccagaaaacaaaggagaagtgtgacaaaattaggcaagaacgagatgaagccgttaaaaaactggaagaatttcagaaaatttctcacatggtcatagaggaagttaatttcatgcagaaccatcttgaaatagagaagacttgtcgagaaagtgctgaagctttggcaacaaagctaaataaagaaaataaaacgttgaaaagaatcagcatgttgtacatggccaagctgggaccagatgtaataactgaagagataaacattgatgatgaagattcgactacagacacagacggtgccgccgagacttgtgtctcagtacagtgtcagaagcaaattaaagaacttcgagatcaaattgtatctgttcaggaggaaaagaagattttagccattgagctggaaaatctcaagagcaaactcgtagaagtaattgaagaagtaaataaagttaaacaagaaaagactgttttaaattcagaagttcttgaacagagaaaagtcttagaaaaatgcaatagagtgtccatgttagctgtagaagagtatgaggagatgcaagtaaacctggagctggagaaggaccttcgaaagaaagcagagtcatttgcacaagagatgttcattgagcaaaacaagctaaagagacaaagccaccttctgctgcagagctccatccctgatcagcagcttttgaaagctttagacgaaaatgcaaaactcacccagcaacttgaagaagagagaattcagcatcaacaaaaggtcaaagaattagaagagcaactagaaaatgaaacactccacaaagaaatacacaacctcaaacagcaactggagcttctagaggaagataaaaaggaattggaattgaaatatcagaattctgaagagaaagccagaaatttaaagcactctgttgatgaactccagaaacgagtgaaccagtctgagaattcagtacctccaccacctcctcctccaccaccacttccccctccacctcccaatcctatccgatccctcatgtccatgatccggaaacgatcccaccccagtggcagtggtgctaagaaagaaaaggcaactcaaccagaaacaactgaagaagtcacagatctaaagaggcaagcagttgaagagatgatggatagaattaaaaagggagttcatcttagacccgttaatcagacagccagaccgaagacaaagccagaatcttcgaaaggctgcgaaagtgcagtggatgaactaaaaggaatactggcctcccagtagcattggatgcaggaaaaaatacattgacggtgaaaaacaagccgaaccagttgtagttttagatcctgtttctacacatgaaccccaaaccaaagaccaggttgctgaaaaagatccaactcaacacaaggaggatgaaggcgaaattcaaccagaaaacaaagaagacagcattgaaaacgtgagagagacagacagctccaactgctgatccataaaccagaagcctgacatgtttggaagtccttttcaataagcacatgattagtgttgttatattggcaagggctgtagacattctgctctggtcactgtattcagaatacaggttcttttctggtgtcacttttgtaagtagcaactataaacataagtaagctgtttagcaaaacacacattcctagtaggttttggttttttgatctttataaagatgaggtttttttcctagttactgtattaagtatgacttcttttagaaggttacaaaaaaattcagatgttgatacctttttaggaaatgtgcataccactcatcaaatggaatgctgaaagtttgaggtgcttgtatataatcggataaacaaaactgatcaacccaatgtgattttaaaagcccccaaagaagcttctgttttgggtctgatcctcttgatggagaaactgcagcagcatggaaattgttgggtactgtggcatacaagttattttctacagtagactgagataaactgaaaactcaggagctggcatcaaactcgtagtcccatagtcagtgttaattacacacattgttaactattggatgaaaaatacatgctattgattgtgtccaaagcctcccgaggacctccgtggggatgctctggtagcctgaatacagaactgaggtgaaagtccaaaccttgaattttacagtagtaagttggtaaaccatgtgctctgtgctatgagttaattatgttttcccaaatactaatgtggcacaagtaccatattttatcagagttcttatgtacagtatggtgaagataagtgacaagcacacatttttcttgcttcactgctgttctatattacacaggtttgttgttgttttttttaaaaaagaaattaagcagtagttagtctctaaaaatacaatgtttcaggctaccacagtgaataaatagaaatgtaatcagggattaaaaaaaaaacttatgcagcttttcaaagttgattgtttcaaaattggtgtttatttaaaataagtggtaatgtacttgaatgcactttttatgacaatgattcagtaatggtaattttactattaaagaaagtgaaaggtttagttttgttagcatggctcagcatgtagctgtcaggtgtttttcacctaagggcaaaagaaaatgatagtaataattgcagtagttgtattgtattgtatttttgcacgtgtggtaagcataggcttgaagaggtgggtaggcaggtacatgtacttcctaaatttggagataattatctttctgtaagttcgttatgcttgactgtttccatgttctcccaataatgattttatagttacttatcactttactcatggagaattaaaacgtaatgtttttcaactgtatctttctttaactggataatactgctatatgatatgcttactacagactgcattaattcacgaaacgaattctgttatgctgtaatttgaactctcctcaccacaacttattaaaaaggcaccaatagtttcccattaagggtcagttgtggttattattaacgtttctggtttagttccccaagcttgacattctttaatagaaaattgtatatgatttgacaactttagtaatttttaatagtccctaagatggtttattgagttttctttcatgtttctttgtgctgtcttccttcttgcatctgtgatctgtctgccagcatgcaactcacacacatttaggaatataaaaatatgtacactgtctttccatatttcatcacaccatcacagaataatatggttatcaaaataccctcctttctagagtaagaagttgccctttgggtgaaatgtgttagctggactagggaacaattagtaacaggtattttgaaagtattcctgccttttttaagctgcttactttctctcactgtgattacaaagcattttaaattaatttgacatgaaggtatttgatggaagatattcactcacctttttctgcctacagtttttcccttttcactttggttttgagggggttttgcccctggctggggtgacactgtcaaccaaagcaagggatcccaaataggaagacataggagaaccgtgcttatatctgcaaggtatgttcatagctattgcacacacaaaacttacatacgtcctgcttacacaattttaagttggaaaagactgcatctttatgtttttgatttctctaaaaggttatttatgcttccttctgtttgggaaagataaattaagtcttgtgcgctatagaggattttttttctttaagaaaaacgaatgttgatgcattttatagcccgagtgaggaacagagatagaggtactttgtgccattgctattaaagaaaaagaaaatgtctctttttttttctggaagaataagattttaattaaagcacttgcacccttttgtatgtgagctggtctcaaacaaagtcctcacccacagcagtttcagcagctgaacagtcccatggaagttctgactggcaggcatcaacagggctattagcacccagcatagtttgccctgagtacggaggatggatgctttggctctaactactcaccaataattgctccttccttaccttctttgttaatggtaaactgctggaaatggagtagtacaggtaacaattatttttaattgtctttccagaccagtttttggttgtgtgttcagtaaatgatagtctgtatcacagccttcaagtctggattatttttctaaatgcatactctacctgttcagttacactcgttgtggaacaacattagcttatataccagtaagttgtcgagaatggataaccatctgtcattatcactgaccttcaaagactcatcaagcagtccctgcataaggattggagtggtttgaagtttctcttccaagcactaacatgtccctatcccacagtcattttaatttggtatgtgactgtttctttcatttctttcacagataatattatatatacagttatataaatatatttcatattaaatgttatataacacaagagagagaaagtataagtagaaagagtgcctagcaccctaagaaatttaaattaaaatgctaattatccattggtgagtgcagtctcgaggataggtgagtaaactgctctgtgttgaagtcacactgctgacctggttattgtaataaatcacctctttggttaatttaatttagttattttgttattcattgtacatttttgctctggttttagtaatttaattataatttatatcactgttccagggcatagtctcatgatgtgtgtgtgtgtgtgtgtgtgtgtgtgtgtatttttcaaagggtatgtgaacacccagtcatgtttgttctgcctttcaaatgaattttccttccagtttctcctacccgttgcttgttgctaagcatcaggagaggcagtagcagccacaaactgtgacacagttcttccaacttagagtgataccaaccaagtctcctgcatgctctgagagagtctgcgcctgagccagtttcaaatcatagctttgagaataaagagttggctctgttatgaggaaattaaggtcccttgttagtactctttaaaaggagaggtcctcagtgtgcttaataaaaattatagaatttgtcagaagtctaaacttagccaactcccctacaggtcagtacatagcaatttatataatttttaggagaagcaaatggtaaccattttaacgagaccctaaatcatataaagtggttggatattattatatctatatgtttgtgtctgaatatatttatttctgctactcctctgctataatcccaacactggcttacaaaagagcaattcaggcaatggatatgtcacatcattttttttttttttttttatcacttgcggattgctttttaaatgctgtggtatgaataactgggcatttaataaccttgagaatattaattcatttactgatgtgcttattcatttatactcattcttactccaaaaaggatctaagaagactcgcaaagataaaaataatacaagaaaaactaaaatttaaaaaggagagggaattaggaaaaaaggaatcaagggtaggaaagtgagatgaaattggctcttacaaaaaatggtgatgctctcacacttctacgtgaggttggttacaaaaatgtgtcagtgcttttcagcacagacatgtagaataaacacagaagatggacatctgttcccagcacagagagcttctagggtcattaggtttttgttctcagagatattctgattggtaaaggatggggtgtttgactgagtgtggagttggcaacaaaaatattggcctcttttactggagcgtgtccctgaaaaatggacaggagagctaatagacaaacaaaatccacatggaagtgtggtggctgcaaaacgaagttcacagaatttcaggcaaaaacatcatatatgtaatttaccaaacagtggaattagaagaataaaaaccacaagagttggtgaagttgaagaggaaactccatgtggagacacggcgccgtacttcagacctcccggtctactaatactgatggtgtggctggaacctggggtgtgtacagccctatccagaggatgctcctgtttcggctgattcctctacaccttgtgtggggaaggtgggcaccagcggctccctagccgcagcagcctcaagtgcctccgcagccttttcagcttcctcattaaagtaaaaaaaagtgtgttcttctttgaaacctatttaaagtaacaataaagtttactgtctaa

SEQ ID NO: 181236 - DNA, 1840 bp, Homo sapiens
  Payload ID: 15696
  Gene Symbol: SDR16C5
  Gene Name: short chain dehydrogenase/reductase family 16C, member 5
  Uniprot ID: Q8N3Y7
  ENST ID: ENST00000303749
  CDS Start-End: 639-1568
gccgcacccactcctgcccctgcctgcaccccacccacttcccggggacttccgagcccacgcccacatcctttacctccaaggggcaaggaagctgttgacttaagatcccatgtggagcagtcagatgctgctggagaactccccgcactgcaggctccagacacacgacctggcccctcccccgtggacgcctatactgctctgttctctaattccagggttcccaacctcggggttgtgccttgcaaatacctgggaaacttttctagctaatgcctaggcccctaccaacccagaaattcccatctaataatctagggtacagcctaggcattgaaacgttaagcctaagagaaatccggcgcacgcatccagtttccaccaccgaatttccagcttcttaaatctgcaggtccagaaaaagaagatgggagtgctgcccacgtcgcgcactggggctacggccggccccacccctggcgctgccgcggcagtcccgcccttggacttgggcggcgcctggataaacacctgaacctgactgagctccgagccagggactcgggtgcctggggcagacgaggccggcttctccgcggacagctagggagagtgtcctgggtgtcagccagaacatgtctttcaacctgcaatcatcaaagaaactgttcattttcttaggaaaatcactgtttagtcttctggaggctatgatttttgccttactcccaaagccacggaagaacgttgctggtgaaatagtcctcatcacaggtgctggaagtggactcggaaggctcttagccttgcagtttgcccggctgggatctgttcttgttctctgggatatcaataaggaggggaatgaggaaacatgtaagatggctcgggaagctggagccacaagagtgcacgcctatacctgcgattgcagccaaaaggaaggagtgtatagagtagccgaccaggttaaaaaagaagtcggcgatgtttccatcctaatcaacaatgccggaatcgtaacaggcaaaaagttccttgactgtccagatgagcttatggaaaagtcatttgatgtgaatttcaaagcacatttatggacttataaagcctttctacctgctatgattgctaatgaccatggacatttggtttgcatttcaagttcagctggattaagtggagtaaatgggctggcagattactgtgcaagtaaatttgcagcctttgggtttgctgaatctgtatttgtagaaacatttgtccaaaaacaaaaggggatcaaaaccacgattgtgtgccccttttttataaaaactggaatgtttgaaggttgtactacaggctgtccttctctgttgccaattctggaaccaaaatatgcagttgaaaaaatagtagaagctattctacaagaaaaaatgtacttgtatatgccaaagttgttatacttcatgatgtttcttaaaagctttttgcccctcaagacaggactgcttatagctgactatttgggcatccttcatgcaatggatggctttgttgaccaaaagaagaagctctaaagaccaactctatggctaaggtcatctgatacacagtgttacataatgcgtacttcaatgaagaaaagtatttttgtctgacagtggaatatatctggagaccacaagtaccactcctattctgttatctggactagaattttcaatcaatgtgtttgaaaataatgttgctatcacctatttggttgagttttggttttttctttttctttttttttccaaaaataaagacagcccatttttgtcatttccattaccacagatgtaagaaa

SEQ ID NO: 181237 - DNA, 2399 bp, Homo sapiens
  Payload ID: 15696
  Gene Symbol: SDR16C5
  Gene Name: short chain dehydrogenase/reductase family 16C, member 5
  Uniprot ID: Q8N3Y7
  ENST ID: ENST00000396721
  CDS Start-End: 132-929
ggacttgggcggcgcctggataaacacctgaacctgactgagctccgagccagggactcgggtgcctggggcagacgaggccggcttctccgcggacagctagggagagtgtcctgggtgtcagccagaacatgtctttcaacctgcaatcatcaaagaaactgttcattttcttaggaaaatcactgtttagtcttctggaggctatgatttttgccttactcccaaagccacggaagaacgttgctggtgaaatagtcctcatcacaggtgctggaagtggactcggaaggctcttagccttgcagtttgcccggctgggatctgttcttgttctctgggatatcaataaggaggggaatgaggaaacatgtaagatggctcgggaagctggagccacaagagtgcacgcctatacctgcgattgcagccaaaaggaaggagtgtatagagtagccgaccagacttataaagcctttctacctgctatgattgctaatgaccatggacatttggtttgcatttcaagttcagctggattaagtggagtaaatgggctggcagattactgtgcaagtaaatttgcagcctttgggtttgctgaatctgtatttgtagaaacatttgtccaaaaacaaaaggggatcaaaaccacgattgtgtgccccttttttataaaaactggaatgtttgaaggttgtactacaggctgtccttctctgttgccaattctggaaccaaaatatgcagttgaaaaaatagtagaagctattctacaagaaaaaatgtacttgtatatgccaaagttgttatacttcatgatgtttcttaaaagctttttgcccctcaagacaggactgcttatagctgactatttgggcatccttcatgcaatggatggctttgttgaccaaaagaagaagctctaaagaccaactctatggctaaggtcatctgatacacagtgttacataatgcgtacttcaatgaagaaaagtatttttgtctgacagtggaatatatctggagaccacaagtaccactcctattctgttatctggactagaattttcaatcaatgtgtttgaaaataatgttgctatcacctatttggttgagttttggttttttctttttctttttttttccaaaaataaagacagcccatttttgtcatttccattaccacagatgtaagaaagtgataagccatggccatgagctgccctgagctttggtcgttggggaggtggctcaaatggagccagcggctgtggttgacctgccttggggagcagggctgaggggcgaagaggacatgtggatatccagccagaatgccctctctccagaggacacacagctctggatttctacccccttgctatcctctctggccattttgaacctgtaccacctaatgtagaaaaggcccgcctccagtgcccttctttccaaaacagctacacaaatgcttctgaatgccctggatacgcagaccgagtggcagtctggctaaaggcccatccagcactattgtgcccaagagccttaccgggcattccctgaagccccctcataggcagtgatcctagaccaaactcttaaatagaatcacttttgtttcctagaagagatcaaagagtggttgcttcttactttgaagatgaaattataccaagttaggttttttgctatctattgatccaaaaaatatattcgtgcaattaaagttaagtgttcaacttagtatttcaagttgggattcaggttgaggcattttcctgcagaatgggcaattttatgcatttatattcatcagtgctgccctcactttggatctattgtattcttacagtttaatcaactggcaaagtgctttcatgctttggagattaactataaaagcaagattaagaaaaatatgttaattaccatatccctggaactccttctcaggctggtgggggcagccttgcaagagaaacagcagcctttgtctcttccctcttgtggggagcaaggaggggatgagcggtaccttgggagacccggtaaaagtctaaagaattgagaatttgactatcttgggggtaaaatgctgtcataggggcagcagtctcagggggtgtaaactctggaatccactatggtttaccttgagtggcctgcacgaacatgacagccctgatctgtatttcctttccattcagaaaaccttaaaaaaaaaaaacttgttttatgataatattataacaatcataactaacatttactgtgcccggcagcaaattaagtatttgacaaacattatttcattaaacgagactgtcaatcattactcaaagaatgatgaaggtatttggtgtatgccaaagaataaaggcgttttatttcac

SEQ ID NO: 181238 - DNA, 1988 bp, Homo sapiens
  Payload ID: 15696
  Gene Symbol: SDR16C5
  Gene Name: short chain dehydrogenase/reductase family 16C, member 5
  ENST ID: ENST00000522671
  CDS Start-End: 733-1689
agagtgcctggtgactcttacgctagcctcatttctcggcttcatcttgttagaacaaatttcctcgccctcttctcctaggccgcctgccagcgccgcacccactcctgcccctgcctgcaccccacccacttcccggggacttccgagcccacgcccacatcctttacctccaaggggcaaggaagctgttgacttaagatcccatgtggagcagtcagatgctgctggagaactccccgcactgcaggctccagacacacgacctggcccctcccccgtggacgcctatactgctctgttctctaattccagggttcccaacctcggggttgtgccttgcaaatacctgggaaacttttctagctaatgcctaggcccctaccaacccagaaattcccatctaataatctagggtacagcctaggcattgaaacgttaagcctaagagaaatccggcgcacgcatccagtttccaccaccgaatttccagcttcttaaatctgcaggtccagaaaaagaagatgggagtgctgcccacgtcgcgcactggggctacggccggccccacccctggcgctgccgcggcagtcccgcccttggacttgggcggcgcctggataaacacctgaacctgactgagctccgagccagggactcgggtgcctggggcagacgaggccggcttctccgcggacagctagggagagtgtcctgggtgtcagccagaacatgtctttcaacctgcaatcatcaaagaaactgttcattttcttaggaaaatcactgtttagtcttctggaggctatgatttttgccttactcccaaagccacggaagaacgttgctggtgaaatagtcctcatcacaggtgctggaagtggactcggaaggctcttagccttgcagtttgcccggctgggatctgttcttgttctctgggatatcaataaggaggggaatgaggaaacatgtaagatggctcgggaagctggagccacaagagtgcacgcctatacctgcgattgcagccaaaaggaaggagtgtatagagtagccgaccaggttaaaaaagaagtcggcgatgtttccatcctaatcaacaatgccggaatcgtaacaggcaaaaagttccttgactgtccagatgagcttatggaaaagtcatttgatgtgaatttcaaagcacatttatggacttataaagcctttctacctgctatgattgctaatgaccatggacatttggtttgcatttcaagttcagctggattaagtggagtaaatgggctggcagattactgtgcaagtaaatttgcagcctttgggtttgctgaatctgtatttgtagaaacatttgtccaaaaacaaaaggggatcaaaaccacgattgtgtgccccttttttataaaaactggaatgtttgaaggttgtactacaggctgtccttctctgttgccaattctggaaccaaaatatgcagttgaaaaaatagtagaagctattctacaagaaaaaatgtacttgtatatgccaaagttgttatacttcatgatgtttcttaaaaggcttcatctggcacaggatgggtcagaatgcctgactgaggctatgtgggacagagcaaaggatcctggacaagcaattcgaaattcaggcttacgatcccactattcactaagtctgtgactctgagcgtgccctttattctccagctttttgcccctcaagacaggactgcttatagctgactatttgggcatccttcatgcaatggatggctttgttgaccaaaagaagaagctctaaagaccaactctatggctaaggtcatctgatacacagtgttacataatgcgtacttcaatgaagaaaagtatttttgtctgacagtggaatatatctggagaccacaagtaccactcctattctgttatctggactagaattttcaatcaatgtgtttgaaaataatgttgctatcacct

SEQ ID NO: 181239 - DNA, 1504 bp, Homo sapiens
  Payload ID: 15697
  Gene Symbol: SDR39U1
  Gene Name: short chain dehydrogenase/reductase family 39U, member 1
  Uniprot ID: Q9NRG7
  ENST ID: ENST00000399390
  CDS Start-End: 230-1189
agtcgctatgcgtgtgcttgtgggtgagggagggcagaaagggagagtgctgggcgggcttagtcggagattgaggactgggaatccgcttccgggagggcactgtctagtgcacaggcaacctggccttggcctcctagcccgagaagccgaatctccctaatccctgtgacctgtgtcacctctgcatcgcgaggagggggataagtggggagaagcctggtgtcagatgggatggcgccggaagagggtgccacagcggggacggaaggcgcccccaccccaactccacgggaatataaacaatttgtattttccgatcaggtggcgggacaggcttcattgggacagccctaacccagctgctgaatgccagaggcacgaagtgacgttggtctcccgaaagcccgggcccggccggatcacgtgggatgagctcgctgcatcggggctgccgagctgcgatgccgccgtcaacctggccggagagaacatcctcaaccctctccgaagatggaatgaaaccttccaaaaagaggtaatcggcagccgcctagagaccacccaattgctggctaaagccatcaccaaagccccacaaccccccaaggcctgggtcttagtcacaggtgtagcttactaccagcccagtctgactgcggagtatgatgaagacagcccaggaggggactttgactttttctccaacctcgtaaccaaatgggaagctgcagccaggcttcctggagattctacacgccaggtggtggtgcgctcaggggttgtgctgggccgtgggggtggtgccatgggccacatgctgctgccctttcgcctgggcctggggggccccatcggctcaggccaccaattcttcccctggatacacatcggggacctggcaggaatcctgacccatgcccttgaagcaaaccacgtgcacggggtcctgaatggagtggctccatcctccgccactaatgctgagtttgcccagaccttgggtgctgccctgggccgccgagccttcatccctctccccagcgctgtggtgcaagctgtctttgggcgacagcgtgccatcatgctgctggagggccagaaggtgatcccacagcgaacactggccactggctaccagtattccttcccagagctaggggctgccttaaaggaaattgtagcctaagtaggtcgtggcaagggcctgaggcctgttcctcacaggcttccaggttaggcactgtgaataggctcagctcctctagagagctgaagccatctggttcttagattcctctcccagtcctctttcccattgttctgttgctccaccttattgtctcaaggccgtaatctcatcaggttgggacattaatcttttcaactccttgtaagatttcccagtttggtttctctacatgtcctgcagctgccccacttctcctttacgctgtgtagagaatgctctgcagtttaggcaataaaaataaattgtctcact

SEQ ID NO: 181240 - DNA, 1233 bp, Homo sapiens
  Payload ID: 15697
  Gene Symbol: SDR39U1
  Gene Name: short chain dehydrogenase/reductase family 39U, member 1
  Uniprot ID: Q9NRG7
  ENST ID: ENST00000399395
  CDS Start-End: 35-916
aaactttacgcaggcgcgttaggtcctagtcgctatgcgtgtgcttgtgggtggcgggacaggcttcattgggacagccctaacccagctgctgaatgccagaggccacgaagtgacgttggtctcccgaaagcccgggcccggccggatcacgtgggatgagctcgctgcatcggggctgccgagctgcgatgccgccgtcaacctggccggagagaacatcctcaaccctctccgaagatggaatgaaaccttccaaaaagaggtaatcggcagccgcctagagaccacccaattgctggctaaagccatcaccaaagccccacaaccccccaaggcctgggtcttagtcacaggtgtagcttactaccagcccagtctgactgcggagtatgatgaagacagcccaggaggggactttgactttttctccaacctcgtaaccaaatgggaagctgcagccaggcttcctggagattctacacgccaggtggtggtgcgctcaggggttgtgctgggccgtgggggtggtgccatgggccacatgctgctgccctttcgcctgggcctggggggccccatcggctcaggccaccaattcttcccctggatacacatcggggacctggcaggaatcctgacccatgcccttgaagcaaaccacgtgcacggggtcctgaatggagtggctccatcctccgccactaatgctgagtttgcccagaccttgggtgctgccctgggccgccgagccttcatccctctccccagcgctgtggtgcaagctgtctttgggcgacagcgtgccatcatgctgctggagggccagaaggtgatcccacagcgaacactggccactggctaccagtattccttcccagagctaggggctgccttaaaggaaattgtagcctaagtaggtcgtggcaagggcctgaggcctgttcctcacaggcttccaggttaggcactgtgaataggctcagctcctctagagagctgaagccatctggttcttagattcctctcccagtcctctttcccattgttctgttgctccaccttattgtctcaaggccgtaatctcatcaggttgggacattaatcttttcaactccttgtaagatttcccagtttggtttctctacatgtcctgcagctgccccacttctcctttacgctgtgtagagaatgctctgcagtttaggcaataaaaataaattgtctcactaa

SEQ ID NO: 181241 - DNA, 1041 bp, Homo sapiens
  Payload ID: 15697
  Gene Symbol: SDR39U1
  Gene Name: short chain dehydrogenase/reductase family 39U, member 1
  ENST ID: ENST00000538105
  CDS Start-End: 105-740
cgggacaggcttcattgggacagccctaacccagctgctgaatgccagaggccacgaagtgacgttggtctcccgaaagcccgggcccggccggatcacgtgggatgagctcgctgcatcggggctgccgagctgcgatgccgccgtcaacctggccggagagaacatcctcaaccctctccgaagcttactaccagcccagtctgactgcggagtatgatgaagacagcccaggaggggactttgactttttctccaacctcgtaaccaaatgggaagctgcagccaggcttcctggagattctacacgccaggtggtggtgcgctcaggggttgtgctgggccgtgggggtggtgccatgggccacatgctgctgccctttcgcctgggcctggggggccccatcggctcaggccaccaattcttcccctggatacacatcggggacctggcaggaatcctgacccatgcccttgaagcaaaccacgtgcacggggtcctgaatggagtggctccatcctccgccactaatgctgagtttgcccagaccttgggtgctgccctgggccgccgagccttcatccctctccccagcgctgtggtgcaagctgtctttgggcgacagcgtgccatcatgctgctggagggccagaaggtgatcccacagcgaacactggccactggctaccagtattccttcccagagctaggggctgccttaaaggaaattgtagcctaagtaggtcgtggcaagggcctgaggcctgttcctcacaggcttccaggttaggcactgtgaataggctcagctcctctagagagctgaagccatctggttcttagattcctctcccagtcctctttcccattgttctgttgctccaccttattgtctcaaggccgtaatctcatcaggttgggacattaatcttttcaactccttgtaagatttcccagtttggtttctctacatgtcctgcagctgccccacttctcctttacgctgtgtagagaatgctctgcagtttaggcaataaaaa

SEQ ID NO: 181242 - DNA, 556 bp, Homo sapiens
  Payload ID: 15697
  Gene Symbol: SDR39U1
  Gene Name: short chain dehydrogenase/reductase family 39U, member 1
  ENST ID: ENST00000556249
  CDS Start-End: 1-556
ggcttcattgggacagccctaacccagctgctgaatgccagaggccacgaagtgacgttggtctcccgaaagcccgggcccggccggatcacgtggcttactaccagcccagtctgactgcggagtatgatgaagacagcccaggaggggactttgactttttctccaacctcgtaaccaaatgggaagctgcagccaggcttcctggagattctacacgccaggtggtggtgcgctcaggggttgtgctgggccgtgggggtggtgccatgggccacatgctgctgccctttcgcctgggcctggggggccccatcggctcaggccaccaattcttcccctggatacacatcggggacctggcaggaatcctgacccatgcccttgaagcaaaccacgtgcacggggtcctgaatggagtggctccatcctccgccactaatgctgagtttgcccagaccttgggtgctgccctgggccgccgagccttcatccctctccccagcgctgtggtgcaagctgtctttgggcgacagcgtgccatcatgctgctgga

SEQ ID NO: 181243 - DNA, 934 bp, Homo sapiens
  Payload ID: 15697
  Gene Symbol: SDR39U1
  Gene Name: short chain dehydrogenase/reductase family 39U, member 1
  ENST ID: ENST00000555355
  CDS Start-End: 549-934
cgacaggatgagctcgctgcatcggggctgccgagctgcgatgccgccgtcaacctggccggagagaacatcctcaaccctctccgaagatggaatgaaaccttccaaaaagaggtaatcggcagccgcctagagaccacccaattgctggctaaagccatcaccaaagccccacaaccccccaaggcctgggtcttagtcacaggtgtagcttactaccagcccagtctgactgcggagtatgatgaagacagcccaggaggggactttgactttttctccaacctcgtaaccaaatgggaagctgcagccaggcttcctggagattctacacgccaggtggtggtgcgctcaggtgagaaacgggcctgggtatcagacagggttggaatgtcttctctgggctggggaagtgatgggattaggagagctgagattacaattacagagtgagaggatgccaccacttctagccaacctgcagatgagaaggtgtgaggtcttaaagacagccatactgctcacttctgttacagagccaagtcagcatggggagagtgaggaaggggaaacagaaaccaggaggagcagtgggctccttcaaggctgagaggacccctgtaccttccctctttcctgctctaggggttgtgctgggccgtgggggtggtgccatgggccacatgctgctgccctttcgcctgggcctggggggccccatcggctcaggccaccaattcttcccctggatacacatcggggacctggcaggaatcctgacccatgcccttgaagcaaaccacgtgcacggggtcctgaatggagtggctccatcctccgccactaatgctgagtttgcccagaccttgggtgctgccctgggccgccgagccttcatccctctccccagcgctgtggtgcaagctgtctttgg

SEQ ID NO: 181244 - DNA, 735 bp, Homo sapiens
  Payload ID: 15697
  Gene Symbol: SDR39U1
  Gene Name: short chain dehydrogenase/reductase family 39U, member 1
  ENST ID: ENST00000556523
  CDS Start-End: 536-735
tcattgggacagccctaacccagctgctgaatgccagaggccacgaagtgacgttggtctcccgaaagcccgggcccggccggatcacgtgggatgagctcgctgcatcggggctgccgagctgcgatgccgccgtcaacctggccggagagaacatcctcaaccctctccgaaggtcagcccgggccctaaagctgatacccactagagcacagggaggacagtgccccactgatgagaacctatggaatgaaaccttccaaaaagaggtaatcggcagccgcctagagaccacccaattgctggctaaagccatcaccaaagccccacaaccccccaaggcctgggtcttagtcacaggtcttactaccagcccagtctgactgcggagtatgatgaagacagcccaggaggggactttgactttttctccaacctcgtaaccaaatgggaagctgcagccaggcttcctggagattctacacgccaggtggtggtgcgctcaggggttgtgctgggccgtgggggtggtgccatgggccacatgctgctgccctttcgcctgggcctggggggccccatcggctcaggccaccaattcttcccctggatacacatcggggacctggcaggaatcctgacccatgcccttgaagcaaaccacgtgcacggggtcctgaatggagtggctccatcctccgccactaatgctgagtttgcccagaccttgggtgc

SEQ ID NO: 181245 - DNA, 769 bp, Homo sapiens
  Payload ID: 15697
  Gene Symbol: SDR39U1
  Gene Name: short chain dehydrogenase/reductase family 39U, member 1
  ENST ID: ENST00000555225
  CDS Start-End: 483-769
ggtggcgggacaggcttcattgggacagccctaacccagctgctgaatgccagaggccacgaagtgacgttggtctcccgaaagcccgggcccggccggatcacgtgggatgagctcgctgcatcggggctgccgagctgcgatgccgccgtcaacctggccggagagaacatcctcaaccctctccgaagatggaatgaaaccttccaaaaagaggtaatcggcagccgcctagagaccacccaattgctggctaaagccatcaccaaagccccacaaccccccaaggcctgggtcttagtcacaggtcttactaccagcccagtctgactgcggagtatgatgaagacagcccaggaggggactttgactttttctccaacctcgtaaccaaatgggaagctgcagccaggcttcctggagattctacacgccaggtggtggtgcgctcaggggttgtgctgggccgtgggggtggtgccatgggccacatgctgctgccctttcgcctgggcctggggggccccatcggctcaggccaccaattcttcccctggatacacatcggggacctggcaggaatcctgacccatgcccttgaagcaaaccacgtgcacggggtcctgaatggagtggctccatcctccgccactaatgctgagtttgcccagaccttgggtgctgccctgggccgccgagccttcatccctctccccagcgctgtggtgcaagctgtctttgggcgacagcgtgccatcatgctgctgga

SEQ ID NO: 181246 - DNA, 976 bp, Homo sapiens
  Payload ID: 15697
  Gene Symbol: SDR39U1
  Gene Name: short chain dehydrogenase/reductase family 39U, member 1
  ENST ID: ENST00000555365
  CDS Start-End: 415-795
gtgtgcttgtgggtggcgggacaggcttcattgggacagccctaacccagctgctgaatgccagaggccacgaagtgacgttggtctcccgaaagcccgggcccggccggatcacgtggatggaatgaaaccttccaaaaagaggtaatcggcagccgcctagagaccacccaattgctggctaaagccatcaccaaagccccacaaccccccaaggcctgggtcttagtcacaggtgtagcttactaccagcccagtctgactgcggagtatgatgaagacagcccaggaggggactttgactttttctccaacctcgtaaccaaatgggaagctgcagccaggcttcctggagattctacacgccaggtggtggtgcgctcaggggttgtgctgggccgtgggggtggtgccatgggccacatgctgctgccctttcgcctgggcctggggggccccatcggctcaggccaccaattcttcccctggatacacatcggggacctggcaggaatcctgacccatgcccttgaagcaaaccacgtgcacggggtcctgaatggagtggctccatcctccgccactaatgctgagtttgcccagaccttgggtgctgccctgggccgccgagccttcatccctctccccagcgctgtggtgcaagctgtctttgggcgacagcgtgccatcatgctgctggagggccagaaggtgatcccacagcgaacactggccactggctaccagtattccttcccagagctaggggctgccttaaaggaaattgtagcctaagtaggtcgtggcaagggcctgaggcctgttcctcacaggcttccaggttaggcactgtgaataggctcagctcctctagagagctgaagccatctggttcttagattcctctcccagtcctctttcccattgttctgttgctccaccttattgtctcaaggccgtaatctcatcaggttgg

SEQ ID NO: 181247 - DNA, 681 bp, Homo sapiens
  Payload ID: 15697
  Gene Symbol: SDR39U1
  Gene Name: short chain dehydrogenase/reductase family 39U, member 1
  ENST ID: ENST00000553343
  CDS Start-End: 173-681
cgaaagcccgggcccggccggatcacgtgggatgagctcgctgcatcggggctgccgagctgcgatgccgccgtcaacctggccggagagaacatcctcaaccctctccgaaggtcagcccgggccctaaagctgatacccactagagcacagggaggacagtgccccactgatgagaacctcttactaccagcccagtctgactgcggagtatgatgaagacagcccaggaggggactttgactttttctccaacctcgtaaccaaatgggaagctgcagccaggcttcctggagattctacacgccaggtggtggtgcgctcaggggttgtgctgggccgtgggggtggtgccatgggccacatgctgctgccctttcgcctgggcctggggggccccatcggctcaggccaccaattcttcccctggatacacatcggggacctggcaggaatcctgacccatgcccttgaagcaaaccacgtgcacggggtcctgaatggagtggctccatcctccgccactaatgctgagtttgcccagaccttgggtgctgccctgggccgccgagccttcatccctctccccagcgctgtggtgcaagctgtctttgggcgacagcgtgccatcatgctgctggagggccagaaggtgatcccacagcgaacactggccactgg

SEQ ID NO: 181248 - DNA, 1364 bp, Homo sapiens
  Payload ID: 15697
  Gene Symbol: SDR39U1
  Gene Name: short chain dehydrogenase/reductase family 39U, member 1
  ENST ID: ENST00000554698
  CDS Start-End: 509-1066
aatccgcttccgggagggcactgtctagtgcacaggcaacctggccttggcctcctagcccgagaagccgaatctccctaatccctgtgacctgtgtcacctctgcatcgcgaggagggggataagtggggagaagcctggtgtcagatgggatggcgccggaagagggtgccacagcggggacggaaggcgcccccaccccaactccacgggaatataaacaatttgtattttccgatcaggtggcgggacaggcttcattgggacagccctaacccagctgctgaatgccagaggccacgaagtgacgttggtctcccgaaagcccgggcccggccggatcacgtgggatgagctcgctgcatcggggctgccgagctgcgatgccgccgtcaacctggccggagagaacatcctcaaccctctccgaaggtcagcccgggccctaaagctgatacccactagagcacagggaggacagtgccccactgatgagaacctgtgagctatggcttactaccagcccagtctgactgcggagtatgatgaagacagcccaggaggggactttgactttttctccaacctcgtaaccaaatgggaagctgcagccaggcttcctggagattctacacgccaggtggtggtgcgctcaggggttgtgctgggccgtgggggtggtgccatgggccacatgctgctgccctttcgcctgggcctggggggccccatcggctcaggccaccaattcttcccctggatacacatcggggacctggcaggaatcctgacccatgcccttgaagcaaaccacgtgcacggggtcctgaatggagtggctccatcctccgccactaatgctgagtttgcccagaccttgggtgctgccctgggccgccgagccttcatccctctccccagcgctgtggtgcaagctgtctttgggcgacagcgtgccatcatgctgctggagggccagaaggtgatcccacagcgaacactggccactggctaccagtattccttcccagagctaggggctgccttaaaggaaattgtagcctaagtaggtcgtggcaagggcctgaggcctgttcctcacaggcttccaggttaggcactgtgaataggctcagctcctctagagagctgaagccatctggttcttagattcctctcccagtcctctttcccattgttctgttgctccaccttattgtctcaaggccgtaatctcatcaggttgggacattaatcttttcaactccttgtaagatttcccagtttggtttctctacatgtcctgcagctgccccacttctcctttacgctgtgtagagaatgctctgcagtttaggcaataa

SEQ ID NO: 181249 - DNA, 1325 bp, Homo sapiens
  Payload ID: 15697
  Gene Symbol: SDR39U1
  Gene Name: short chain dehydrogenase/reductase family 39U, member 1
  ENST ID: ENST00000553930
  CDS Start-End: 515-1021
ccgaaaggggcatgcgcagagaggtcgtagtcgcgtctgaggtgaggtggcgggacaggcttcattgggacagccctaacccagctgctgaatgccagaggccacgaagtgacgttggtctcccgaaagcccgggcccggccggatcacgtgggatgagctcgctgcatcggggctgccgagctgcgatgccgccgtcaacctggccggagagaacatcctcaaccctctccgaagatggaatgaaaccttccaaaaagaggtaatcggcagccgcctagagaccacccaattgctggctaaagccatcaccaaagccccacaaccccccaaggcctgggtcttagtcacaggtgtagcttactaccagcccagtctgactgcggagtatgatgaagacagcccaggaggggactttgactttttctccaacctcgtaaccaaatgggaagctgcagccaggcttcctggagattctacacgccaggtggtggtgcgctcagagccaagtcagcatggggagagtgaggaaggggaaacagaaaccaggaggagcagtgggctccttcaaggctgagaggacccctgtaccttccctctttcctgctctaggggttgtgctgggccgtgggggtggtgccatgggccacatgctgctgccctttcgcctgggcctggggggccccatcggctcaggccaccaattcttcccctggatacacatcggggacctggcaggaatcctgacccatgcccttgaagcaaaccacgtgcacggggtcctgaatggagtggctccatcctccgccactaatgctgagtttgcccagaccttgggtgctgccctgggccgccgagccttcatccctctccccagcgctgtggtgcaagctgtctttgggcgacagcgtgccatcatgctgctggagggccagaaggtgatcccacagcgaacactggccactggctaccagtattccttcccagagctaggggctgccttaaaggaaattgtagcctaagtaggtcgtggcaagggcctgaggcctgttcctcacaggcttccaggttaggcactgtgaataggctcagctcctctagagagctgaagccatctggttcttagattcctctcccagtcctctttcccattgttctgttgctccaccttattgtctcaaggccgtaatctcatcaggttgggacattaatcttttcaactccttgtaagatttcccagtttggtttctctacatgtcctgcagctgccccacttctcctttacgctgtgtagagaatgctctgcagtttaggcaataaaaataa

SEQ ID NO: 181250 - DNA, 11566 bp, Homo sapiens
  Payload ID: 15698
  Gene Symbol: SDR42E1
  Gene Name: short chain dehydrogenase/reductase family 42E, member 1
  Uniprot ID: Q8WUS8
  ENST ID: ENST00000328945
  CDS Start-End: 129-1310
aggtccgacggcttcggcgccccagctgtggtgatgggtagctaggaggcctgggcctctctgcctgctgtagccgtctgccgcgcccttgttcctgcagctgtccagttatcttttgactgccacatatggaccccaaaagatctcaaaaggaaagtgtcctcattacaggaggaagtggctattttggttttcgcctgggctgtgccctgaaccaaaatggagtccatgtgattctgtttgacatcagcagccctgctcaaaccattccagaaggaatcaagtttatacaaggagacatccgccacctgtctgacgtagagaaagccttccaggatgcagacgtcacttgtgtgttccatattgcctcttatggtatgtcagggcgggagcaactcaatcgaaacctgatcaaagaagtcaacgtcaggggcacagacaacatcctccaggtttgccaaaggagaagggtgcccaggttagtttacaccagcactttcaatgtcatctttggaggtcaagttatcagaaatggggatgaatctctgccctacctgcctcttcacctccaccctgatcactactctcggacaaagtcaattgcagagcagaaggtgctggaggcgaatgctacacccctggacagaggcgacggtgtcttaagaacctgcgctctgaggccagctggcatctatgggcctggagaacaaagacaccttcccaggatagtcagctacatcgagaagggtctgttcaagtttgtctacggggaccccaggagcctggttgagtttgtccacgtggataacttggtgcaggctcacattctggcctcagaagccctgagagctgacaagggccatattgcctctgggcagccctacttcatctcagatggcagacccgtgaacaactttgagttcttccggcctctggttgagggcctgggctacacattcccgtctacccgcctgccattgaccttggtctactgctttgcttttctaacagagatggttcacttcattttgggtcgactctacaacttccagcccttcctcactcgcactgaagtttacaaaactggtgtcacacattattttagcttagagaaagccaagaaagagctaggttataaggctcagccatttgacctccaggaagcagtggaatggtttaaagcccatggtcatggcagaagttctggaagtcgtgactcggagtgttttgtttgggatgggctattggtcttcctcctgattatagcagttctcatgtggctgccttcttctgtgattctgtcactgtgaaggaggggccagaaataaggtgatcacagttggctgagatggttctcaagaaacatgggttttaaaatgtgtacagtgatatctggtgccaaacattggctcttcaaattgctacttaagaataggttcttggattgaatctttatgtcttatttccttgcactaatccagatgggaatgaaaaagcagaagcagagattagtttgaaatttgatttgttatgtgcttctgttttaggtgggtacaatagaagtcagtttggagccatagaagtaggcttagttgagttggagatgcccatcttgaatttctgagagggcaagatatacttatttccattttatgcagtctgcatctacctaaaacctctgactgatgtgggaatggcgaaacactatcaggcttgaatgcgtgtgaaaaacaccaaattggcccagatccctaacagagcaatcctcgaggggatggtggctattgctggagaggcattagctattcacagggtacgttttaggtgttaacttttgccctttatgatatcagggcattatgcctatgtgaacacatggtaatgtttgatgtttaggcctttattctacctcataggattcttttgaggattaaattcaagcatacaaagcgctcctcaacacacatagccattctttttatcagaattgtcatggtacattccttatgagggctttcttcctcagtgttctctttagagggctattgctactggactttctgcaatgtctttgggtgtgccctcagagcctgcaacaagtgtatttggatatactctatttgtaaagtttaggcctctaagaaggccacaatgaagcaactaaaaatctgatgattaagggagtcaatcaagctgatgccatttttagtttaaaaatgaagcagagctctaaactcatagatgggttttcttactgggaagaagattggctctctgaagacagcttccaatgaggaatgtattgaacaatggcagcactgtctggccacccacaaactgttacagatgatccagttacactgttgcataggaacccaagtggaaagaagacagagtccatgtctgtccatggctccagctacagaaaggatagtatgggaacattacaagggggatacattactgtggaaagttctgctagagttagtcttgagagtatctgtaaaatacaaatagatgagcaatccctgtggaatgctgcctggatattttcagaaaagctctgaacttgatgtcataataccaacaccgtgaatatcgtgtgtggccttaaccaaggaacagaagccctttagaacttagcttcctcacttgggagctgggactgactgcatttgccctttgtataaacccacccaccccatagggttcactgggagcataaagcaagatgtggtgaaagtacttctaatataaattgcaacatcagtatgaggtgatggtagtgattgtttttaggaaaacgtgtttggagtcttttctgtcataaagaagcttttgcattagcctggggttaacgcatatgagcacctgccatgtattgttctagaactgcttgaatatcctcatccccagagcaggtcatccaagacagcagggtggaagctgcattgtcctttatgacttggcctcaaatgtcacagtgtcattccacagtatattggttatgcaggtcaatcctattcagtaggggaaggaaatacacaaaggtatttccgtattataccagaagagggagatggtcaaaggcgatcttggaggctgagctcttggcccgatgtgagtcatccttccttttccatgaaacgttgcccacatttccagctacaaagctttttctgcctgcttcttgccagaaggattttaggggcccaacggctgtgttaacattttgcactatatccctttccattcaagctggcagtggtactgggaacattattttgaatgcgtcacctgagtcttattgcagttcactcacaaaagccacacccacaaatctctgaggtaagttctccactgtgagcttctgctcagactgccaagggacaatacgctgtgcttcttagaagccttactgtctgaacagctctctggggtgccacatcaggcctttctgagatcttaaaaagattttatactcacagccacagccatgcactgtcgtttccacagtctcgggtgtttacacaggttagccgtattcagtgtgggaggagactacacaaggatatgaataccaggaggtggtgtcattggaggccaacgtggaacctggctaccacattcctgcttccatatctccccaattctgttactgtctcccactccagcttgaaatggtagattttctcagtgctcattccttggccctgttctaataccatactttctccctaggtgagctcacctaagcccatggcctccattttcatctcccagcccaaatatgtactactagatgtacagttccagaccactcctgggctccagactcatatctaagtacttctgcaactccacatggatgtcccacatgcacctgtcagccagtgtagccaaagtggaattcataatcctctcccaccccaaattcttacagggctcccttccttagtaaatatctccactacctgctgaatttcccatcccagagatctgggataatccctgacccctgccctctcccagacttgacacacctaacccatgtttaagccagttgatttttacttgtaatcatgccttaaaactgcccaaggtataggtgtaccttctctcccatagattccactagtagcccatttgctcttccacccatatccacaccctccttccttcagtccattctccacatgcctagccaagagactctataaaggtgcaaatcttttgtcacttctctgctgaaaactttccttaggttgagaatctttaacgtgatcaagaggctttgtctgaactggccccttgcctgtctctctaacttcatctcacattattctgccttctctgccccaattacactgaccttttttaggttcctgggctccaagcttctcaggctccctgctcctccttttggcctgaataatgtttatttcgtgtctcttgttaagtctctttctagaggccttcactgatcccagcaatttaagattggtgctcctgctacaaatgatgctacaggcctgtcatagcttcctgcctttcttttatagcattgctcataactgtaaacatttgtacggttatttgtttaatgcctgttagctctatgagggtgggaactttgtcttgcttacagctgtactcctaatgcccggcacagtgcaggagttcaataagtatttgtccaatgaatgctgttttcccatctgctatggatgaacactcttttctagcacacagataactcactgtttctaatcttttggagactggggaaaatagccaacctacactagaactgtcgtaactaagtcaagattagatgaggtctagtgagtaagggaagtcattgtctatatgatctggtggagtattaatgctataaggaggtcagggaatggggaaggaatgtgggccaagtgatttgtgctccctccacatctcagctgaaaactcaccactttaaaagacttagtctatttcctgaaagggagctccccttcctttctatggtcaggagacgctgcagttaagaaattctattagttctagggttcccagctgccctcaccttgcctcaaccttagattgaatcactcaaccctgcctaacaataaaattatgctcacacttgtgcacttggggatgctctcagaggtctgggcagaagccacccagcactgctacctcacccatggcttctgaggagtgtgtgggaggttatccatatgattgatggagggtcgcaatgaaggaaggatgtgtgagcaacaaggagccctgtattggaacctaaaggtaatgcccaaactgctcccacctgcaaaaagggaagagcggtctggaaagcctgttggaaatacttcttggatgtcctcagtgccgtttctggtgacaggggcagacagtgccacattacaagcagtaacagttagtggagggtcaaataactcattctggcaccaaattacctatgctgtggtgtttctcaaacctagggaataggcctagggattcttttcaagaaaatgttttattttcctcaaccatctaacatggtgtataaaagaggcaagtgttgctttgtcgtagattgttggggctgcttctaccttgtattgctttccaaatctccggttcgcccagccttacaaagggtagaagttgcctgcagaatgccacgccccagctctgacccaattagacatcattatagggccactggtgcccctgctggctggccttggaagccagcaccagcaatgttattaaaatcttcaccagcatctcttgcttagagatggcacaccaggttgtgtgctgttcaccagcatatctcactttagagaatgataccccatgctcctttttggtgacaaaaagtccctcccagccctttcgtggggctgacctccacatgcaggcctgaccgctcacaggacttccatccttcggccgcagtcattgggccacgatgggccagtcagcgtcatcctttcagcctttctcccagagcaggtttagagaaaccctttcagctaggattgcttctctggggaggacaggcgcttggtgcagctcctcttcagggtcctcctacctgaaggagaggaccgagtgctgatgatgtttgggctgctgggtccagctatgtgttaagaagagccaaaaaatggagagggaggaggtcctggtgactacactggggttccgtaacgctgcctgcgggacgctcatcattccagatcgtcctctcacgtgagtcttcagttcactttcttttctgcttaaggtcctttaagttcgatttttctccaggaatcgcagcatgtcctggtgtgccatgtccacagtccactcctgggtacaggtgatcctaccccgtggtttccaaaggcagcctctccactcacctctgtgccctctttctttcaaacgggggtcgtcttttggtccctgggtaatttaacatttgctggagtttttcttaaaaaatgagattgatttccttttctagaatcatgtttatttgaattacgtttattcaaatcatgtatatttggcaccaacatacctttaagcagagtagttcaaactcttgttttatatggaaattgtttgatgaagtgatttgctccccagaacataaacgccccatgagagcaggaaccatgtctgttttttctacttctgtacccttcatatgcccaataaatgcttgttgacggggtgaatgcacttatcagccaggtggtcccttatctgaaattacagctgattccccagttattgcttcttttacacctgagactcccagcctgaggcaataagaacattcaaggcctaaattaaaaatgcagactccagaagggtgacatcatgtaaaacggcagagtaggaagctctggaatcggtcctttcactgtaacaaccagaaaagcacgggggcaggggaatgatcagaaccaatgatttcaggaactccttacatctattttacctcgatatacagactccagactcttccctgatgcttctgattgagaaagtctgtgttggttggtaatctgcactctaggtgtttcttatctttcaacaaggaggtgagcactggtgccagatactaaacactggctcccttgcaagatgctgagaggctcctgacttctgcttggctcttccctttgcagtgctttgctacagcaggtgctcagtacaactttgctgaatgaatgaagggggagatgggactcgccaaagggccttggattcgagtgaccccccacctgctcctttatgcagggcccagttctttgttgacacagacaagcactgctacgtcccagtgctgacttttccagccaacctagagcctctttttcttgagccaaagggattctttggcaacacatcttgttgtgcctggttacctgatcttttagtgtaaaacagccttttgctattgaaaatcaaaccagaaatagagtcaaccagtccctggtatctctaagttgtgcaaattcataccatgttacccttctgtattttagaacctgggcacaccaggaactcattgaactcaagttgcgttcataattacttgagttcattgaactcaagtaattatgaccgaggccaaatctagttcactacaaagaaattgcatgtagcaaagtgatccaggcaagtgtctttcaaccaacaggggatttatcagcagtaattcgcaatgtttatttttaacagctggttaaagcatgcaagtaattaaaaaattcttcattactaatatgcaagattttaatcttggcaagtattctacatatcttttgctctagcctcccagtggagccatatttcagatccaagagtaaaatactgtcttacccatatatatattttaacatatgtatatatgttataagaatgagtcgtcttttgctcttaacagtcactaggagttagtgtcctgaatagataataataagtctgaaatgttgcccaggttttaaggggaattatttgcacattgctgggcaattacaacacccccactccactgatttatagtcctgtgcctttcataggggatttagcttctgggaatgttcaacatgaagctaatgatcaatattaacctgtcaccctagttaactaaattactcaaagatgaacattgttaatagttaattgctactatttgttgagagtttactcaggataaggctttctaatttttttttcttttttttgagatggagttttgctcttgttgcccaggctggagtgcaatggcgtgatctcagctcactgcaacctccacctcctgggttcaagcgattcttctgcctcagcctcctgagtcaataggattacaggcgcccaccaccacaaccggctaatttttgtttaattagcggtgatttggggtttcgccatgttggccaggctggtctcaaactcctgacttcaggtgatccacctgaggctttctttatttcttaggcttatttagctttcttaatgtctttaagaaacagatcaatttattatctccagtttacatgggaggaaactgaggcttagggagatgcagtaccttgcccaagggtacccagcgtcaccagctaggaagtggcaaaacttaaatttgagccaggtttacttgaatccaagaccaaatttttttttttttttttttgatagagtctcgtctgtcacccaggctagagtacagtggcacagtcatggctcactgttggctcgaactcctgggctcaaatgattgtcctacctcagcctcccaagtaactgggactacaggtgcatgccaccacatccagcttttattttctgtagagacggtgtttcactatgttacctgggctggtcttgaattccttgccccaagcaatcctcttgcctcggcctcccaaagtgctgggattacaggtatgagccaccgagcctggcccaaactcttaccttgttggaggtggttttatcacgttagcatgacattattcaaggctaagtgttactcgaacttcatttgcaattaaagtaaactatttgttacaaaaaatgagtaactgtaaatagtgacttctgctacacaaactaagttacagaagcaaaccattattttgtcatgtgagtatgtattacgtagagctgaggtgtgtgggcggggggtgctgttaatctactggaattccatgtattttgtgaggagcatggatgttagagccatacttaatagcccagaggacatcctccaggaagacttgtttgtgtacctaatcaaatactgatattggtcacattgcacatgtcctagtctctcctctaaatcagtatcttgagagcagagcccaagtattattcgctgctgatggctctttgcctcccctgcagtcttacactattctgggcgtggagcacagacctaataaaaatctttcgaagtaatgaaaatgcaaagtccagcctgtagaggtgcccttagatgtttaaattctcccaaagaagggtgaactttttacaaagcacttcacagtggaagtgtctctgagcacagcaaataccttaagtttgggcccaagtggaaaagaaatatttggtagtgggtgattatagcccttcagtgctcaagggactcatgcatttgcttgcacttccttatgcctgtcctggagccatctcttatttgcaatgtgactttgagcaaatgcctctcatctgtaaagtggagataaaacattccctgcttatctcttgggggaacttgtatggatttaatggcacagaggccttttgtaacctgtacaagaactatgcacatggatccttaattaatagtgtttctgctgggaaagatggaagggtttggaggggaagctggtgtctacaggaagagatgcaagacatgctagtggagtttgagacgttcaaatggaatgttcagtaactaattagcaacataagactgtagtttgaaaaaaacaactgcatatgcgggtagagatggttcagtgaaaatgtttcattgatttcctgccatataacaggtattagtttatttaccgtggcttttctttttttcttttgagacatggtgtcactctgtcgaccaggctgaagtgtagcactgtggacacagctcactgctgcagtgccctcctgggctcaggtgatcctcctaagtagctagaaccacaggtgcaccagcacacctagctaatttttctgtcgtcttttgtagagacagggtctcaccgttttgcccaggctggtctcaaactcctggccttaggtgatcctccttcctcagtctcccaaagtggtgagattacaggaatgagccaccgtgcccagcctaccatgttttttttgtttgtttgtctgtttcagacggagttttggtcttgtggcccaggctggagtgcagtggcacaatcttggctcactgcaacctccgcctcccaggttcgagtaattctcctgcctcagcctcccaagtaggtgggattacaggtgcccgccaccacgctcagctaatttttgtatttttagtagagatggggtttcaccatgtcagccgtgatggtatcgaactcctgagctcaggtgatccacccacctcggcctcccaaagtgctgggattacaggcttgataccatggttttcaattactcaattcagtcacgttttgagctctaaactgaaaatgagtttttcttttcttgagattgcagagtcaattacaccatgctagagaacaagtaggcatctatgcctctctgctctaaattttgatgtctataaacacccatagcggtgtgtgttggttttaaattgtggggctagaaagccaacccaaaatcatcaagcttttatttctacacattcagagtgcttctgtgtaacttagatttaaaagtaactatacaaataatgcatagatgtatttttcttatataatgttaaaatattacggataaggccaaagaccccttttactaatgtccccaaatttcatatatgtatatatttgtatagaaaacagggctgtggtgttcatgtctttccccatactactgtctcccacctcacagttccttctgctactacggtttctcactcaatagtacagcatggtgatctattgatattagtatatattctttatttgctgacataggaggtcaccgggtatataaagatgataagcatatgtcctagttggcctaagacagttctggtttcatgcctgtagtcccaccttaatttttaatagtgcttcctttcactctcaggtatgtcccattttgtataataaattgtacgatcaccctatatataagacacatagttatatgaagaattaagcatttttcataacagatgtattagaagttattgtgaactgattttgaggggaaaaaatctcattttgtactagaatagaatatagtagaaaatcctgaattctgggtatgtagcagtattctaccaacattgaaatattaataaaaaattacctaaagaaaa

SEQ ID NO: 181251 - DNA, 832 bp, Homo sapiens
  Payload ID: 15698
  Gene Symbol: SDR42E1
  Gene Name: short chain dehydrogenase/reductase family 42E, member 1
  ENST ID: ENST00000532128
  CDS Start-End: 248-832
acggcttcggcgccccagctgtggtgatgggtagctaggaggcctgggcctctctgcctgctgtagccgtctgccgcgcccttgttcctgcagctgtccagttatcttttgactgccacatatggaccccaaaagatctcaaaaggaaagtgtcctcattacaggaggaagtggctattttggttttcgtagatgagaggattctcacttttgaaaatttgaagaagcgaggcttgcaccaaggaacatgcatagtgaggggctcaggatgagccaagaagacttggatcagccccaccttgattgcctgggctgtgccctgaaccaaaatggagtccatgtgattctgtttgacatcagcagccctgctcaaaccattccagaaggaatcaagtttatacaaggagacatccgccacctgtctgacgtagagaaagccttccaggatgcagacgtcacttgtgtgttccatattgcctcttatggtatgtcagggcgggagcaactcaatcgaaacctgatcaaagaagtcaacgtcaggggcacagacaacatcctccaggtttgccaaaggagaagggtgcccaggttagtttacaccagcactttcaatgtcatctttggaggtcaagttatcagaaatggggatgaatctctgccctacctgcctcttcacctccaccctgatcactactctcggacaaagtcaattgcagagcagaaggtgctggaggcgaatgctacacccctggacagaggcgacggtgtcttaagaacctgcgctctgaggccagctggcatctatgggcctggagaacaaagacaccttccc

SEQ ID NO: 181252 - DNA, 2630 bp, Homo sapiens
  Payload ID: 15699
  Gene Symbol: SDR42E2
  Gene Name: short chain dehydrogenase/reductase family 42E, member 2
  Uniprot ID: A6NKP2
  ENST ID: ENST00000602312
  CDS Start-End: 1-1269
atgaagtccaaccccccacgctcctccctagaggcctgcaaagctgcaggccaggcgccgcagcagaagactcaagccaaacctacaaaggctgccaggcagaaggttctagtgactggaggaggaggctacctgggcttcagcctgggatcccacctagccaagagcggcacttccgtcattctgcttgaccgccgcagaccccagtgggaactgtccccggaaaccaagttcatccaggctgatgtccgagatgaagaagccctgtaccgtgccttcgaaggggtggactgtgtcttccacgtggcttcctatggaatgtccggggctgagaagctgcagaaagagcagattgagtctataaatgttggaggcaccaaactagtgattgatgtctgtgttcgccggcgggttccaaggctcatctataccagcactgtcaatgttgcatttggagggaagcccatagagcagggcgatgaggactctgtgccatatttcccattggacgagcacgtagaccactactcccgaaccaaagccatcgccgaccaattgaccctcatggccaatgggatgcctctcccaggaggaggcactcttcggacgtgtgtgctccggcctccagggatctacggccctgaagagcagaggcacctgccccgtgtggcgggccacatcaagaagaggctgttcatgttccgatttggggaccacaaggcacggatgaactgggtccacgtacacaatctggtgcaggcacacgtgctggcggccgaggccctcaccacggccaagggctacgtggctagtgggcaggcgtactacatcaacgatggggagagcgtcaacctctttgagtggatggccccactgtttgagaagctggggtacagccagccctggatccaggtgcctacttcctgggtttacctgacagcagcagttatggagcgcctccatctggccctgagacccatctgcagcctcccaccgctgctcactcgtagtgaggtgcgcagcgtggccgtgacgcacaccttccagatagccaaggcccgcgcccagctcggctacgcgccggataagtttaggttcgccgacgccgtggagctatacgtgcagtccacgacccggcggccccgcggctccacggcgcggaccctcctgcgcctgctgctcaggctgctgctgttcctcggcttgctcgccctggccctgcacttcctaggcctgcagcctctgcacgccgccgtggagcgcctgtgaccgtccgccgtccgccgcccgctagggtcggccccgctgcaccctcgcccacgcccggctccctgggcttgtaccagcccctgccccgccttctgggtttgagcgcgcctccgctccgccccttgaatcctggtcacgcccccgagccgctctccagacctagcccggaccgccgacttctggccacgcccctatctactcccagaccttgccttgcgcccttcctgtgttttggccccgcccctgtcctgtcccgccccgccctccgaagtgggcacgctcctgctccgccccctgaatcctggccacgtccctggtcggcccagacgcgtagccccgagtctctttccatgttttgaccacgcccttgacccgcccttcaaattgggcacgccttcttccccgctcactgatttcctggcctagcccctgagcagacctccagacctagccccgcccccgttttataaccccgcccctgcttcacggcttgggcacgcctcttccccgccccctgacttcagagcctagtcctgagccgctctccaggcctaaccccgccttcatgtcatagccacgccccttcccgcccttccatgtttgggcacgccttctgagtcctggtcacgcctctgtcccgccccctgaatctttcctacgtccatgaccctccctccaggccctggccctgccccttttttcctccctccggcctgtccggtttctgatatgggccaaggctcacagcttcctccgccttctggaccttctcctagtccctgcccagtcccggcccacccccagattctccctcattctggtttcgccccctttctggtcctccccgcgcgcttgagcccaccctttggcttctccttttgggtctgtccttgctcctgcctctggacccggtcccgcccttctcgcgtgtaattgagtcctggccccgccccctccctctctggcttcacccctttccagctccgcctcccgggtaggttctccccggaaccaggctgccgcgtcgctatgggctaacgcaggctcgggtgacgttggtatgagtttgcgccgtcggctgctgctctgtctggtaacattgcattcgatccaccccgacccaatgttctgggcttctcattcacacagatctgtgtgttgacagccagggtttggggaaaaaccgagactcaagcttctgccgagcccgacttggcctttttgggttcctgtctgaggatgacagcatagtaagcacaggttttagtaccagaaagagcatgaaaaatttaaaaaaaaaaactcttaaaataattggatgtctcgatgaagtaccaataaagctataatgggaaaaatag

SEQ ID NO: 181253 - DNA, 1765 bp, Homo sapiens
  Payload ID: 15700
  Gene Symbol: SDR9C7
  Gene Name: short chain dehydrogenase/reductase family 9C, member 7
  Uniprot ID: Q8NEX9
  ENST ID: ENST00000293502
  CDS Start-End: 145-1086
agatttgttgcaagctgtgggaggaaggagagttcttcttccaggtggtttcctgcagactgcctgctagggctcagaggaccagcttcttccctgctgtctcctgagcccagtccctcttggccatcacattccccttgccctatggcggccctcacagacctctcatttatgtatcgctggttcaagaactgcaatctggttggcaacctctcagagaagtacgtcttcatcacaggctgtgactctggcttcgggaacctgctggccaaacagctggttgatcggggcatgcaggtgctggctgcttgcttcactgaggagggatcccagaaacttcagcgggatacctcctatcggctgcagaccaccctactggatgtcaccaagagcgaaagcatcaaggcggcggcccagtgggtgagggacaaagtgggcgaacaaggcctctgggccctggtgaacaatgctggtgtgggcctgcccagtggtcccaacgaatggctgaccaaggatgactttgtgaaggtgattaatgtgaacctggtgggactgatcgaagtgacccttcacatgctgcccatggtcaagagagcccggggcagggttgtcaacatgtccagctctggtggtcgtgtggctgtcattggtggtggctactgcgtctccaagtttggcgttgaggccttctctgacagcataaggcgtgagctctactactttggggtgaaagtctgcatcattgagccagggaactatcggacagccattctcggcaaggagaacctggagtcacgcatgcgaaagctttgggagaggctgcctcaggagacccgggacagctacggagaggattatttccgcatctatactgacaagttaaaaaacataatgcaggtggcagagcccagagtcagagatgtcatcaacagcatggagcatgctattgtttcccggagccctcgcatccgctacaaccctggcctggatgccaaactcctctacatccctctggctaagttgcccacccctgtgacagatttcatcctaagccggtaccttccaaggccagcggacagtgtctaaactggggaggatcaatgggtcagtggagcctagaagtgggggaggaaggaaggaccgtggggtcacaaaaggtggtatcggttatcctgggggcattggctgcaaaggaagcttggctcagctgacacccactgctgtcgaatttaccagtaacttctaacagaaggtgaatgcctcttcccaccctctgggaccccacagaaacctgaggtggtctttgcaggttcagcgatctgcagcaatagctccaaggacgtctgtcacccaatcaggatacagctttttctggtcctggaaaagtcatggagaagaaaaccagctcctgtggaatcatgagcccctttcagttatcactgccactgagaaatactgtgggataatcttgcctccaggagaatctaaccaccttcctaatgggtccctcaatatgcataacttcattcacataacccattactgaagtatgcggtagggcagatagggagtgcaagattaaatcagacaaaagtttaaaatattttctttctttttagattcttctatctataggttattgggatccacatgaaataacattcatttatttaatcaccattaatttttcaaatatttattgagtgcctactacctaccgggcactttgtaggtgctgggggaatataaagatgattaaatcatg

SEQ ID NO: 181254 - DNA, 1864 bp, Homo sapiens
  Payload ID: 15701
  Gene Symbol: SCOC
  Gene Name: short coiled-coil protein
  Uniprot ID: Q9UIL1
  ENST ID: ENST00000338517
  CDS Start-End: 46-414
acttccggttaagaatgcaacactcaggtctgaaaattgaacaagatggacgggtccaggaaagaggaggaggaagacagcacattcaccaacatttctcttgcagatgacatagaccattcctcaagaattttgtatccaaggcccaaaagtttgttacccaagatgatgaatgctgacatggatgcagttgatgctgaaaatcaagtggaactggaggaaaaaacaagacttattaatcaagtgttggaactccaacacacacttgaagatctctctgcaagagtagatgcagttaaggaagaaaatctgaagctaaaatcagaaaaccaagttcttggacaatatatagaaaatctcatgtcagcttctagtgtttttcaaacaactgacacaaaaagcaaaagaaagtaagggattgacacccttctgttttatggaattgctgctgatcattttttctttaaaacttggatagattccaaaagttacagtacctttgtggcttcattgaatatttatgaagataatgtcagatgtagacaaaaataacacaataacaggagacttccataagtttgtgtattatgttagtctatgaaaacgtgcaaatgtattgtagagactttatgattagaattgcatatatttatgaaacttaaagatgaatgttttattgaatttgtaggtttagcactgtcttttattataggattagtaagatatacaagaaaataaccaccgtgttgtgaaaaagtgaccaaaatcatgtactaaatgcacagctttatgtaccctgtccaccatcttgtgcctcttctccatttgcctcttccttcctatttcccttccgctaaggaaaaaaattggtgtcacatttgtaaaagtaattttaatagttaatcatctctgagagtaacctgtattttaattgttgaaacttaaccaaaataagatactgtctcagctagggcttgtcatttgtgtatttagtgttaagataggaatgctagtgtctctttaattaattggaaatagatggaggctaaaaatgaaggtttttctttgaaactgaattaacttgggaatatttgttgttaaaaacttctttttgcccaaaataactcattttgtattatctgaaaatatataatttctggtcatgtgtatgttaaaatagaaaattttgaggaaaaatggaaatagggtggaaaagtactcggtaaacagtagtaaccaaatattttcactccagatttgtgttttctctggcacagagtagatcttttgggaaatatatatgaaagtggattaagtttgactacccttatgttagccacatctggatgagaacagttacaaagagtttggtctctaagttgatttgtacccagtgggtcaacttctgcaaaattccgtaatggtgtattagtattagaatagtgaataaaatgggaaagttatacatgtatacttattatcttgctcagtattttatctcacttgttctagaattttctgtaaaccctgctactgggtttgaagagttttagtcatcctttaacaatttttaaaaatttagcttctagattccatttggtaaggaaatcaatattggaagtattgctaaaatcttataatatgaaaagagatccactaatgtagcttaaggttattagatttgggcttttaatcatggaataatcttatgtattggtgtaagagttgatgaatgactttagctgtgtgaatatataatagtcaaactgcaaacattttgcatcccttttgtgacctaatttacagacatttaaattgtgttgcagttctgctttgccgtttaataaaaagctatttcagaggt

SEQ ID NO: 181255 - DNA, 1795 bp, Homo sapiens
  Payload ID: 15701
  Gene Symbol: SCOC
  Gene Name: short coiled-coil protein
  ENST ID: ENST00000394201
  CDS Start-End: 126-374
ggggtcagttggtccaagtgtcccggcctgaggtgtcggccggatccctccttctcccggcgcctcaagcggaagaccattcctcaagaattttgtatccaaggcccaaaagtttgttacccaagatgatgaatgctgacatggatgcagttgatgctgaaaatcaagtggaactggaggaaaaaacaagacttattaatcaagtgttggaactccaacacacacttgaagatctctctgcaagagtagatgcagttaaggaagaaaatctgaagctaaaatcagaaaaccaagttcttggacaatatatagaaaatctcatgtcagcttctagtgtttttcaaacaactgacacaaaaagcaaaagaaagtaagggattgacacccttctgttttatggaattgctgctgatcattttttctttaaaacttggatagattccaaaagttacagtacctttgtggcttcattgaatatttatgaagataatgtcagatgtagacaaaaataacacaataacaggagacttccataagtttgtgtattatgttagtctatgaaaacgtgcaaatgtattgtagagactttatgattagaattgcatatatttatgaaacttaaagatgaatgttttattgaatttgtaggtttagcactgtcttttattataggattagtaagatatacaagaaaataaccaccgtgttgtgaaaaagtgaccaaaatcatgtactaaatgcacagctttatgtaccctgtccaccatcttgtgcctcttctccatttgcctcttccttcctatttcccttccgctaaggaaaaaaattggtgtcacatttgtaaaagtaattttaatagttaatcatctctgagagtaacctgtattttaattgttgaaacttaaccaaaataagatactgtctcagctagggcttgtcatttgtgtatttagtgttaagataggaatgctagtgtctctttaattaattggaaatagatggaggctaaaaatgaaggtttttctttgaaactgaattaacttgggaatatttgttgttaaaaacttctttttgcccaaaataactcattttgtattatctgaaaatatataatttctggtcatgtgtatgttaaaatagaaaattttgaggaaaaatggaaatagggtggaaaagtactcggtaaacagtagtaaccaaatattttcactccagatttgtgttttctctggcacagagtagatcttttgggaaatatatatgaaagtggattaagtttgactacccttatgttagccacatctggatgagaacagttacaaagagtttggtctctaagttgatttgtacccagtgggtcaacttctgcaaaattccgtaatggtgtattagtattagaatagtgaataaaatgggaaagttatacatgtatacttattatcttgctcagtattttatctcacttgttctagaattttctgtaaaccctgctactgggtttgaagagttttagtcatcctttaacaatttttaaaaatttagcttctagattccatttggtaaggaaatcaatattggaagtattgctaaaatcttataatatgaaaagagatccactaatgtagcttaaggttattagatttgggcttttaatcatggaataatcttatgtattggtgtaagagttgatgaatgactttagctgtgtgaatatataatagtcaaactgcaaacattttgcatcccttttgtgacctaatttacagacatttaaattgtgttgcagttctgcttt

SEQ ID NO: 181256 - DNA, 1999 bp, Homo sapiens
  Payload ID: 15701
  Gene Symbol: SCOC
  Gene Name: short coiled-coil protein
  Uniprot ID: Q9UIL1
  ENST ID: ENST00000394203
  CDS Start-End: 179-547
aacactcaggtgagaacttctcaggtggaaagcaggaagagggtggctagtgcaaggatcagatagcacctgcttggaagttcactgattaatgatttaacaagggcggtcacatgggacaactgctgcttttctctgccctcatttttcttactaacaggtctgaaaattgaacaagatggacgggtccaggaaagaggaggaggaagacagcacattcaccaacatttctcttgcagatgacatagaccattcctcaagaattttgtatccaaggcccaaaagtttgttacccaagatgatgaatgctgacatggatgcagttgatgctgaaaatcaagtggaactggaggaaaaaacaagacttattaatcaagtgttggaactccaacacacacttgaagatctctctgcaagagtagatgcagttaaggaagaaaatctgaagctaaaatcagaaaaccaagttcttggacaatatatagaaaatctcatgtcagcttctagtgtttttcaaacaactgacacaaaaagcaaaagaaagtaagggattgacacccttctgttttatggaattgctgctgatcattttttctttaaaacttggatagattccaaaagttacagtacctttgtggcttcattgaatatttatgaagataatgtcagatgtagacaaaaataacacaataacaggagacttccataagtttgtgtattatgttagtctatgaaaacgtgcaaatgtattgtagagactttatgattagaattgcatatatttatgaaacttaaagatgaatgttttattgaatttgtaggtttagcactgtcttttattataggattagtaagatatacaagaaaataaccaccgtgttgtgaaaaagtgaccaaaatcatgtactaaatgcacagctttatgtaccctgtccaccatcttgtgcctcttctccatttgcctcttccttcctatttcccttccgctaaggaaaaaaattggtgtcacatttgtaaaagtaattttaatagttaatcatctctgagagtaacctgtattttaattgttgaaacttaaccaaaataagatactgtctcagctagggcttgtcatttgtgtatttagtgttaagataggaatgctagtgtctctttaattaattggaaatagatggaggctaaaaatgaaggtttttctttgaaactgaattaacttgggaatatttgttgttaaaaacttctttttgcccaaaataactcattttgtattatctgaaaatatataatttctggtcatgtgtatgttaaaatagaaaattttgaggaaaaatggaaatagggtggaaaagtactcggtaaacagtagtaaccaaatattttcactccagatttgtgttttctctggcacagagtagatcttttgggaaatatatatgaaagtggattaagtttgactacccttatgttagccacatctggatgagaacagttacaaagagtttggtctctaagttgatttgtacccagtgggtcaacttctgcaaaattccgtaatggtgtattagtattagaatagtgaataaaatgggaaagttatacatgtatacttattatcttgctcagtattttatctcacttgttctagaattttctgtaaaccctgctactgggtttgaagagttttagtcatcctttaacaatttttaaaaatttagcttctagattccatttggtaaggaaatcaatattggaagtattgctaaaatcttataatatgaaaagagatccactaatgtagcttaaggttattagatttgggcttttaatcatggaataatcttatgtattggtgtaagagttgatgaatgactttagctgtgtgaatatataatagtcaaactgcaaacattttgcatcccttttgtgacctaatttacagacatttaaattgtgttgcagttctgctttgccgtttaataaaaagctatttcagaggttg

SEQ ID NO: 181257 - DNA, 1964 bp, Homo sapiens
  Payload ID: 15701
  Gene Symbol: SCOC
  Gene Name: short coiled-coil protein
  Uniprot ID: Q9UIL1
  ENST ID: ENST00000394205
  CDS Start-End: 144-512
atttaaaattatagagcttttcatcactacggagatgctcttgcctatgataggaacgatggctacatctgaagctgagcaaatttatcttttctcttcgtctgcatcagggtgacctctggaaggtctgaaaattgaacaagatggacgggtccaggaaagaggaggaggaagacagcacattcaccaacatttctcttgcagatgacatagaccattcctcaagaattttgtatccaaggcccaaaagtttgttacccaagatgatgaatgctgacatggatgcagttgatgctgaaaatcaagtggaactggaggaaaaaacaagacttattaatcaagtgttggaactccaacacacacttgaagatctctctgcaagagtagatgcagttaaggaagaaaatctgaagctaaaatcagaaaaccaagttcttggacaatatatagaaaatctcatgtcagcttctagtgtttttcaaacaactgacacaaaaagcaaaagaaagtaagggattgacacccttctgttttatggaattgctgctgatcattttttctttaaaacttggatagattccaaaagttacagtacctttgtggcttcattgaatatttatgaagataatgtcagatgtagacaaaaataacacaataacaggagacttccataagtttgtgtattatgttagtctatgaaaacgtgcaaatgtattgtagagactttatgattagaattgcatatatttatgaaacttaaagatgaatgttttattgaatttgtaggtttagcactgtcttttattataggattagtaagatatacaagaaaataaccaccgtgttgtgaaaaagtgaccaaaatcatgtactaaatgcacagctttatgtaccctgtccaccatcttgtgcctcttctccatttgcctcttccttcctatttcccttccgctaaggaaaaaaattggtgtcacatttgtaaaagtaattttaatagttaatcatctctgagagtaacctgtattttaattgttgaaacttaaccaaaataagatactgtctcagctagggcttgtcatttgtgtatttagtgttaagataggaatgctagtgtctctttaattaattggaaatagatggaggctaaaaatgaaggtttttctttgaaactgaattaacttgggaatatttgttgttaaaaacttctttttgcccaaaataactcattttgtattatctgaaaatatataatttctggtcatgtgtatgttaaaatagaaaattttgaggaaaaatggaaatagggtggaaaagtactcggtaaacagtagtaaccaaatattttcactccagatttgtgttttctctggcacagagtagatcttttgggaaatatatatgaaagtggattaagtttgactacccttatgttagccacatctggatgagaacagttacaaagagtttggtctctaagttgatttgtacccagtgggtcaacttctgcaaaattccgtaatggtgtattagtattagaatagtgaataaaatgggaaagttatacatgtatacttattatcttgctcagtattttatctcacttgttctagaattttctgtaaaccctgctactgggtttgaagagttttagtcatcctttaacaatttttaaaaatttagcttctagattccatttggtaaggaaatcaatattggaagtattgctaaaatcttataatatgaaaagagatccactaatgtagcttaaggttattagatttgggcttttaatcatggaataatcttatgtattggtgtaagagttgatgaatgactttagctgtgtgaatatataatagtcaaactgcaaacattttgcatcccttttgtgacctaatttacagacatttaaattgtgttgcagttctgctttgccgtttaataaaaagctatttcagaggttg

SEQ ID NO: 181258 - DNA, 679 bp, Homo sapiens
  Payload ID: 15701
  Gene Symbol: SCOC
  Gene Name: short coiled-coil protein
  ENST ID: ENST00000502535
  CDS Start-End: 409-657
gagtaatgcccttatgcgtagggctgccagatacagtgggcggttttttcactgtgcaacacttgggatgcaatcttacgtagactgtggtgtgaattgtgctctctcgcgttgtatacccttatagcactgttcttgtggcactacttttgtgctcctgcctctaccctaatcttgagtgtaagagtaatttttcctttaataagccctctccaccctgtttttctgctttttattttctttcactttttcagatgaagtcacactgttgctaaaccatgcataggttttctattgtttgaattatatgtggtcagaatttcagaaactggcttctttttctttacctcttatattgaccattcctcaagaattttgtatccaaggcccaaaagtttgttacccaagatgatgaatgctgacatggatgcagttgatgctgaaaatcaagtggaactggaggaaaaaacaagacttattaatcaagtgttggaactccaacacacacttgaagatctctctgcaagagtagatgcagttaaggaagaaaatctgaagctaaaatcagaaaaccaagttcttggacaatatatagaaaatctcatgtcagcttctagtgtttttcaaacaactgacacaaaaagcaaaagaaagtaagggattgacacccttctgtttt

SEQ ID NO: 181259 - DNA, 841 bp, Homo sapiens
  Payload ID: 15701
  Gene Symbol: SCOC
  Gene Name: short coiled-coil protein
  ENST ID: ENST00000512749
  CDS Start-End: 122-370
tgttatggcaaaggtggatcccggtgctttgagattggacgactggggtgaggcgggcagctaatgcgcagaccattcctcaagaattttgtatccaaggcccaaaagtttgttacccaagatgatgaatgctgacatggatgcagttgatgctgaaaatcaagtggaactggaggaaaaaacaagacttattaatcaagtgttggaactccaacacacacttgaagatctctctgcaagagtagatgcagttaaggaagaaaatctgaagctaaaatcagaaaaccaagttcttggacaatatatagaaaatctcatgtcagcttctagtgtttttcaaacaactgacacaaaaagcaaaagaaagtaagggattgacacccttctgttttatggaattgctgctgatcattttttctttaaaacttggatagattccaaaagttacagtacctttgtggcttcattgaatatttatgaagataatgtcagatgtagacaaaaataacacaataacaggagacttccataagtttgtgtattatgttagtctatgaaaacgtgcaaatgtattgtagagactttatgattagaattgcatatatttatgaaacttaaagatgaatgttttattgaatttgtaggtttagcactgtcttttattataggattagtaagatatacaagaaaataaccaccgtgttgtgaaaaagtgaccaaaatcatgtactaaatgcacagctttatgtaccctgtccaccatcttgtgcctcttctccatttgcctcttccttcctatttcccttccgctaaggaaaaaaattggtgtcacatttgtaaa

SEQ ID NO: 181260 - DNA, 2193 bp, Homo sapiens
  Payload ID: 15701
  Gene Symbol: SCOC
  Gene Name: short coiled-coil protein
  ENST ID: ENST00000510586
  CDS Start-End: 500-748
agttggtccaagtgtcccggcctgaggtgtcggccggatccctccttctcccggcgcctcaagcggaaggcccaggcgttctttgggagagggacctctcgcggtccctgacgcagacatcgtgtagctttctccccgcagctcctgggtcgggagccgctttgcagctctcggctctggaattggactgcgggaggggcgtttgggtggaatgggacctggcacgcctggaccttcccgtggctgctctgcgagagcctgagagatgggaggggaggctgaggtggggagggagcctagagagccgtaaaataaggattggaccatttttccaggcggcgaaagcggcacctgggtttgtttcctgatcgtcttctcccccagagtcctgctgaacaagttttgggaagaaaggtttggaaaggagaaagaggatacattcctgaaagaccattcctcaagaattttgtatccaaggcccaaaagtttgttacccaagatgatgaatgctgacatggatgcagttgatgctgaaaatcaagtggaactggaggaaaaaacaagacttattaatcaagtgttggaactccaacacacacttgaagatctctctgcaagagtagatgcagttaaggaagaaaatctgaagctaaaatcagaaaaccaagttcttggacaatatatagaaaatctcatgtcagcttctagtgtttttcaaacaactgacacaaaaagcaaaagaaagtaagggattgacacccttctgttttatggaattgctgctgatcattttttctttaaaacttggatagattccaaaagttacagtacctttgtggcttcattgaatatttatgaagataatgtcagatgtagacaaaaataacacaataacaggagacttccataagtttgtgtattatgttagtctatgaaaacgtgcaaatgtattgtagagactttatgattagaattgcatatatttatgaaacttaaagatgaatgttttattgaatttgtaggtttagcactgtcttttattataggattagtaagatatacaagaaaataaccaccgtgttgtgaaaaagtgaccaaaatcatgtactaaatgcacagctttatgtaccctgtccaccatcttgtgcctcttctccatttgcctcttccttcctatttcccttccgctaaggaaaaaaattggtgtcacatttgtaaaagtaattttaatagttaatcatctctgagagtaacctgtattttaattgttgaaacttaaccaaaataagatactgtctcagctagggcttgtcatttgtgtatttagtgttaagataggaatgctagtgtctctttaattaattggaaatagatggaggctaaaaatgaaggtttttctttgaaactgaattaacttgggaatatttgttgttaaaaacttctttttgcccaaaataactcattttgtattatctgaaaatatataatttctggtcatgtgtatgttaaaatagaaaattttgaggaaaaatggaaatagggtggaaaagtactcggtaaacagtagtaaccaaatattttcactccagatttgtgttttctctggcacagagtagatcttttgggaaatatatatgaaagtggattaagtttgactacccttatgttagccacatctggatgagaacagttacaaagagtttggtctctaagttgatttgtacccagtgggtcaacttctgcaaaattccgtaatggtgtattagtattagaatagtgaataaaatgggaaagttatacatgtatacttattatcttgctcagtattttatctcacttgttctagaattttctgtaaaccctgctactgggtttgaagagttttagtcatcctttaacaatttttaaaaatttagcttctagattccatttggtaaggaaatcaatattggaagtattgctaaaatcttataatatgaaaagagatccactaatgtagcttaaggttattagatttgggcttttaatcatggaataatcttatgtattggtgtaagagttgatgaatgactttagctgtgtgaatatataatagtcaaactgcaaacattttgcatcccttttgtgacctaatttacagacatttaaattgtgttgcagttctgctttgccgtttaataaaaagctatttca

SEQ ID NO: 181261 - DNA, 1838 bp, Homo sapiens
  Payload ID: 15701
  Gene Symbol: SCOC
  Gene Name: short coiled-coil protein
  Uniprot ID: Q9UIL1
  ENST ID: ENST00000506597
  CDS Start-End: 2-397
aatgcgcaggcgtgtattctcgagtcaggattggcgggcgagcggctgggacgggatgggattcttctcacggcgcacgttctgtgggcggagtgggcggagctgccggggtcagttggtccaagtgtcccggcctgaggtgtcggccggatccctccttctcccggcgcctcaagcggaagaccattcctcaagaattttgtatccaaggcccaaaagtttgttacccaagatgatgaatgctgacatggatgatctctctgcaagagtagatgcagttaaggaagaaaatctgaagctaaaatcagaaaaccaagttcttggacaatatatagaaaatctcatgtcagcttctagtgtttttcaaacaactgacacaaaaagcaaaagaaagtaagggattgacacccttctgttttatggaattgctgctgatcattttttctttaaaacttggatagattccaaaagttacagtacctttgtggcttcattgaatatttatgaagataatgtcagatgtagacaaaaataacacaataacaggagacttccataagtttgtgtattatgttagtctatgaaaacgtgcaaatgtattgtagagactttatgattagaattgcatatatttatgaaacttaaagatgaatgttttattgaatttgtaggtttagcactgtcttttattataggattagtaagatatacaagaaaataaccaccgtgttgtgaaaaagtgaccaaaatcatgtactaaatgcacagctttatgtaccctgtccaccatcttgtgcctcttctccatttgcctcttccttcctatttcccttccgctaaggaaaaaaattggtgtcacatttgtaaaagtaattttaatagttaatcatctctgagagtaacctgtattttaattgttgaaacttaaccaaaataagatactgtctcagctagggcttgtcatttgtgtatttagtgttaagataggaatgctagtgtctctttaattaattggaaatagatggaggctaaaaatgaaggtttttctttgaaactgaattaacttgggaatatttgttgttaaaaacttctttttgcccaaaataactcattttgtattatctgaaaatatataatttctggtcatgtgtatgttaaaatagaaaattttgaggaaaaatggaaatagggtggaaaagtactcggtaaacagtagtaaccaaatattttcactccagatttgtgttttctctggcacagagtagatcttttgggaaatatatatgaaagtggattaagtttgactacccttatgttagccacatctggatgagaacagttacaaagagtttggtctctaagttgatttgtacccagtgggtcaacttctgcaaaattccgtaatggtgtattagtattagaatagtgaataaaatgggaaagttatacatgtatacttattatcttgctcagtattttatctcacttgttctagaattttctgtaaaccctgctactgggtttgaagagttttagtcatcctttaacaatttttaaaaatttagcttctagattccatttggtaaggaaatcaatattggaagtattgctaaaatcttataatatgaaaagagatccactaatgtagcttaaggttattagatttgggcttttaatcatggaataatcttatgtattggtgtaagagttgatgaatgactttagctgtgtgaatatataatagtcaaactgcaaacattttgcatcccttttgtgacctaatttacagacatttaaattgtgttgcagttctgctttgccgtttaataaaaagctat

SEQ ID NO: 181262 - DNA, 687 bp, Homo sapiens
  Payload ID: 15701
  Gene Symbol: SCOC
  Gene Name: short coiled-coil protein
  ENST ID: ENST00000506322
  CDS Start-End: 263-511
ctcatttttcttactaacaggtctgaaaattgaacaagatggacgggtccaggaaagaggaggaggaagacagcacattcaccaacatttctcttgcagatgacatagatgaagtcacactgttgctaaaccatgcataggttttctattgtttgaattatatgtggtcagaatttcagaaactggcttctttttctttacctcttatattgaccattcctcaagaattttgtatccaaggcccaaaagtttgttacccaagatgatgaatgctgacatggatgcagttgatgctgaaaatcaagtggaactggaggaaaaaacaagacttattaatcaagtgttggaactccaacacacacttgaagatctctctgcaagagtagatgcagttaaggaagaaaatctgaagctaaaatcagaaaaccaagttcttggacaatatatagaaaatctcatgtcagcttctagtgtttttcaaacaactgacacaaaaagcaaaagaaagtaagggattgacacccttctgttttatggaattgctgctgatcattttttctttaaaacttggatagattccaaaagttacagtacctttgtggcttcattgaatatttatgaagataatgtcagatgtagacaaaaataacacaataacaggagacttccataagtttgtgtattatg

SEQ ID NO: 181263 - DNA, 5129 bp, Homo sapiens
  Payload ID: 15701
  Gene Symbol: SCOC
  Gene Name: short coiled-coil protein
  Uniprot ID: Q9UIL1
  ENST ID: ENST00000608372
  CDS Start-End: 28-507
ggacgactggggtgaggcgggcagctaatgcgcaggcgtgtattctcgagtcaggattggcgggcgagcggctgggacgggatgggattcttctcacggcgcacgttctgtgggcggagtgggcggagctgccggggtcagttggtccaagtgtcccggcctgaggtgtcggccggatccctccttctcccggcgcctcaagcggaagaccattcctcaagaattttgtatccaaggcccaaaagtttgttacccaagatgatgaatgctgacatggatgcagttgatgctgaaaatcaagtggaactggaggaaaaaacaagacttattaatcaagtgttggaactccaacacacacttgaagatctctctgcaagagtagatgcagttaaggaagaaaatctgaagctaaaatcagaaaaccaagttcttggacaatatatagaaaatctcatgtcagcttctagtgtttttcaaacaactgacacaaaaagcaaaagaaagtaagggattgacacccttctgttttatggaattgctgctgatcattttttctttaaaacttggatagattccaaaagttacagtacctttgtggcttcattgaatatttatgaagataatgtcagatgtagacaaaaataacacaataacaggagacttccataagtttgtgtattatgttagtctatgaaaacgtgcaaatgtattgtagagactttatgattagaattgcatatatttatgaaacttaaagatgaatgttttattgaatttgtaggtttagcactgtcttttattataggattagtaagatatacaagaaaataaccaccgtgttgtgaaaaagtgaccaaaatcatgtactaaatgcacagctttatgtaccctgtccaccatcttgtgcctcttctccatttgcctcttccttcctatttcccttccgctaaggaaaaaaattggtgtcacatttgtaaaagtaattttaatagttaatcatctctgagagtaacctgtattttaattgttgaaacttaaccaaaataagatactgtctcagctagggcttgtcatttgtgtatttagtgttaagataggaatgctagtgtctctttaattaattggaaatagatggaggctaaaaatgaaggtttttctttgaaactgaattaacttgggaatatttgttgttaaaaacttctttttgcccaaaataactcattttgtattatctgaaaatatataatttctggtcatgtgtatgttaaaatagaaaattttgaggaaaaatggaaatagggtggaaaagtactcggtaaacagtagtaaccaaatattttcactccagatttgtgttttctctggcacagagtagatcttttgggaaatatatatgaaagtggattaagtttgactacccttatgttagccacatctggatgagaacagttacaaagagtttggtctctaagttgatttgtacccagtgggtcaacttctgcaaaattccgtaatggtgtattagtattagaatagtgaataaaatgggaaagttatacatgtatacttattatcttgctcagtattttatctcacttgttctagaattttctgtaaaccctgctactgggtttgaagagttttagtcatcctttaacaatttttaaaaatttagcttctagattccatttggtaaggaaatcaatattggaagtattgctaaaatcttataatatgaaaagagatccactaatgtagcttaaggttattagatttgggcttttaatcatggaataatcttatgtattggtgtaagagttgatgaatgactttagctgtgtgaatatataatagtcaaactgcaaacattttgcatcccttttgtgacctaatttacagacatttaaattgtgttgcagttctgctttgccgtttaataaaaagctatttcagaggttgtgtgtgttttgatatagttgcctaagtaaatggggtatttaggtatagtggtgtatccagggttattcaatgccacagaatagtgtatcttatttaagtacccagttactgattatttaggggaataatatttttattaatacaactataactggttatcaatataaatatcataggctattatacattaatttggaaaacaaaagcaaagcactcaaaggatccagtatctccagggaaaaaggaagttgtattttttagggtaggctaagctactttagcaagagacccagtgataaagaatataaatatagaagtttctctcccaaccagtggttccaaggtcagcattgcaggctagcagcccttgttcaaacagttattcagggactttggctgaggatggtgctgccattttaaatcatggctttcaagtcactctagttattcttctaatttgcagaaaaagaacatggaagtgtacatatgcaaggtgttatgggctgtgcctggaaatggctcatatatcttctcatattccagtggtgtggagacttagttacatctagatacaagaggagctgagaaatgtagtccctggctgggaagccatcttccagctataaatacaagattttggtggctgctagcagcctcagccacagctcttcttgtgctaccaagtatcttcccttacacagaaagtaatccctcttcatccagctagtgattcagctcacaatctaggatctctattaaaggtccatccctttacatgtggcttctaatagtctgacaatctctaaactgataggcaaattatttgctctcacccttgctgctgcccatttataatgtagttgggacaggatggccaaataaaaagtctcaatttggaaaatggaataaagggaaacgtaaaaattgtggaatgctcctgggagatgtatgaagattttgtccctagcagtggagaagttccttgattcaactatgattctgatctctggcaggggactcccttgttcattgaactccatggtttcccctctggaaagttactccttatccattttcttccatggctacctcagaagtagagattgggtgttcactccatgggaattgtgaagacagtccacttcctgctggtgtgaatttggtgcccatcattttaaggccaagctcatgtttctgtggaatacgattctctcaaaaactcaagcctttttatcagtgtgcttctgattgcatatgccgaggaaccacaaccaagcttttgaccaaattctcaaagtatgtattatttttgcctttctttaatggaggctatcttgagatcaactaaaaataagattacactgggaatgttacatgcagatcatcactgcaaagctgggttcctttggcttaacgattggtagagaagtcttcatgggcttccccccaatctcccccacctcaaaaataattttgaacctttgctgctattcagacttcagaaacaattggcttaatttcatgaggttccttgtatcaaaactttgtctattcccttctatctttgcttgaaaatgtcaatttttttgataccttgctgaaagcaaggaatagccaattcacttaacattctggctttttccagctagagctatcagattagtaggtgtcaaaatatatccccactgcttgtcatgttaatggtaagctaatgctatatacttagtttttgctatgcaatacttcaggataatttcttcattagaaatataggtggtacacagtgtgcacagggactgtgtccagcttctggaaaagactcgaccaaattttagacaggcacctctgagccctgtttttgactagtccagttttagcaaaaatcctgctaaatgagtttagagataatcccatcctcaataactgatgatcgtcaacctggcctgtctttggcaagaatcaccctactcttgatgtctccagttagtagttttccatccactgacctcatcactgctcattgactataaatcctcagttgtatttgctgtgttagttgagcccagtttctttcccttattgggtgatggtcttaacatatacagtcctgagtaaagtcttctttactgctttaacaagtgtcagaatggtttttcctttaatacttcctagtttacatgctggtagaataatgtttggtagggaaaaatcagcatactccttgttatggactgaatgtgtcctcccaaaattcttaggttgaaatcctaaccccaatgtgatgcttttaggaggtggggcttttgggagataattaggtaatgagggtgaaaccctcatgaatgggattgtgtcattaaaagaaaccccagagagctctctttctgccacatagaagacagcagtctgcatcttggaagagggccctcaacactgatctctcagacttccagcttccaaaactgagaaataaatttgtttataagccacccagtctatattttgttatagcatcccaaatagtttaaggcacccattttccccactgtttcccaatacaaatttccccagtattgacactgccattctatgcaaaatgtgtcctctttatagtccctttggactcacagcaggttactacacatcacagatcctcgtctgaaacttgtagggccagatgtcttagaatttggagttttccagattttataaaatattatgactcagacaccaatatggtttggggcaacacctataatcaagtatattaacatttctgtagcaaaatgagtattaaagtaggataaagaaagactacatatgtacataaaaccttgccggggaagtcaggctcagctaccaggtgagttttgttgccaaaatgctaggaaaatctttaacttttcagagatttttggtcatggaattgtagcaacaaaaccttttgtagaagagtaaccaaaatcatgtatgcatttagttccaactagttaatgtcacatctctattcctgtcacccttccctgtgatctagtcccttttgtaagagaaatatggtagttgaattataaaatctaaaattaattttgtggtccaaagaaaagcaaaatagatctttagaatgtaaagccattctttactttgcccaataaaaattttgttattccctg

SEQ ID NO: 181264 - DNA, 1959 bp, Homo sapiens
  Payload ID: 15701
  Gene Symbol: SCOC
  Gene Name: short coiled-coil protein
  Uniprot ID: Q9UIL1
  ENST ID: ENST00000614192
  CDS Start-End: 28-507
ggacgactggggtgaggcgggcagctaatgcgcaggcgtgtattctcgagtcaggattggcgggcgagcggctgggacgggatgggattcttctcacggcgcacgttctgtgggcggagtgggcggagctgccggggtcagttggtccaagtgtcccggcctgaggtgtcggccggatccctccttctcccggcgcctcaagcggaagaccattcctcaagaattttgtatccaaggcccaaaagtttgttacccaagatgatgaatgctgacatggatgcagttgatgctgaaaatcaagtggaactggaggaaaaaacaagacttattaatcaagtgttggaactccaacacacacttgaagatctctctgcaagagtagatgcagttaaggaagaaaatctgaagctaaaatcagaaaaccaagttcttggacaatatatagaaaatctcatgtcagcttctagtgtttttcaaacaactgacacaaaaagcaaaagaaagtaagggattgacacccttctgttttatggaattgctgctgatcattttttctttaaaacttggatagattccaaaagttacagtacctttgtggcttcattgaatatttatgaagataatgtcagatgtagacaaaaataacacaataacaggagacttccataagtttgtgtattatgttagtctatgaaaacgtgcaaatgtattgtagagactttatgattagaattgcatatatttatgaaacttaaagatgaatgttttattgaatttgtaggtttagcactgtcttttattataggattagtaagatatacaagaaaataaccaccgtgttgtgaaaaagtgaccaaaatcatgtactaaatgcacagctttatgtaccctgtccaccatcttgtgcctcttctccatttgcctcttccttcctatttcccttccgctaaggaaaaaaattggtgtcacatttgtaaaagtaattttaatagttaatcatctctgagagtaacctgtattttaattgttgaaacttaaccaaaataagatactgtctcagctagggcttgtcatttgtgtatttagtgttaagataggaatgctagtgtctctttaattaattggaaatagatggaggctaaaaatgaaggtttttctttgaaactgaattaacttgggaatatttgttgttaaaaacttctttttgcccaaaataactcattttgtattatctgaaaatatataatttctggtcatgtgtatgttaaaatagaaaattttgaggaaaaatggaaatagggtggaaaagtactcggtaaacagtagtaaccaaatattttcactccagatttgtgttttctctggcacagagtagatcttttgggaaatatatatgaaagtggattaagtttgactacccttatgttagccacatctggatgagaacagttacaaagagtttggtctctaagttgatttgtacccagtgggtcaacttctgcaaaattccgtaatggtgtattagtattagaatagtgaataaaatgggaaagttatacatgtatacttattatcttgctcagtattttatctcacttgttctagaattttctgtaaaccctgctactgggtttgaagagttttagtcatcctttaacaatttttaaaaatttagcttctagattccatttggtaaggaaatcaatattggaagtattgctaaaatcttataatatgaaaagagatccactaatgtagcttaaggttattagatttgggcttttaatcatggaataatcttatgtattggtgtaagagttgatgaatgactttagctgtgtgaatatataatagtcaaactgcaaacattttgcatcccttttgtgacctaatttacagacatttaaattgtgttgcagttctgctttgccgtttaataaaaagctatttcagaggttg

SEQ ID NO: 181265 - DNA, 1951 bp, Homo sapiens
  Payload ID: 15702
  Gene Symbol: SHOX
  Gene Name: short stature homeobox
  Uniprot ID: O15266
  ENST ID: ENST00000334060
  CDS Start-End: 692-1369
cgcctgcttttgcccgggtcctgagaacaggggctccccacactttttttttttttggttttgttttatttcgtttccgcgcgtctctttctactgcaaacagaaatgggagggtggacaggcgggtaggagcggatcagacgcccaggacgcagcagcccgagtccgcacagggtttgcgggaggtggtgaccgcgctggggacgccaggacgcgaatgaacctccggggcgcgctcggggcctgcgctcagagcttggaaaactggagtttgcttttcctccggccacggagagaacgcgggtaacctgtgtggggggctcgggcgcctgcgcccccctcctgcgcgcgcgctctcccttccaaaaatgggatctttcccccttcgcaccaaggtgtacggacgccaaacagtgatgaaatgagaagaaagccaattgccggcctggggggtgggggagacacagcgtctctgcgtgcgtccgccgcggagcccggagaccagtaattgcaccagacaggcagcgcatggggggctgggcgaggtcgccgcgtataaatagtgagatttccaatggaaaggcgtaaataacagcgctggtgatccacccgcgcgcacgggccgtcctctccgcgcggggagacgcgcgcatccaccagccccggctgctcgccagccccggccccagccatggaagagctcacggcttttgtatccaagtcttttgaccagaaaagcaaggacggtaacggcggaggcggaggcggcggaggtaagaaggattccattacgtaccgggaagttttggagagcggactggcgcgctcccgggagctggggacgtcggattccagcctccaggacatcacggagggcggcggccactgcccggtgcatttgttcaaggaccacgtagacaatgacaaggagaaactgaaagaattcggcaccgcgagagtggcagaagggatttatgaatgcaaagagaagcgcgaggacgtgaagtcggaggacgaggacgggcagaccaagctgaaacagaggcgcagccgcaccaacttcacgctggagcagctgaacgagctcgagcgactcttcgacgagacccattaccccgacgccttcatgcgcgaggagctcagccagcgcctggggctctccgaggcgcgcgtgcaggtttggttccagaaccggagagccaagtgccgcaaacaagagaatcagatgcataaaggcgtcatcttgggcacagccaaccacctagacgcctgccgagtggcaccctacgtcaacatgggagccttacggatgcctttccaacagatggagttttgctcttgtcgcccgggctggagtataatggcatgatctcgactcactgcaacctccgcctcccgagttcaagcgattctcctgcctcagcctcccgagtagctgggattacaggtgcccaccaccatgtcaagataatgtttgtattttcagtagagatggggtttgaccatgttggccaggctggtctcgaactcctgacctcaggtgatccacccgccttagcctcccaaagtgctgggatgacaggcgtgagcccctgcgcccggcctttgtaactttatttttaattttttttttttttttaagaaagacagagtcttgctctgtcacccaggctggagcacactggtgcgatcatagctcactgcagcctcaaactcctgggctcaagcaatcctcccacctcagcctcctgagtagctgggactacaggcacccaccaccacacccagctaatttttttgatttttactagagacgggatcttgctttgctgctgaggctggtcttgagctcctgagctccaaagatcctctcacctccacctcccaaagtgttagaattacaagcatgaaccactgcccgtggtctccaaaaaaaggactgttacgtgga

SEQ ID NO: 181266 - DNA, 1351 bp, Homo sapiens
  Payload ID: 15702
  Gene Symbol: SHOX
  Gene Name: short stature homeobox
  Uniprot ID: O15266
  ENST ID: ENST00000381575
  CDS Start-End: 92-769
gtgatccacccgcgcgcacgggccgtcctctccgcgcggggagacgcgcgcatccaccagccccggctgctcgccagccccggccccagccatggaagagctcacggcttttgtatccaagtcttttgaccagaaaagcaaggacggtaacggcggaggcggaggcggcggaggtaagaaggattccattacgtaccgggaagttttggagagcggactggcgcgctcccgggagctggggacgtcggattccagcctccaggacatcacggagggcggcggccactgcccggtgcatttgttcaaggaccacgtagacaatgacaaggagaaactgaaagaattcggcaccgcgagagtggcagaagggatttatgaatgcaaagagaagcgcgaggacgtgaagtcggaggacgaggacgggcagaccaagctgaaacagaggcgcagccgcaccaacttcacgctggagcagctgaacgagctcgagcgactcttcgacgagacccattaccccgacgccttcatgcgcgaggagctcagccagcgcctggggctctccgaggcgcgcgtgcaggtttggttccagaaccggagagccaagtgccgcaaacaagagaatcagatgcataaaggcgtcatcttgggcacagccaaccacctagacgcctgccgagtggcaccctacgtcaacatgggagccttacggatgcctttccaacagatggagttttgctcttgtcgcccgggctggagtataatggcatgatctcgactcactgcaacctccgcctcccgagttcaagcgattctcctgcctcagcctcccgagtagctgggattacaggtgcccaccaccatgtcaagataatgtttgtattttcagtagagatggggtttgaccatgttggccaggctggtctcgaactcctgacctcaggtgatccacccgccttagcctcccaaagtgctgggatgacaggcgtgagcccctgcgcccggcctttgtaactttatttttaattttttttttttttttaagaaagacagagtcttgctctgtcacccaggctggagcacactggtgcgatcatagctcactgcagcctcaaactcctgggctcaagcaatcctcccacctcagcctcctgagtagctgggactacaggcacccaccaccacacccagctaatttttttgatttttactagagacgggatcttgctttgctgctgaggctggtcttgagctcctgagctccaaagatcctctcacctccacctcccaaagtgttagaattacaagcatgaaccactgcccgtggtctccaaaaaaaggactgttacgtgga

SEQ ID NO: 181267 - DNA, 3757 bp, Homo sapiens
  Payload ID: 15702
  Gene Symbol: SHOX
  Gene Name: short stature homeobox
  Uniprot ID: O15266
  ENST ID: ENST00000381578
  CDS Start-End: 692-1570
cgcctgcttttgcccgggtcctgagaacaggggctccccacactttttttttttttggttttgttttatttcgtttccgcgcgtctctttctactgcaaacagaaatgggagggtggacaggcgggtaggagcggatcagacgcccaggacgcagcagcccgagtccgcacagggtttgcgggaggtggtgaccgcgctggggacgccaggacgcgaatgaacctccggggcgcgctcggggcctgcgctcagagcttggaaaactggagtttgcttttcctccggccacggagagaacgcgggtaacctgtgtggggggctcgggcgcctgcgcccccctcctgcgcgcgcgctctcccttccaaaaatgggatctttcccccttcgcaccaaggtgtacggacgccaaacagtgatgaaatgagaagaaagccaattgccggcctggggggtgggggagacacagcgtctctgcgtgcgtccgccgcggagcccggagaccagtaattgcaccagacaggcagcgcatggggggctgggcgaggtcgccgcgtataaatagtgagatttccaatggaaaggcgtaaataacagcgctggtgatccacccgcgcgcacgggccgtcctctccgcgcggggagacgcgcgcatccaccagccccggctgctcgccagccccggccccagccatggaagagctcacggcttttgtatccaagtcttttgaccagaaaagcaaggacggtaacggcggaggcggaggcggcggaggtaagaaggattccattacgtaccgggaagttttggagagcggactggcgcgctcccgggagctggggacgtcggattccagcctccaggacatcacggagggcggcggccactgcccggtgcatttgttcaaggaccacgtagacaatgacaaggagaaactgaaagaattcggcaccgcgagagtggcagaagggatttatgaatgcaaagagaagcgcgaggacgtgaagtcggaggacgaggacgggcagaccaagctgaaacagaggcgcagccgcaccaacttcacgctggagcagctgaacgagctcgagcgactcttcgacgagacccattaccccgacgccttcatgcgcgaggagctcagccagcgcctggggctctccgaggcgcgcgtgcaggtttggttccagaaccggagagccaagtgccgcaaacaagagaatcagatgcataaaggcgtcatcttgggcacagccaaccacctagacgcctgccgagtggcaccctacgtcaacatgggagccttacggatgcctttccaacaggtccaggctcagctgcagctggaaggcgtggcccacgcgcacccgcacctgcacccgcacctggcggcgcacgcgccctacctgatgttccccccgccgcccttcgggctgcccatcgcgtcgctggccgagtccgcctcggccgccgccgtggtcgccgccgccgccaaaagcaacagcaagaattccagcatcgccgacctgcggctcaaggcgcggaagcacgcggaggccctggggctctgacccgccgcgcagccccccgcgcgcccggactcccgggctccgcgcaccccgcctgcaccgcgcgtcctgcactcaaccccgcctggagctccttccgcggccaccgtgctccgggcaccccgggagctcctgcaagaggcctgaggagggaggctcccgggaccgtccacgcacgacccagccagaccctcgcggagatggtgcagaaggcggagcgggtgagcggccgtgcgtccagcccgggcctctccaaggctgcccgtgcgtcctgggaccctggagaagggtaaacccccgcctggctgcgtcttcctctgctataccctatgcatgcggttaactacacacgtttggaagatccttagagtctattgaaactgcaaagatcccggagctggtctccgatgaaaatgccatttcttcgttgccaacgattttctttactaccatgctccttccttcatcccgagaggctgcggaacgggtgtggatttgaatgtggacttcggaatcccaggaggcaggggccgggctctcctccaccgctcccccggagcctcccaggcagcaataaggaaatagttctctggctgaggctgaggacgtgaaccgcgggctttggaaagggaggggagggagacccgaacctcccacgttgggactcccacgttccggggacctgaatgaggaccgactttataacttttccagtgtttgattcccaaattgggtctggttttgttttggattggtatttttttttttttttttttttttttttttttttgctgtgttacaggattcagacgcaaaagacttgcataagagacggacgcgtggttgcaaggtgtcatactgatatgcagcattaactttactgacatggagtgaagtgcaatattataaatattatagattaaaaaaaaaatagccgtgcactcttgaccccgtcagcgtccaacgtggaaaaggcgttacctcttctcccagcgctggccgcctggccactgagggccctttgcaaaaatcacgggtgtagagatggccctgggcgcgctgggagtgtggttgtgtttctgaaggggataaaagagggcacggtggtgccaagatatcagtttggtacctgagctgtttctggttgggaagcgtaaaagccagggagagatccagagagttttcaagtttttgcagatgtaggtggttccagcttttctttctcccctactccatcttctgcgttcccccagttcttttatttctttgttttttatttttgagacagagacttgctttgtcgcccaggctggagtgcagtggcgcaatgtcagctcactgccacctccgcctcccgggttcaagcgatgctcctgcctcagcctcccgagtagctgggactacaggcacctgccaccacccccggctaattttttgtatttatagtagagacggggtttcaccgtgttggccaggctcgtctcgaactcctgacctcaggtgatctgcccgcctcggcctcccaacgtgcccccagttttataaacagcagatagcaacttgtcgtcacagctggcatgggctggacagttgcttgaaatgacctaaccaaaaacattcaagggttctgcccccagatttcgggagatccacgttccatgttctgattggttttctgggaacacagcaaggggtttggtgacctccgagaagatccatctgcatgattggcattagttaccacagcctgcccagagagaaactatcttctcccaacatttactaacatccactggtcaactctcttatttccataacacatttgcatctttctggattcaagcttggtggttttctttcctaacttctgatttagatacttctccctgaggtggggataaaagaaaaaaaaaaacaacttctttttttcttccgcataacactttctatcttgtcactgagctgaactgtagatccatttggacccgtctcatttgtatcttctgatattctttatacaaaccaaaagtccccttcaacattttttatgtcaaaatgttacaaccgctgtaaaatgacggagagagagagaaagaatcccagacattaacggtattagagagtttgcctcattcatccatttttcttaaaagctggaaattaaaaaaaaaaaagagagagagaggcttt

SEQ ID NO: 181268 - DNA, 1902 bp, Homo sapiens
  Payload ID: 15702
  Gene Symbol: SHOX
  Gene Name: short stature homeobox
  Uniprot ID: O15266
  ENST ID: ENST00000554971
  CDS Start-End: 92-970
gtgatccacccgcgcgcacgggccgtcctctccgcgcggggagacgcgcgcatccaccagccccggctgctcgccagccccggccccagccatggaagagctcacggcttttgtatccaagtcttttgaccagaaaagcaaggacggtaacggcggaggcggaggcggcggaggtaagaaggattccattacgtaccgggaagttttggagagcggactggcgcgctcccgggagctggggacgtcggattccagcctccaggacatcacggagggcggcggccactgcccggtgcatttgttcaaggaccacgtagacaatgacaaggagaaactgaaagaattcggcaccgcgagagtggcagaagggatttatgaatgcaaagagaagcgcgaggacgtgaagtcggaggacgaggacgggcagaccaagctgaaacagaggcgcagccgcaccaacttcacgctggagcagctgaacgagctcgagcgactcttcgacgagacccattaccccgacgccttcatgcgcgaggagctcagccagcgcctggggctctccgaggcgcgcgtgcaggtttggttccagaaccggagagccaagtgccgcaaacaagagaatcagatgcataaaggcgtcatcttgggcacagccaaccacctagacgcctgccgagtggcaccctacgtcaacatgggagccttacggatgcctttccaacaggtccaggctcagctgcagctggaaggcgtggcccacgcgcacccgcacctgcacccgcacctggcggcgcacgcgccctacctgatgttccccccgccgcccttcgggctgcccatcgcgtcgctggccgagtccgcctcggccgccgccgtggtcgccgccgccgccaaaagcaacagcaagaattccagcatcgccgacctgcggctcaaggcgcggaagcacgcggaggccctggggctctgacccgccgcgcagccccccgcgcgcccggactcccgggctccgcgcaccccgcctgcaccgcgcgtcctgcactcaaccccgcctggagctccttccgcggccaccgtgctccgggcaccccgggagctcctgcaagaggcctgaggagggaggctcccgggaccgtccacgcacgacccagccagaccctcgcggagatggtgcagaaggcggagcgggtgagcggccgtgcgtccagcccgggcctctccaaggctgcccgtgcgtcctgggaccctggagaagggtaaacccccgcctggctgcgtcttcctctgctataccctatgcatgcggttaactacacacgtttggaagatccttagagtctattgaaactgcaaagatcccggagctggtctccgatgaaaatgccatttcttcgttgccaacgattttctttactaccatgctccttccttcatcccgagaggctgcggaacgggtgtggatttgaatgtggacttcggaatcccaggaggcaggggccgggctctcctccaccgctcccccggagcctcccaggcagcaataaggaaatagttctctggctgaggctgaggacgtgaaccgcgggctttggaaagggaggggagggagacccgaacctcccacgttgggactcccacgttccggggacctgaatgaggaccgactttataacttttccagtgtttgattcccaaattgggtctggttttgttttggattggtatttttttttttttttttttttttttttttttttgctgtgttacaggattcagacgcaaaagacttgcataagagacggacgcgtggttgcaaggtgtcatactgatatgcagcattaactttactgacatggagtgaagtgcaatattataaatattatagattaaaaaaaaaatagc

SEQ ID NO: 181269 - DNA, 2072 bp, Homo sapiens
  Payload ID: 15703
  Gene Symbol: SHOX2
  Gene Name: short stature homeobox 2
  Uniprot ID: O60902
  ENST ID: ENST00000389589
  CDS Start-End: 137-1204
cctccctctcctcccccacctcctgtcccattgatgtgttattattgggggggctggagcagtaaaaaaagaagaaggaaaaaaagagcggggctctgctggcagaggttgagcgccgggctgacgtgcggcggcgatggaagaacttacggcgttcgtctccaagtcttttgaccagaaagtgaaggagaagaaggaggcgatcacgtaccgggaggtgctggagagcgggccgctgcgcggggccaaggagccgaccggctgcaccgaggcgggccgcgacgaccgcagcagcccggcagtccgggcggccggcggaggcggcggcggaggaggcggaggcggcggcggaggaggcggaggaggtgtaggaggaggaggagcaggcggaggagctggaggagggcgctctcccgtccgggagctggacatgggcgccgccgagagaagcagggagccgggcagcccgcgactgacggagggtagaaggaagccaacgaaagctgaggtccaggctacgctgcttctcccgggcgaggcgtttcggtttcttgtgtccccggagctgaaagatcgcaaagaggatgcgaaagggatggaggacgaaggccagaccaaaatcaagcagaggcgaagtcggaccaatttcaccctggaacaactcaatgagctggagaggctttttgacgagacccactatcccgacgccttcatgcgagaggaactgagccagcgactgggcctgtcggaggcccgagtgcaggtttggtttcaaaatcgaagagctaaatgtagaaaacaagaaaatcaactccataaaggtgttctcataggggccgccagccagtttgaagcttgtagagtcgcaccttatgtcaacgtaggtgctttaaggatgccatttcagcaggatagtcattgcaacgtgacgcccttgtcctttcaggttcaggcgcagctgcagctggacagcgctgtggcgcacgcgcaccaccacctgcatccgcacctggccgcgcacgcgccctacatgatgttcccagcaccgcccttcggactgccgctcgccacgctggccgcggattcggcttccgccgcctcggtagtggcggccgcagcagccgccaagaccaccagcaagaactccagcatcgccgatctcagactgaaagccaaaaagcacgccgcagccctgggtctgtgacgccaacgccagcaccaatgtcgcgcctgtcccgcggcactcagcctgcacgccctccgcgccccgctgcttctccgttacccctttgagacctcgggagccggccctcttcccgcctcactgaccatccctcgtcccctatcgcatcttggactcggaaagccagactccacgcaggaccagggatctcacgaggcacgcaggctccgtggctcctgcccgttttcctactcgagggcctagaattgggttttgtaggagcgggtttgggggagtctggagagagactggacaggggagtgctggaaccgcggagtttggctcaccgcaaagctgcaacgatggactcttgcatagaaaaaaaaatcttgttaacaatgaaaaaatgagcaaacaaaaaaatcgaaagacaaacgggagagaaaaagaggaagggaacttatttcttaactgctatttggcagaagctgaaattggagaaccaaggagcaaaaacaaattttaaaattaaagtattttatacatttaaaaatatggaaaaacaacccagacgattctcgagagactggggggagttaccaacttaaatgtgtgtttttaaaaatgcgctaagaaggcaaagcagaaagaagaggtatacttatttaaaaaactaagatgaaaaaagtgcgcagctgggaagttcacaggttttgaaactgacctttttctgcgaagttcacgttaacacgagaaatttgatgagagaggcgggcctccttttacgttgaatcagatgctttgagtttaaacccaccatgtatggaagagcaagaaaagagaaaatattaaaacgaggagagagaaaaataatattaacacaaaaaaa

SEQ ID NO: 181270 - DNA, 3038 bp, Homo sapiens
  Payload ID: 15703
  Gene Symbol: SHOX2
  Gene Name: short stature homeobox 2
  Uniprot ID: O60902
  ENST ID: ENST00000441443
  CDS Start-End: 27-1022
gagcgccgggctgacgtgcggcggcgatggaagaacttacggcgttcgtctccaagtcttttgaccagaaagtgaaggagaagaaggaggcgatcacgtaccgggaggtgctggagagcgggccgctgcgcggggccaaggagccgaccggctgcaccgaggcgggccgcgacgaccgcagcagcccggcagtccgggcggccggcggaggcggcggcggaggaggcggaggcggcggcggaggaggcggaggaggtgtaggaggaggaggagcaggcggaggagctggaggagggcgctctcccgtccgggagctggacatgggcgccgccgagagaagcagggagccgggcagcccgcgactgacggaggtgtccccggagctgaaagatcgcaaagaggatgcgaaagggatggaggacgaaggccagaccaaaatcaagcagaggcgaagtcggaccaatttcaccctggaacaactcaatgagctggagaggctttttgacgagacccactatcccgacgccttcatgcgagaggaactgagccagcgactgggcctgtcggaggcccgagtgcaggtttggtttcaaaatcgaagagctaaatgtagaaaacaagaaaatcaactccataaaggtgttctcataggggccgccagccagtttgaagcttgtagagtcgcaccttatgtcaacgtaggtgctttaaggatgccatttcagcaggatagtcattgcaacgtgacgcccttgtcctttcaggttcaggcgcagctgcagctggacagcgctgtggcgcacgcgcaccaccacctgcatccgcacctggccgcgcacgcgccctacatgatgttcccagcaccgcccttcggactgccgctcgccacgctggccgcggattcggcttccgccgcctcggtagtggcggccgcagcagccgccaagaccaccagcaagaactccagcatcgccgatctcagactgaaagccaaaaagcacgccgcagccctgggtctgtgacgccaacgccagcaccaatgtcgcgcctgtcccgcggcactcagcctgcacgccctccgcgccccgctgcttctccgttacccctttgagacctcgggagccggccctcttcccgcctcactgaccatccctcgtcccctatcgcatcttggactcggaaagccagactccacgcaggaccagggatctcacgaggcacgcaggctccgtggctcctgcccgttttcctactcgagggcctagaattgggttttgtaggagcgggtttgggggagtctggagagagactggacaggggagtgctggaaccgcggagtttggctcaccgcaaagctgcaacgatggactcttgcatagaaaaaaaaatcttgttaacaatgaaaaaatgagcaaacaaaaaaatcgaaagacaaacgggagagaaaaagaggaagggaacttatttcttaactgctatttggcagaagctgaaattggagaaccaaggagcaaaaacaaattttaaaattaaagtattttatacatttaaaaatatggaaaaacaacccagacgattctcgagagactggggggagttaccaacttaaatgtgtgtttttaaaaatgcgctaagaaggcaaagcagaaagaagaggtatacttatttaaaaaactaagatgaaaaaagtgcgcagctgggaagttcacaggttttgaaactgacctttttctgcgaagttcacgttaacacgagaaatttgatgagagaggcgggcctccttttacgttgaatcagatgctttgagtttaaacccaccatgtatggaagagcaagaaaagagaaaatattaaaacgaggagagagaaaaataatattaacacaaaaaaatgccacagacaatgatttctctgagaaattattatggcaaaactgtctggactgctgacagtaaattccggtttgcatgttacttgtattccattgatggtgtgtctcctcccacccccttatctcccatgcactcactccattttcatcttcactatgaaaaacaataccaaaagtatctggaaattgatatatatatatccatatatatatatcatatatttgccatatatatatatatatatatatatatatatatatatatatatttgccctgtctttgatcctggggaacaaaagaaaaaagtcagaaagggaaaaaattacactcattgtcctaagaagacagaggtgggcagaatatgtggggaaaggaaaaagaaaacaagaccaccaaatgaaataatgaaggtacagcgcctcgctgtgccagacacagtaggcgctcaatcagtattagttcccaccattccccttttcttgtgttccttcttgttggtttcctgaagtcctatttgaagacagtggtttatttccccctctctatcccgtcaaattcaccttaaataacacccagctagatacaggcactaggtttgtgtaagatatgttgatacacacgaacaaagtttattttgactataatgtgtggactgactttcaacatttgcattttatctcacaaaggtgtatctattcaagtaaccttttttttttgtttgtttgtttcttttttgtttttttttttcttttggttgtttgtttcaattcatgtagctatttaaactgggataccttggactaagccagtctgtatcccaattcgctagcaagcctaagtttgtggggttttgtttttgtttttgttttaccttctaatttacaagaaagaggaaaagctcttctaactgaactttggtatgcggttgagctttgtaactatttgttctccatgaaaacaaaattatttatatttgacatatttttttctagtgtattaagttattttaaacaaaagatgttatctcatgacgtgttgtcagtacaaaatgtgtcgcctccaattctgttaaaccttttaaataagtgccaagttattaattgaagacactttgcgatcaattgaatgaaaatatcgtttcatttga

SEQ ID NO: 181271 - DNA, 1513 bp, Homo sapiens
  Payload ID: 15703
  Gene Symbol: SHOX2
  Gene Name: short stature homeobox 2
  ENST ID: ENST00000425436
  CDS Start-End: 43-615
gtgtccccggagctgaaagatcgcaaagaggatgcgaaagggatggaggacgaaggccagaccaaaatcaagcagaggcgaagtcggaccaatttcaccctggaacaactcaatgagctggagaggctttttgacgagacccactatcccgacgccttcatgcgagaggaactgagccagcgactgggcctgtcggaggcccgagtgcaggtttggtttcaaaatcgaagagctaaatgtagaaaacaagaaaatcaactccataaaggtgttctcataggggccgccagccagtttgaagcttgtagagtcgcaccttatgtcaacgtaggtgctttaaggatgccatttcagcaggttcaggcgcagctgcagctggacagcgctgtggcgcacgcgcaccaccacctgcatccgcacctggccgcgcacgcgccctacatgatgttcccagcaccgcccttcggactgccgctcgccacgctggccgcggattcggcttccgccgcctcggtagtggcggccgcagcagccgccaagaccaccagcaagaactccagcatcgccgatctcagactgaaagccaaaaagcacgccgcagccctgggtctgtgacgccaacgccagcaccaatgtcgcgcctgtcccgcggcactcagcctgcacgccctccgcgccccgctgcttctccgttacccctttgagacctcgggagccggccctcttcccgcctcactgaccatccctcgtcccctatcgcatcttggactcggaaagccagactccacgcaggaccagggatctcacgaggcacgcaggctccgtggctcctgcccgttttcctactcgagggcctagaattgggttttgtaggagcgggtttgggggagtctggagagagactggacaggggagtgctggaaccgcggagtttggctcaccgcaaagctgcaacgatggactcttgcatagaaaaaaaaatcttgttaacaatgaaaaaatgagcaaacaaaaaaatcgaaagacaaacgggagagaaaaagaggaagggaacttatttcttaactgctatttggcagaagctgaaattggagaaccaaggagcaaaaacaaattttaaaattaaagtattttatacatttaaaaatatggaaaaacaacccagacgattctcgagagactggggggagttaccaacttaaatgtgtgtttttaaaaatgcgctaagaaggcaaagcagaaagaagaggtatacttatttaaaaaactaagatgaaaaaagtgcgcagctgggaagttcacaggttttgaaactgacctttttctgcgaagttcacgttaacacgagaaatttgatgagagaggcgggcctccttttacgttgaatcagatgctttgagtttaaacccaccatgtatggaagagcaagaaaagagaaaatattaaaacgaggagagagaaattattatggcaaaactgtctggactgctgacagtaaattccggtttgcatg

SEQ ID NO: 181272 - DNA, 1866 bp, Homo sapiens
  Payload ID: 15703
  Gene Symbol: SHOX2
  Gene Name: short stature homeobox 2
  Uniprot ID: O60902
  ENST ID: ENST00000483851
  CDS Start-End: 480-1439
ccgagttgcgaggggaggtaatttactcaaaacaagaggccgccgttaggaagtataaatagtgggacttcaagcgcagcgtcgctatcagatctgaactctccgcaggaagaattgtcaaagatcttaacattgaacaagcgcgctccggcagggaagcatcagttcccatttccctccggcagcccccgccccttctcttctcctcctcctcctccctctcctcttcacccttctccccctcttcctcttcttcctcctcctcctcttcttacttctttttctccttctacttctcctcctctttcttctttcttctcctctttttcttcttctttctcctcctccctctcctcccccacctcctgtcccattgatgtgttattattgggggggctggagcagtaaaaaaagaagaaggaaaaaaagagcggggctctgctggcagaggttgagcgccgggctgacgtgcggcggcgatggaagaacttacggcgttcgtctccaagtcttttgaccagaaagtgaaggagaagaaggaggcgatcacgtaccgggaggtgctggagagcgggccgctgcgcggggccaaggagccgaccggctgcaccgaggcgggccgcgacgaccgcagcagcccggcagtccgggcggccggcggaggcggcggcggaggaggcggaggcggcggcggaggaggcggaggaggtgtaggaggaggaggagcaggcggaggagctggaggagggcgctctcccgtccgggagctggacatgggcgccgccgagagaagcagggagccgggcagcccgcgactgacggaggtgtccccggagctgaaagatcgcaaagaggatgcgaaagggatggaggacgaaggccagaccaaaatcaagcagaggcgaagtcggaccaatttcaccctggaacaactcaatgagctggagaggctttttgacgagacccactatcccgacgccttcatgcgagaggaactgagccagcgactgggcctgtcggaggcccgagtgcaggtttggtttcaaaatcgaagagctaaatgtagaaaacaagaaaatcaactccataaaggtgttctcataggggccgccagccagtttgaagcttgtagagtcgcaccttatgtcaacgtaggtgctttaaggatgccatttcagcaggttcaggcgcagctgcagctggacagcgctgtggcgcacgcgcaccaccacctgcatccgcacctggccgcgcacgcgccctacatgatgttcccagcaccgcccttcggactgccgctcgccacgctggccgcggattcggcttccgccgcctcggtagtggcggccgcagcagccgccaagaccaccagcaagaactccagcatcgccgatctcagactgaaagccaaaaagcacgccgcagccctgggtctgtgacgccaacgccagcaccaatgtcgcgcctgtcccgcggcactcagcctgcacgccctccgcgccccgctgcttctccgttacccctttgagacctcgggagccggccctcttcccgcctcactgaccatccctcgtcccctatcgcatcttggactcggaaagccagactccacgcaggaccagggatctcacgaggcacgcaggctccgtggctcctgcccgttttcctactcgagggcctagaattgggttttgtaggagcgggtttgggggagtctggagagagactggacaggggagtgctggaaccgcggagtttggctcaccgcaaagctgcaacgatggactcttgcatagaaaaaaaaatcttgttaacaatgaaaaaatgagcaaacaaaaaaatcgaaagacaaacgggagagaaaaa

SEQ ID NO: 181273 - DNA, 439 bp, Homo sapiens
  Payload ID: 15703
  Gene Symbol: SHOX2
  Gene Name: short stature homeobox 2
  ENST ID: ENST00000554685
  CDS Start-End: 1-439
gagagaagcagggagccgggcagcccgcgactgacggaggaaggaagccaacgaaagctgaggtccaggctacgctgcttctcccgggcgaggcgtttcggtttcttgtgtccccggagctgaaagatcgcaaagaggatgcgaaagggatggaggacgaaggccagaccaaaatcaagcagaggcgaagtcggaccaatttcaccctggaacaactcaatgagctggagaggctttttgacgagacccactatcccgacgccttcatgcgagaggaactgagccagcgactgggcctgtcggaggcccgagtgcaggtttggtttcaaaatcgaagagctaaatgtagaaaacaagaaaatcaactccataaaggtgttctcataggggccgccagccagtttgaagcttgtagagtcgcaccttatgtcaacgtagg

SEQ ID NO: 181274 - DNA, 2879 bp, Homo sapiens
  Payload ID: 15704
  Gene Symbol: SHQ1
  Gene Name: SHQ1, H/ACA ribonucleoprotein assembly factor
  Uniprot ID: Q6PI26
  ENST ID: ENST00000325599
  CDS Start-End: 141-1874
gcgcgagcacttccgcctcgagccggaagctccgtccctcacaccgagagttcctgcgcgtggggagttggagagtttgcgtggcgggaacgcggcggcagtgagagcgagcggcgccggcccttgcgtccggtgcggcgatgctgaccccggcgttcgacctcagccaggatccggacttcctgactatcgccatccgcgtgccctacgcccgggtctccgagttcgacgtctacttcgaggggtctgacttcaagttctacgccaagccatactttctcagattaacccttcctggaagaattgtagaaaatggaagtgagcaagggtcctatgatgcagataaaggaatttttaccattcgcctgcccaaagaaacccctggccagcattttgaggggctgaacatgttaactgctcttctggcaccaagaaaatccaggacagcaaaaccacttgtggaagaaataggtgcttctgagattcctgaggaagtagttgacgatgaagagtttgattgggaaattgagcagacaccctgtgaagaggtatcagaaagtgctttgaatccgcagtgccactatggatttggaaacttacgatcaggagtgttgcaacggttacaggatgaactgagtgatgttattgatattaaggatccagatttcacccctgcagctgaacgaagacagaagcgcctggccgctgagctggccaagtttgatcctgatcattatctagctgacttttttgaagatgaggcgattgaacagattttgaagtataatccttggtggactgacaaatattcaaaaatgatggcctttttggaaaagagtcaggaacaagaaaatcatgctacattagtgtctttttctgaagaagagaagtatcagctacgaaaatttgtcaataaatcttatctgctggacaagagagcctgtcgtcaagtgtgctacagtttgattgatatccttctggcatattgctatgaaacccgtgtcactgaaggagagaagaatgttgaatctgcatggaatatcaggaaactgagtccaacactatgctggtttgagacttggactaacgttcatgatatcatggtgtcttttggaagaagggtgttgtgttacccactctatcgccatttcaagctggtgatgaaggcctacagggacactataaagatattgcaactgggtaaaagtgcagttttaaagtgtctcctggatattcacaaaatttttcaggaaaatgacccagcgtacatactgaatgatctctacatctcagactactgtgtgtggattcagaaagtcaaatccaaaaagttggcagctcttgcagaagccttaaaggaagtctcccttacaaaggcccagctggggttagaactggaagaactagaagcagcagcactgcttgtccaggaggaagaaactgcattaaaagcagcccattcagtttctgggcagcagacactttgctccagctctgaggcaagtgattcggaggactcagacagcagcgtgtcatctggaaacgaagactcaggctcagattcagaacaagatgaactcaaagatagtccatctgagacagtcagttctttgcaaggtccctttcttgaagaaagcagtgcctttcttattgttgatggtggagtacgcagaaacacagccatccaggagtctgatgccagtcagggaaagccacttgcctcttcctggcctcttggagtgtctgggcctctgatagaggagcttggggaacaactgaagactacagttcaggtttctgaacccaagggcaccactgctgtaaaccgcagcaatattcaggagagagacggctgtcagacaccaaataattgactcttaggtggttttattcattgttgagaaatatggtagattgggtttcatttaccgaatgagaattcttcattttcactttgtaatttttcttagtatatagtcagcccactgtatttgtgtgttccacatctgtggattcaaccaactgcagatcaaaaatattgaagaaaaaatcgcatctgtaccaaacatgtacagacttttttcttgttattattctctaaataatacagtatgacaactatttccacagcatttacattgtattgggtaatataagtaatctagtgatgatttaaactgtgcaggaggatgtgggtaggttatatgcaaatactgcaccattttttatcaggggcttgagcatctgaggattttagtatcctcaggagtcctggaaccaaccccccacagatacggggacaactttatgacattgtttttcaaccaatgaatgtttataccttttgttttccttgccgcgactgtgaagataaagttcaaaagtatttttaccaaagtgtagctaatatttcaagctgaaaataatagttctactgcccgtgtctccagaatgtagagcccatcaatatttttattttaggaggtgtacttgacacccaataaactgcacgtatcaaaagtgtacaatgtgttggcgtatgtataccctgcgtaaaactatcaccacaactgaagtgaggaacggacccatcattcccaagtgcccttgtgccctgttattagtttgcatgtcctagaattctatgtaaattgaatcatacaatatgtatcccttttttggtcaggcatattttactcagtatagttattttgagattcatccatgtggtagcatgtgtcacgagtttttgtttttatgtttttcattgctgagtactgcttcattgaatagatttgttcattgacctatcgatggacacctgggttgtttccagtttggggctgttataaataaagctgttatgaacatttgtgtac

SEQ ID NO: 181275 - DNA, 2844 bp, Homo sapiens
  Payload ID: 15704
  Gene Symbol: SHQ1
  Gene Name: SHQ1, H/ACA ribonucleoprotein assembly factor
  ENST ID: ENST00000444040
  CDS Start-End: 76-228
agttggagagtttgcgtggcgggaacgcggcggcagtgagagcgagcggcgccggcccttgcgtccggtgcggcgatgctgaccccggcgttcgacctcagccaggatccggacttcctgactatcgccatccgcgtgccctacgcccgggtctccgagttcgacgtctacttcgaggggtctgacttcaagttctacgccaagccatactttctcaggacttcatgagacctgtgttaaatctgcagattaacccttcctggaagaattgtagaaaatggaagtgagcaagggtcctatgatgcagataaaggaatttttaccattcgcctgcccaaagaaacccctggccagcattttgaggggctgaacatgttaactgctcttctggcaccaagaaaatccaggacagcaaaaccacttgtggaagaaataggtgcttctgagattcctgaggaagtagttgacgatgaagagtttgattgggaaattgagcagacaccctgtgaagaggtatcagaaagtgctttgaatccgcagtgccactatggatttggaaacttacgatcaggagtgttgcaacggttacaggatgaactgagtgatgttattgatattaaggatccagatttcacccctgcagctgaacgaagacagaagcgcctggccgctgagctggccaagtttgatcctgatcattatctagctgacttttttgaagatgaggcgattgaacagattttgaagtataatccttggtggactgacaaatattcaaaaatgatggcctttttggaaaagagtcaggaacaagaaaatcatgctacattagtgtctttttctgaagaagagaagtatcagctacgaaaatttgtcaataaatcttatctgctggacaagagagcctgtcgtcaagtgtgctacagtttgattgatatccttctggcatattgctatgaaacccgtgtcactgaaggagagaagaatgttgaatctgcatggaatatcaggaaactgagtccaacactatgctggtttgagacttggactaacgttcatgatatcatggtgtcttttggaagaagggtgttgtgttacccactctatcgccatttcaagctggtgatgaaggcctacagggacactataaagatattgcaactgggtaaaagtgcagttttaaagtgtctcctggatattcacaaaatttttcaggaaaatgacccagcgtacatactgaatgatctctacatctcagactactgtgtgtggattcagaaagtcaaatccaaaaagttggcagctcttgcagaagccttaaaggaagtctcccttacaaaggcccagctggggttagaactggaagaactagaagcagcagcactgcttgtccaggaggaagaaactgcattaaaagcagcccattcagtttctgggcagcagacactttgctccagctctgaggcaagtgattcggaggactcagacagcagcgtgtcatctggaaacgaagactcaggctcagattcagaacaagatgaactcaaagatagtccatctgagacagtcagttctttgcaaggtccctttcttgaagaaagcagtgcctttcttattgttgatggtggagtacgcagaaacacagccatccaggagtctgatgccagtcagggaaagccacttgcctcttcctggcctcttggagtgtctgggcctctgatagaggagcttggggaacaactgaagactacagttcaggtttctgaacccaagggcaccactgctgtaaaccgcagcaatattcaggagagagacggctgtcagacaccaaataattgactcttaggtggttttattcattgttgagaaatatggtagattgggtttcatttaccgaatgagaattcttcattttcactttgtaatttttcttagtatatagtcagcccactgtatttgtgtgttccacatctgtggattcaaccaactgcagatcaaaaatattgaagaaaaaatcgcatctgtaccaaacatgtacagacttttttcttgttattattctctaaataatacagtatgacaactatttccacagcatttacattgtattgggtaatataagtaatctagtgatgatttaaactgtgcaggaggatgtgggtaggttatatgcaaatactgcaccattttttatcaggggcttgagcatctgaggattttagtatcctcaggagtcctggaaccaaccccccacagatacggggacaactttatgacattgtttttcaaccaatgaatgtttataccttttgttttccttgccgcgactgtgaagataaagttcaaaagtatttttaccaaagtgtagctaatatttcaagctgaaaataatagttctactgcccgtgtctccagaatgtagagcccatcaatatttttattttaggaggtgtacttgacacccaataaactgcacgtatcaaaagtgtacaatgtgttggcgtatgtataccctgcgtaaaactatcaccacaactgaagtgaggaacggacccatcattcccaagtgcccttgtgccctgttattagtttgcatgtcctagaattctatgtaaattgaatcatacaatatgtatcccttttttggtcaggcatattttactcagtatagttattttgagattcatccatgtggtagcatgtgtcacgagtttttgtttttatgtttttcattgctgagtactgcttcattgaatagatttgttcattgacctatcgatggacacctgggttgtttccagtttggggctgttataaataaagctgttatgaacatttgtgtac

SEQ ID NO: 181276 - DNA, 2065 bp, Homo sapiens
  Payload ID: 15704
  Gene Symbol: SHQ1
  Gene Name: SHQ1, H/ACA ribonucleoprotein assembly factor
  Uniprot ID: Q6PI26
  ENST ID: ENST00000463369
  CDS Start-End: 91-1740
aagattgcgctatcgcactccagcctgagtaacagagcgagactgtctaaaaaaaaaaaaaaaaagaacatacagtttgctataccaaggatgaataaaacctggtccctctccttgaagaatggagactgtagctgcggaggccccatattaacccttcctggaagaattgtagaaaatggaagtgagcaagggtcctatgatgcagataaaggaatttttaccattcgcctgcccaaagaaacccctggccagcattttgaggggctgaacatgttaactgctcttctggcaccaagaaaatccaggacagcaaaaccacttgtggaagaaataggtgcttctgagattcctgaggaagtagttgacgatgaagagtttgattgggaaattgagcagacaccctgtgaagaggtatcagaaagtgctttgaatccgcagtgccactatggatttggaaacttacgatcaggagtgttgcaacggttacaggatgaactgagtgatgttattgatattaaggatccagatttcacccctgcagctgaacgaagacagaagcgcctggccgctgagctggccaagtttgatcctgatcattatctagctgacttttttgaagatgaggcgattgaacagattttgaagtataatccttggtggactgacaaatattcaaaaatgatggcctttttggaaaagagtcaggaacaagaaaatcatgctacattagtgtctttttctgaagaagagaagtatcagctacgaaaatttgtcaataaatcttatctgctggacaagagagcctgtcgtcaagtgtgctacagtttgattgatatccttctggcatattgctatgaaacccgtgtcactgaaggagagaagaatgttgaatctgcatggaatatcaggaaactgagtccaacactatgctggtttgagacttggactaacgttcatgatatcatggtgtcttttggaagaagggtgttgtgttacccactctatcgccatttcaagctggtgatgaaggcctacagggacactataaagatattgcaactgggtaaaagtgcagttttaaagtgtctcctggatattcacaaaatttttcaggaaaatgacccagcgtacatactgaatgatctctacatctcagactactgtgtgtggattcagaaagtcaaatccaaaaagttggcagctcttgcagaagccttaaaggaagtctcccttacaaaggcccagctggggttagaactggaagaactagaagcagcagcactgcttgtccaggaggaagaaactgcattaaaagcagcccattcagtttctgggcagcagacactttgctccagctctgaggcaagtgattcggaggactcagacagcagcgtgtcatctggaaacgaagactcaggctcagattcagaacaagatgaactcaaagatagtccatctgagacagtcagttctttgcaaggtccctttcttgaagaaagcagtgcctttcttattgttgatggtggagtacgcagaaacacagccatccaggagtctgatgccagtcagggaaagccacttgcctcttcctggcctcttggagtgtctgggcctctgatagaggagcttggggaacaactgaagactacagttcaggtttctgaacccaagggcaccactgctgtaaaccgcagcaatattcaggagagagacggctgtcagacaccaaataattgactcttaggtggttttattcattgttgagaaatatggtagattgggtttcatttaccgaatgagaattcttcattttcactttgtaatttttcttagtatatagtcagcccactgtatttgtgtgttccacatctgtggattcaaccaactgcagatcaaaaatattgaagaaaaaatcgcatctgtaccaaacatgtacagacttttttcttgttattattctctaaataatacagtatgacaactatttccacagcatttacattgtattgggtaatataagtaatctagtgatgatttaaactgtgcaggaggatgtgggtag

SEQ ID NO: 181277 - DNA, 553 bp, Homo sapiens
  Payload ID: 15704
  Gene Symbol: SHQ1
  Gene Name: SHQ1, H/ACA ribonucleoprotein assembly factor
  ENST ID: ENST00000471526
  CDS Start-End: 133-324
acttccgcctcgagccggaagctccgtccctcacaccgagagttcctgcgcgtggggagttggagagtttgcgtggcgggaacgcggcggcagtgagagcgagcggcgccggcccttgcgtccggtgcggcgatgctgaccccggcgttcgacctcagccaggatccggacttcctgactatcgccatccgcgtgccctacgcccgggtctccgagttcgacgtctacttcgaggggtctgacttcaagttctacgccaagccatactttctcaggaatttttaccattcgcctgcccaaagaaacccctggccagcattttgaggggctgaacatgttaactgctcttctggcaccaagaaaatccaggacagcaaaaccacttgtggaagaaataggtgcttctgagattcctgaggaagtagttgacgatgaagagtttgattgggaaattgagcagacaccctgtgaagaggtatcagaaagtgctttgaatccgcagtgccactatggatttggaaacttacgatcaggagtgttgcaacggttacag

SEQ ID NO: 181278 - DNA, 502 bp, Homo sapiens
  Payload ID: 15704
  Gene Symbol: SHQ1
  Gene Name: SHQ1, H/ACA ribonucleoprotein assembly factor
  ENST ID: ENST00000482785
  CDS Start-End: 171-502
agggccaactcagattcattctgggagggtactacacaaggtgcggattaacccttcctggaagaattgtagaaaatggaagtgagcaagggtcctatgatgcagataaaggaatttttaccattcgcctgcccaaagaaacccctggccagcattttgaggggctgaacatgttaactgctcttctggcaccaagaaaatccaggacagcaaaaccacttgtggaagaaataggtgcttctgagattcctgaggaagtagttgacgatgaagagtttgattgggaaattgagcagacaccctgtgaagaggtatcagaaagtgctttgaatccgcagtgccactatggatttggaaacttacgatcaggagtgttgcaacggttacaggatgaactgagtgatgttattgatattaaggatccagatttcacccctgcagctgaacgaagacagaagcgcctggccgctgagctggccaagtttgatcctgatcattatct

SEQ ID NO: 181279 - DNA, 3190 bp, Homo sapiens
  Payload ID: 15705
  Gene Symbol: SHROOM1
  Gene Name: shroom family member 1
  Uniprot ID: Q2M3G4
  ENST ID: ENST00000319854
  CDS Start-End: 171-2714
agcgcttgtgacggtgtgaccagggaggggaagtgtaagtgtctggccgtccgtggtggcggggccagcaggctgtcccagccctcacccggagctcctcacccggcaccacatctgtgttttcccaggacccacgcagccacccagcctcagcactcatctgcgcagccatggaggccctgggacctgggggcgaccgcgcctccccggcctcgtccactagcagcctggacctgtggcatctgtccatgcgcgcggactcggcctacagctctttctccgcagcctccggcggccccgagccgcgcacgcagtcgccggggacagacctccttccttacctagactgggactacgtgcgtgtggtttggggcggcccgggccccgccccgcccgacgctgccctttgcacatccccgcggccccggcccgcggttgcagcccgcagtgggccgcagccaacagaggtcccggggaccccgggaccactgaacaggcaggccaccccgctgctgtacgcgctggcggccgaggcggaggccgcggcgcaggctgccgagccgcccagcccgccggcctcgagggccgcctaccgccagcggcttcagggcgcgcagcggcgagtgctccgggagacgtcgttccagcgcaaggagctccgcatgagcctgcccgcccgtctgcggcccactgtcccagcgcggcccccggcgactcacccgcgctccgcctcgctcagccacccgggcggggagggggagccggcgcgctcccgggctcccgcgccaggaactgccggccggggtcccctcgccaaccagcagcggaagtggtgcttctcagagccaggaaagctggatcgtgtgggtcggggcggtgggccggcgcgggaatgcctgggtgaggcctgctccagctctggcctccctgggcccgagcccttggagttccagcatccggcgctggctaagtttgaagatcacgaggtcggatggctgcccgagacgcaaccccaaggctccatgaacctggactccgggtccttgaagctcggtgatgccttcaggcccgccagtcggagtcggagcgcttcaggcgaagtcttgggttcctggggaggatcaggagggaccatacccattgtccaggctgttccccaaggagcagaaacccccagaccattgtttcagaccaaactttccaggttcttgcctcagaaagaggctgcggtgatgtatcctgcagagttaccccagagcagccctgctgacagtgaacagagggtctcagagacctgcattgtgcctgcctggctcccctcccttcctgatgaagtgttcctagaagaggccccactggtcagaatgagatcaccaccagacccccatgcctcccaggggcccccagccagtgtccatgcctctgaccagccgtatggaactggcttaggccaaagaactggccaggttacagtccccacagagtacccgctccatgagtgtccaggaactgcaggggcagatgactgctggcagggggtgaatggttctgtaggtatttccaggcccacaagccacacccccactgggactgcaaatgataacatcccaactattgaccccactggactgaccaccaatccccccacagctgcagagagtgacctcctcaaacctgtcccagctgatgccttgggactttcaggcaatgatactccaggtccctctcacaatactgccctagccaggggcactggccagcctggttccaggcccacatggcctagtcagtgcctcgaggagctggttcaggagctggccagattagatccctctctatgtgaccctcttgcttcccagcccagcccagagccacccctgggcctgctggatggactgattcctttagcagaggtccgggctgcaatgcggcctgcctgtggggaggctggagaggaggctgccagtacttttgagccagggtcctatcagttcagcttcacccagctcctgccggctcctcgggaggagacaaggcttgaaaaccctgccacccaccctgtgcttgaccagccatgtgggcaggggctccctgcaccaaacaacagcatccagggcaagaaagtggagctggccgcccgcctccaaaagatgcttcaggaccttcacacggagcaggagcggctgcagggggaggcacaagcgtgggccaggcgccaagcggctctggaggctgcagtgcgccaggcctgtgcccctcaggagctggagcggttcagccggttcatggccgacctagagcgcgtgcttggccttctgctgctgctgggcagtcgcctggcgcgcgtgcgccgcgccctggcccgggcggcctcagacagcgaccctgatgagcagcgactccggctcctgcagcggcaggaggaggacgccaaggagctgaaggagcacgtagcgcggcgcgagcgggccgtgcgggaggtgctggtgcgagcactaccggtggaggagctgcgcgtctattgcgccctgctggcgggcaaggccgccgtcctggcccagcagcgcaacctggacgagcgcatccgcctccttcaggaccaactggacgccatcagggacgaccttggccatcatgccccgtctcccagcccggcgcggcccccagggacctgtcctccagttcagccgcccttccctcttctccttacatagttataggtggagagggtggggtgcaccgcccctatctctcacccacgtaagtggggtgatgctgatttagtctctgcttttcccttgagggattggggaggacccagtccaggcctttctaagatactcctccagccgggcgcggtggctcacgcctgtaatcccagcactttgggaggccgaggcgggcggatcacaaggtcaggagatcgagaccatcctggctaacacggtgaaaccccgtctctactaaaaatataaaaaattagccgggcgtggtggcgggtgcctgtattgccagctactcggaaggctgaggcaggagaatggcgtgaacctgggaggtggagcttgcagtgagcggacatcgcgccactgcactccagcctgggcgacagagcaagactccgtctcaaaaaaaaaaaaaaaaaaaaaaaaaaaaaagatacttctccaaagtgttctcatgtggcctc

SEQ ID NO: 181280 - DNA, 2352 bp, Homo sapiens
  Payload ID: 15705
  Gene Symbol: SHROOM1
  Gene Name: shroom family member 1
  ENST ID: ENST00000378676
  CDS Start-End: 1-2352
atggaggccctgggacctgggggcgaccgcgcctccccggcctcgtccactagcagcctggacctgtggcatctgtccatgcgcgcggactcggcctacagctctttctccgcagcctccggcggccccgagccgcgcacgcagtcgccggggacagacctccttccttacctagactgggactacgtgcgtgtggtttggggcggcccgggccccgccccgcccgacgctgccctttgcacatccccgcggccccggcccgcggttgcagcccgcagtgggccgcagccaacagaggtcccggggaccccgggaccactgaacaggcaggccaccccgctgctgtacgcgctggcggccgaggcggaggccgcggcgcaggctgccgagccgcccagcccgccggcctcgagggccgcctaccgccagcggcttcagggcgcgcagcggcgagtgctccgggagacgtcgttccagcgcaaggagctccgcatgagcctgcccgcccgtctgcggcccactgtcccagcgcggcccccggcgactcacccgcgctccgcctcgctcagccacccgggcggggagggggagccggcgcgctcccgggctcccgcgccaggaactgccggccggggtcccctcgccaaccagcagcggaagtggtgcttctcagagccaggaaagctggatcgtgtgggtcggggcggtgggccggcgcgggaatgcctgggtgaggcctgctccagctctggcctccctgggcccgagcccttggagttccagcatccggcgctggctaagtttgaagatcacgaggtcggatggctgcccgagacgcaaccccaaggctccatgaacctggactccgggtccttgaagctcggtgatgccttcaggcccgccagtcggagtcggagcgcttcaggcgaagtcttgggttcctggggaggatcaggagggaccatacccattgtccaggctgttccccaaggagcagaaacccccagaccattgtttcagaccaaactttccagtgtccatgcctctgaccagccgtatggaactggcttaggccaaagaactggccaggttacagtccccacagagtacccgctccatgagtgtccaggaactgcaggggcagatgactgctggcagggggtgaatggttctgtaggtatttccaggcccacaagccacacccccactgggactgcaaatgataacatcccaactattgaccccactggactgaccaccaatccccccacagctgcagagagtgacctcctcaaacctgtcccagctgatgccttgggactttcaggcaatgatactccaggtccctctcacaatactgccctagccaggggcactggccagcctggttccaggcccacatggcctagtcagtgcctcgaggagctggttcaggagctggccagattagatccctctctatgtgaccctcttgcttcccagcccagcccagagccacccctgggcctgctggatggactgattcctttagcagaggtccgggctgcaatgcggcctgcctgtggggaggctggagaggaggctgccagtacttttgagccagggtcctatcagttcagcttcacccagctcctgccggctcctcgggaggagacaaggcttgaaaaccctgccacccaccctgtgcttgaccagccatgtgggcaggggctccctgcaccaaacaacagcatccagggcaagaaagtggagctggccgcccgcctccaaaagatgcttcaggaccttcacacggagcaggagcggctgcagggggaggcacaagcgtgggccaggcgccaagcggctctggaggctgcagtgcgccaggcctgtgcccctcaggagctggagcggttcagccggttcatggccgacctagagcgcgtgcttggccttctgctgctgctgggcagtcgcctggcgcgcgtgcgccgcgccctggcccgggcggcctcagacagcgaccctgatgagcaggcctccctgctgcagcgactccggctcctgcagcggcaggaggaggacgccaaggagctgaaggagcacgtagcgcggcgcgagcgggccgtgcgggaggtgctggtgcgagcactaccggtggaggagctgcgcgtctattgcgccctgctggcgggcaaggccgccgtcctggcccagcagcgcaacctggacgagcgcatccgcctccttcaggaccaactggacgccatcagggacgaccttggccatcatgccccgtctcccagcccggcgcggcccccagggacctgtcctccagttcagccgcccttccctcttctccttacatag

SEQ ID NO: 181281 - DNA, 4019 bp, Homo sapiens
  Payload ID: 15705
  Gene Symbol: SHROOM1
  Gene Name: shroom family member 1
  Uniprot ID: Q2M3G4
  ENST ID: ENST00000378679
  CDS Start-End: 806-3364
cggacgcgctggaggccggtgggcggtcgccgtagtcgccctcccaccacctcgctcaggtttctccggcctggggcaagaggcctgtggcccgcgcgggaacgcactgtccaccctcagacctgggactgggccggcgcgcggacgctaccaagaggctgcggctcccgcccccgcggccggacgtggcgcctcccctgaggccgcggccggagcctggaggtggggtcggagtcagagcccggggctctgatgtcaccgcgcggctgcgacggcccaggagcgcgtctcggcgggagcctcagagcctcactttgtcgccaggctggagtgcagtggcgcgatctcggctcactacaacttccgcctcccgggttcaagcgattcttctgcctcagcctcccgagtagctgggactacaggcgtgtgccaccacgcccagctaatttttgggaaagatcacatggagaagccaacagaacggccaggaagcagcctgggtggaacagggttggggaggaaaggaacatgggtacattctcagcgttccaggaggtctcagggtaaaggctgcttgtgtgggcaaggggagcctggcagggaatgagctggtcccaattccttcccctgagctgggccctcaaccttcagaggtgctccctgggactggtcctacttcctctgccacctctgatcccaaggtgactctgccaaaatctgggggatgccagcgcttgtgacggtgtgaccagggaggggaagtgacccacgcagccacccagcctcagcactcatctgcgcagccatggaggccctgggacctgggggcgaccgcgcctccccggcctcgtccactagcagcctggacctgtggcatctgtccatgcgcgcggactcggcctacagctctttctccgcagcctccggcggccccgagccgcgcacgcagtcgccggggacagacctccttccttacctagactgggactacgtgcgtgtggtttggggcggcccgggccccgccccgcccgacgctgccctttgcacatccccgcggccccggcccgcggttgcagcccgcagtgggccgcagccaacagaggtcccggggaccccgggaccactgaacaggcaggccaccccgctgctgtacgcgctggcggccgaggcggaggccgcggcgcaggctgccgagccgcccagcccgccggcctcgagggccgcctaccgccagcggcttcagggcgcgcagcggcgagtgctccgggagacgtcgttccagcgcaaggagctccgcatgagcctgcccgcccgtctgcggcccactgtcccagcgcggcccccggcgactcacccgcgctccgcctcgctcagccacccgggcggggagggggagccggcgcgctcccgggctcccgcgccaggaactgccggccggggtcccctcgccaaccagcagcggaagtggtgcttctcagagccaggaaagctggatcgtgtgggtcggggcggtgggccggcgcgggaatgcctgggtgaggcctgctccagctctggcctccctgggcccgagcccttggagttccagcatccggcgctggctaagtttgaagatcacgaggtcggatggctgcccgagacgcaaccccaaggctccatgaacctggactccgggtccttgaagctcggtgatgccttcaggcccgccagtcggagtcggagcgcttcaggcgaagtcttgggttcctggggaggatcaggagggaccatacccattgtccaggctgttccccaaggagcagaaacccccagaccattgtttcagaccaaactttccaggttcttgcctcagaaagaggctgcggtgatgtatcctgcagagttaccccagagcagccctgctgacagtgaacagagggtctcagagacctgcattgtgcctgcctggctcccctcccttcctgatgaagtgttcctagaagaggccccactggtcagaatgagatcaccaccagacccccatgcctcccaggggcccccagccagtgtccatgcctctgaccagccgtatggaactggcttaggccaaagaactggccaggttacagtccccacagagtacccgctccatgagtgtccaggaactgcaggggcagatgactgctggcagggggtgaatggttctgtaggtatttccaggcccacaagccacacccccactgggactgcaaatgataacatcccaactattgaccccactggactgaccaccaatccccccacagctgcagagagtgacctcctcaaacctgtcccagctgatgccttgggactttcaggcaatgatactccaggtccctctcacaatactgccctagccaggggcactggccagcctggttccaggcccacatggcctagtcagtgcctcgaggagctggttcaggagctggccagattagatccctctctatgtgaccctcttgcttcccagcccagcccagagccacccctgggcctgctggatggactgattcctttagcagaggtccgggctgcaatgcggcctgcctgtggggaggctggagaggaggctgccagtacttttgagccagggtcctatcagttcagcttcacccagctcctgccggctcctcgggaggagacaaggcttgaaaaccctgccacccaccctgtgcttgaccagccatgtgggcaggggctccctgcaccaaacaacagcatccagggcaagaaagtggagctggccgcccgcctccaaaagatgcttcaggaccttcacacggagcaggagcggctgcagggggaggcacaagcgtgggccaggcgccaagcggctctggaggctgcagtgcgccaggcctgtgcccctcaggagctggagcggttcagccggttcatggccgacctagagcgcgtgcttggccttctgctgctgctgggcagtcgcctggcgcgcgtgcgccgcgccctggcccgggcggcctcagacagcgaccctgatgagcaggcctccctgctgcagcgactccggctcctgcagcggcaggaggaggacgccaaggagctgaaggagcacgtagcgcggcgcgagcgggccgtgcgggaggtgctggtgcgagcactaccggtggaggagctgcgcgtctattgcgccctgctggcgggcaaggccgccgtcctggcccagcagcgcaacctggacgagcgcatccgcctccttcaggaccaactggacgccatcagggacgaccttggccatcatgccccgtctcccagcccggcgcggcccccagggacctgtcctccagttcagccgcccttccctcttctccttacatagttataggtggagagggtggggtgcaccgcccctatctctcacccacgtaagtggggtgatgctgatttagtctctgcttttcccttgagggattggggaggacccagtccaggcctttctaagatactcctccagccgggcgcggtggctcacgcctgtaatcccagcactttgggaggccgaggcgggcggatcacaaggtcaggagatcgagaccatcctggctaacacggtgaaaccccgtctctactaaaaatataaaaaattagccgggcgtggtggcgggtgcctgtattgccagctactcggaaggctgaggcaggagaatggcgtgaacctgggaggtggagcttgcagtgagcggacatcgcgccactgcactccagcctgggcgacagagcaagactccgtctcaaaaaaaaaaaaaaaaaaaaaaaaaaaaaagatacttctccaaagtgttctcatgtggcctcacccaggtcttgtgtattatttggtaattaatttatggatcttaaaaactgcagtattcccccattttgtgatgagagtgtggggctggcaggggttggttggagggaggagagaagacagaggagcacttaaggtgcaaagcagcctattttttcttcaataaaaattgttaagagaa

SEQ ID NO: 181282 - DNA, 1080 bp, Homo sapiens
  Payload ID: 15705
  Gene Symbol: SHROOM1
  Gene Name: shroom family member 1
  ENST ID: ENST00000440118
  CDS Start-End: 109-1080
gcccggggctctgatgtcaccgcgcggctgcgacggcccaggagcgcgtctcggcgggagcctcaggacccacgcagccacccagcctcagcactcatctgcgcagccatggaggccctgggacctgggggcgaccgcgcctccccggcctcgtccactagcagcctggacctgtggcatctgtccatgcgcgcggactcggcctacagctctttctccgcagcctccggcggccccgagccgcgcacgcagtcgccggggacagacctccttccttacctagactgggactacgtgcgtgtggtttggggcggcccgggccccgccccgcccgacgctgccctttgcacatccccgcggccccggcccgcggttgcagcccgcagtgggccgcagccaacagaggtcccggggaccccgggaccactgaacaggcaggccaccccgctgctgtacgcgctggcggccgaggcggaggccgcggcgcaggctgccgagccgcccagcccgccggcctcgagggccgcctaccgccagcggcttcagggcgcgcagcggcgagtgctccgggagacgtcgttccagcgcaaggagctccgcatgagcctgcccgcccgtctgcggcccactgtcccagcgcggcccccggcgactcacccgcgctccgcctcgctcagccacccgggcggggagggggagccggcgcgctcccgggctcccgcgccaggaactgccggccggggtcccctcgccaaccagcagcggaagtggtgcttctcagagccaggaaagctggatcgtgtgggtcggggcggtgggccggcgcgggaatgcctgggtgaggcctgctccagctctggcctccctgggcccgagcccttggagttccagcatccggcgctggctaagtttgaagatcacgaggtcggatggctgcccgagacgcaaccccaaggctccatgaacctggactccgggtccttgaagctcggtgatgccttcaggcccgccagtcggagtcggagcgcttcaggcgaagtcttgggttcctggggaggatcaggagggaccatacccatt

SEQ ID NO: 181283 - DNA, 3638 bp, Homo sapiens
  Payload ID: 15705
  Gene Symbol: SHROOM1
  Gene Name: shroom family member 1
  Uniprot ID: Q2M3G4
  ENST ID: ENST00000617339
  CDS Start-End: 445-3003
ctgcctctgccccttgccctgggtcttcccccacccctcctttcttagctcccctgaggtcacaagagtgttcttgaccattgtttatcagggaaagatcacatggagaagccaacagaacggccaggaagcagcctgggtggaacagggttggggaggaaaggaacatgggtacattctcagcgttccaggaggtctcagggtaaaggctgcttgtgtgggcaaggggagcctggcagggaatgagctggtcccaattccttcccctgagctgggccctcaaccttcagaggtgctccctgggactggtcctacttcctctgccacctctgatcccaaggtgactctgccaaaatctgggggatgccagcgcttgtgacggtgtgaccagggaggggaagtgacccacgcagccacccagcctcagcactcatctgcgcagccatggaggccctgggacctgggggcgaccgcgcctccccggcctcgtccactagcagcctggacctgtggcatctgtccatgcgcgcggactcggcctacagctctttctccgcagcctccggcggccccgagccgcgcacgcagtcgccggggacagacctccttccttacctagactgggactacgtgcgtgtggtttggggcggcccgggccccgccccgcccgacgctgccctttgcacatccccgcggccccggcccgcggttgcagcccgcagtgggccgcagccaacagaggtcccggggaccccgggaccactgaacaggcaggccaccccgctgctgtacgcgctggcggccgaggcggaggccgcggcgcaggctgccgagccgcccagcccgccggcctcgagggccgcctaccgccagcggcttcagggcgcgcagcggcgagtgctccgggagacgtcgttccagcgcaaggagctccgcatgagcctgcccgcccgtctgcggcccactgtcccagcgcggcccccggcgactcacccgcgctccgcctcgctcagccacccgggcggggagggggagccggcgcgctcccgggctcccgcgccaggaactgccggccggggtcccctcgccaaccagcagcggaagtggtgcttctcagagccaggaaagctggatcgtgtgggtcggggcggtgggccggcgcgggaatgcctgggtgaggcctgctccagctctggcctccctgggcccgagcccttggagttccagcatccggcgctggctaagtttgaagatcacgaggtcggatggctgcccgagacgcaaccccaaggctccatgaacctggactccgggtccttgaagctcggtgatgccttcaggcccgccagtcggagtcggagcgcttcaggcgaagtcttgggttcctggggaggatcaggagggaccatacccattgtccaggctgttccccaaggagcagaaacccccagaccattgtttcagaccaaactttccaggttcttgcctcagaaagaggctgcggtgatgtatcctgcagagttaccccagagcagccctgctgacagtgaacagagggtctcagagacctgcattgtgcctgcctggctcccctcccttcctgatgaagtgttcctagaagaggccccactggtcagaatgagatcaccaccagacccccatgcctcccaggggcccccagccagtgtccatgcctctgaccagccgtatggaactggcttaggccaaagaactggccaggttacagtccccacagagtacccgctccatgagtgtccaggaactgcaggggcagatgactgctggcagggggtgaatggttctgtaggtatttccaggcccacaagccacacccccactgggactgcaaatgataacatcccaactattgaccccactggactgaccaccaatccccccacagctgcagagagtgacctcctcaaacctgtcccagctgatgccttgggactttcaggcaatgatactccaggtccctctcacaatactgccctagccaggggcactggccagcctggttccaggcccacatggcctagtcagtgcctcgaggagctggttcaggagctggccagattagatccctctctatgtgaccctcttgcttcccagcccagcccagagccacccctgggcctgctggatggactgattcctttagcagaggtccgggctgcaatgcggcctgcctgtggggaggctggagaggaggctgccagtacttttgagccagggtcctatcagttcagcttcacccagctcctgccggctcctcgggaggagacaaggcttgaaaaccctgccacccaccctgtgcttgaccagccatgtgggcaggggctccctgcaccaaacaacagcatccagggcaagaaagtggagctggccgcccgcctccaaaagatgcttcaggaccttcacacggagcaggagcggctgcagggggaggcacaagcgtgggccaggcgccaagcggctctggaggctgcagtgcgccaggcctgtgcccctcaggagctggagcggttcagccggttcatggccgacctagagcgcgtgcttggccttctgctgctgctgggcagtcgcctggcgcgcgtgcgccgcgccctggcccgggcggcctcagacagcgaccctgatgagcaggcctccctgctgcagcgactccggctcctgcagcggcaggaggaggacgccaaggagctgaaggagcacgtagcgcggcgcgagcgggccgtgcgggaggtgctggtgcgagcactaccggtggaggagctgcgcgtctattgcgccctgctggcgggcaaggccgccgtcctggcccagcagcgcaacctggacgagcgcatccgcctccttcaggaccaactggacgccatcagggacgaccttggccatcatgccccgtctcccagcccggcgcggcccccagggacctgtcctccagttcagccgcccttccctcttctccttacatagttataggtggagagggtggggtgcaccgcccctatctctcacccacgtaagtggggtgatgctgatttagtctctgcttttcccttgagggattggggaggacccagtccaggcctttctaagatactcctccagccgggcgcggtggctcacgcctgtaatcccagcactttgggaggccgaggcgggcggatcacaaggtcaggagatcgagaccatcctggctaacacggtgaaaccccgtctctactaaaaatataaaaaattagccgggcgtggtggcgggtgcctgtattgccagctactcggaaggctgaggcaggagaatggcgtgaacctgggaggtggagcttgcagtgagcggacatcgcgccactgcactccagcctgggcgacagagcaagactccgtctcaaaaaaaaaaaaaaaaaaaaaaaaaaaaaagatacttctccaaagtgttctcatgtggcctcacccaggtcttgtgtattatttggtaattaatttatggatcttaaaaactgcagtattcccccattttgtgatgagagtgtggggctggcaggggttggttggagggaggagagaagacagaggagcacttaaggtgcaaagcagcctattttttcttc

SEQ ID NO: 181284 - DNA, 7447 bp, Homo sapiens
  Payload ID: 15706
  Gene Symbol: SHROOM2
  Gene Name: shroom family member 2
  Uniprot ID: Q13796
  ENST ID: ENST00000380913
  CDS Start-End: 91-4941
tctgcggcgctcggagcctcccttgcgatcccacggccgggactgcccggagtgcatgggcgcgggccagggacgctgagcggtcgcgccatggagggcgccgagccccgcgcgcggcccgagcgcctggccgaggccgagacgcgggcggcggacggcgggcgcctggtggaggtgcagctgagcggcggcgccccgtggggcttcaccctgaagggcggccgcgagcacggcgagccgctggtcatcaccaagattgaagagggcagtaaagccgcggcggtcgacaagttactggctggagatgagatcgtcggcatcaatgacattggtctctcagggtttagacaggaagcgatttgcctggtgaaggggtcccataagaccctgaagctggtcgtcaaaaggaggagcgagctgggctggaggcctcactcctggcatgccaccaagttctctgacagccaccccgagctagcggcctccccattcacctccaccagcggctgtccttcctggtccggccgacaccacgcgagttcttcctcccacgacctgtccagttcctgggagcagacgaacctacagcgcaccttagatcacttcagctccttggggagcgttgacagcctggaccacccctccagtcgcctctcggtggccaagtccaacagcagcatcgaccacctgggcagccacagcaagcgcgactcggcctacggctccttctccaccagctctagcactcctgaccacaccttgtccaaagccgacacgtcctccgcagagaacatcctctacactgtgggcctctgggaggctcccaggcagggtggccggcaggcccaggccgcaggcgaccctcagggctcggaggagaagctcagttgtttcccgcccagggtccccggtgacagcggcaaaggccccaggccagagtacaatgccgagcccaagctggctgcccctgggaggtccaattttgggccagtctggtatgttcccgataagaagaaagcaccatcatccccacctcctccccctccccctctccgcagtgacagctttgctgccaccaagagccacgagaaggcccagggccctgtgttctcagaggcggctgcggcacagcactttacggccctggcccaggctcagcctcgtggtgaccggagaccagagctcaccgatcggccttggaggtcagcacacccggggagcctcgggaagggatcgggaggcccgggctgcccacaggaggcccacgcagacggcagctggccgccctccaaggatggagcttccagtaggctgcaggcctctctgtccagctcagatgtgcgcttccctcagtctcctcatagcggccgacaccctcccctatacagcgaccacagccccctctgtgctgacagccttgggcaggagccaggggctgccagcttccagaacgacagccctcctcaggtgagggggctcagcagctgtgaccagaagctggggagcggctggcagggtccccggccctgtgtgcagggagacctgcaagcagcacagctctgggcgggatgctggccttctgacacagcccttggagccctcgagagtcttcccccacccacggtgggccagagcccacgccatcacctacctcagcctgagggtcctccggatgcccgcgagacaggacggtgttacccgctggacaaaggggccgagggctgctccgcgggagcccaggagcctcccagggccagccgtgcagaaaaagccagccagaggctggcagccagcatcacgtgggcagatggggagagcagcaggatctgcccgcaggagacgcccctgttgcactccctgacccaggaggggaagcgccggcctgagagcagtccagaggacagcgccaccagaccgccaccgttcgacgcccacgtgggcaagcccacccgaagaagcgaccgctttgccaccaccctgcggaatgagatccagatgcatagagccaagctgcagaagagccggagcacagtggctctgactgcagcaggggaggcggaggatggcaccggccgctggagggccgggttgggaggtggcacccaggaaggacccctcgctggcacctataaagaccacctgaaagaggcccaagcccgggtcctgagggccacgtccttcaagcgccgcgacttggaccccaacccaggagacctatacccggagtcactggaacaccggatgggggatccagacactgtcccccacttctgggaggcaggcctggcccagccaccctcatctacaagtggcgggccccacccgccccgcatcggaggccggagacggttcacagctgagcagaaattgaagtcctactcggaacctgagaagatgaacgaggtgggcctcacgaggggctacagtcctcaccagcaccccaggacatctgaggatactgtgggcacgtttgctgacaggtggaagttttttgaggaaacgagcaaacctgttccccagaggcctgcccagaagcaagctcttcacggaatcccgagagacaagccagagaggccgcggacagcgggccgcacatgtgagggcacggagccctggtcgcgcaccacctcccttggggacagcctcaacgctcacagcgcagcggagaaggcagggacttcagacctgccgcggaggctcggcacctttgcagagtatcaggcctcttggaaggaacagaggaaacctctggaggccaggagctctgggcgctgccactcagcggatgacatcctggatgtgagcctggacccacaggagaggccgcagcacgttcatgggaggtcccggtcttcaccgtccacagaccactacaagcaggaagcttctgtcgaactgcgaaggcaggcaggggaccccggcgagcccagagaagagcttccctccgcagtccgggccgaggagggacagtccacgccgagacaagcagatgcccagtgtcgggaaggcagcccaggatcacagcagcacccaccgagtcagaaggcaccgaacccacccacattctctgaactatctcactgccggggagccccagagctgccccgggagggccggggccgagcgggaaccctacctcgagattatagatactcggaggagagcaccccagcagacttgggaccccgagcccagagccctggctcacccctgcatgctcgaggacaagactcgtggccagtgagctcagccctgctctccaagaggccagccccacagaggccaccgccacccaagcgcgagcccaggagatacagggccacagacggcgcacctgctgacgcccccgtgggcgtcctcggcaggcccttcccaacgccatcccctgcgtccctggatgtgtatgtggcccgcctgtccctctcccacagcccctctgtgttcagcagtgcccagccccaggacaccccgaaggccactgtctgtgagcgtggaagccagcatgtgagcggggacgcatcacgtcctctgccagaagcactgctccctcccaagcagcagcacctgcgcctgcagacggccaccatggagacctcgcgctccccctcgccccagttcgccccccagaaactgacggacaaacctcccctgctcatccaggatgaggattcaaccagaattgagcgggtgatggacaacaacaccacggtgaagatggtgcccatcaagatcgtgcactcggagagccagccagagaaggagagccgccagagcctggcatgccccgccgagccacctgccctgccccacgggctggagaaagaccagatcaagacgctgagcacatctgagcagttctactcgcgcttctgtctgtacacgcggcagggtgctgagcccgaggccccacatagggcccagccggctgagccccagcccctgggcacccaggtgccccccgagaaagaccgctgcacctcccctccagggctcagctacatgaaggccaaagagaagactgtggaagacctgaagtcggaggagctggccagggagatcgtggggaaggataagtccctggccgacatcctggatcccagtgtgaagatcaaaaccactatggacttgatggaaggcatcttccccaaagacgagcacctcctggaagaagcccagcaacggaggaagctgctccccaaaatcccctctcctagaagcacagaggagaggaaagaggagcccagcgtgcctgcggccgtgtccctggccaccaattctacctactacagcacgtcggcccccaaggcggagctgctgatcaagatgaaggacctgcaggagcagcaggagcacgaagaggattcgggaagcgacttggaccacgacctgtcggtgaagaagcaggagctcatcgagagcatcagccgcaagctgcaggtgctccgggaggcccgcgagagcctgctggaggacgtgcaggccaacaccgtgctgggggccgaggtggaggccatcgtgaaaggcgtctgcaagcccagcgagtttgacaagttccggatgttcattggagacctggacaaagtggtgaacctcctgctgtcgctgtcaggccgcctggcccgggtggagaatgccctcaataatttggacgacggcgcttctcccggtgatcggcaatcactgcttgagaagcagagagtcctgatccagcagcacgaggacgccaaggagctcaaggagaacctggaccgccgcgagcgcatcgtctttgacattttggccaactatctgagcgaggagagcctcgcggactatgagcacttcgtgaagatgaagtcggccctcatcatcgagcagcgggagctggaagataaaatccaccttggtgaagagcagctgaagtgcttattggacagccttcagcccgaaaggggcaaataagagaccagtccccggtggaggaggggcacggggcctccgagctccagctccgttcccaaggatactcgtgaagaccccatctgtgttcatggcctggaaagagacttctcccatagcaaagaggctgttataaaagcaataacttttgtgtttgtgtgggatgatttatttaattttttagtttcccctttgattgctgagagccattttcctttacacataactacacctgacaccaggctctgctggatgtgagtttccactgcatgggctgtgggctgggcctgtggtgcctgccgagtggtcactgtcagtgggaaacccgttgttcctcccgtcttcagatgctgagccaactgcttggacagcagccagcgcgtcatgacgtgcatgagagggggaccctggtgctcatcttctcttgtcattcatccaggcatgggctgccaggttttgtccctgctcgttcaacagtgtgagcatttgtctctgttatctaatgatgttctctgacccagcagaaatcatcatcatgatgatgataatttattaactttttggaagggtgaatagtttcctaatggttaaaaaccaactgtgaaaggaaccacctgtgtggttgggttcactcattctcagattaaattgccacttaaagaaataacgtgcatgctttaaaaaacacagtcacgcaccaagcaggcaaatagctttagtccttctcacctcacatcacagttgttctgcaaagtaaaattttttggttaagagcgtgtccagtagtaatgtgcttgttagctgtttctcaagaccaacagaagattttttcagttactttccccccatgtattttgtatgcatatgattgtccgtgataattggctacttttccattgtttcctccttaaatcgtttagcatggcatgagggccacattccatggacgggaagaccccttcctcttcagaggtcccgtggactacacagctcctgagcttgatctttttctgccatgaagtttaaagattctatgcccatttccttgattgaaatggcaggattctaaagagagcctggtttgttaaaagaaaacactgtcatgctgtcagttcccaattgacaagtcacagactgggagaaaatatttgcaaatcgtgtatctgacaaaaggtttgtgtccaggatgtacaaagaactctcaaaccggatagtaagaaaacaaacagcccaagtgaaaagcaggcaaaagacttgaatagacacttcaccaaagagcatacacgcgtggcaaacaagcacacgaaaagacgttcagccgccgatggcttggttataatttataacttacttatttttatctaataattgtagattcagtgtatttcttcaaaaaatgtttaattaaatgcatgttaatggtgagtgaatcccttgggtgacttcgtgtttaggtcgtattagggcatttgttggatcaacggatcattttaaccctgacttccccttattcccataaaagaagttttccagtggaatggagatttcattttgtcagcagcagtgaccacagccttaccaaagcagacgcgtgcgcgtgcacagatgcacacacacagatgtcttaaaagactagaatccacacttcctgagccagaggggccgtgttgacggtaatgcattctctatagagccaagtccaaactggcaagctcaatgatgcaggcaataaaccgcctttttggcagcctaccaatgccaaaaggataaatgtctttccaaaagtgtgtattcctgttaaattaagctcttgctaacttgaaaaatccctgttctgccagcgaagcttcctcctcctctccagctggtagtcacttgcgtgaatgctggtcagtctgaaaaggtgaagctggctgtgcacttacccccatctttctccctcggggagacgacccaaggaatttcagagtattttgtttggcagagcttttacctgttattctttgccctcaaatacagtattgtggtcattttgatgatatgtgtgtaaaatgtgaataatccaattggtgtctgtactcagccttttgatgtctttttaggactttctcttctacacagcaatacgtcgtgctcgagtatccttgtagcaaagcacatagagccagctgtcctgtcagttcccctgtttgcctctgaaacgtctggttagtggggacccaaagattctagtgagtcaacatccataactctgtatctagttgtattattcatagaaaatcaatctggtgctaatggttggccctggtgttgttgggtggcagctgctccttcgccctcttgtagtgtggctgtggagggctctgcctatggggggtggcctgtggcttgtatccttcagtccaccacagcaaatgtgtgtagatttcatgctcgacacttaccactcacctatcaacagatcatcctgcttgactgtaacaaaataaatagtgtctcttcaagtgaa

SEQ ID NO: 181285 - DNA, 2276 bp, Homo sapiens
  Payload ID: 15706
  Gene Symbol: SHROOM2
  Gene Name: shroom family member 2
  ENST ID: ENST00000452575
  CDS Start-End: 1150-2276
gtttgtagttcccagtggctcttttgttctgctatcttgaagggcaggttgcttgtcagctcacaatgctgtgggtaaggtctggtgaggtcggcgaatgtgttctcattgtttattcttctgcctgaagatgagaaataatgcaaatcagggtgcagattccggctcgagctccacaggcgtgcacgtatgtgtaagggcatgctcgccggtgctgcatgtcctcgtggatgcatgcaatttttacagctttgggattcacggttagctgaaagcacattggaactggaaggcggtgctcttaacaccgtgttctaggctggaagccgtagagccatcatctgctctgatgggactgcagcccttggtatgtgggacccttgctccatgtgagttctgcagatgggttccccgagggagctggctggaggacgccagcatcgcatgaagacctgcctgcctcgtttgccttttgtttttcagtagcagtaagaaacaggcattctcactacacaggcattgaatgcggacattgagaaaaaatgacaagcagatgcccagtgtcgggaaggcagcccaggatcacagcagcacccaccgagtcagaaggcaccgaacccacccacattctctgaactatctcactgccggggagccccagagctgccccgggagggccggggccgagcgggaaccctacctcgagattatagatactcggaggagagcaccccagcagacttgggaccccgagcccagagccctggctcacccctgcatgctcgaggacaagactcgtggccagtgagctcagccctgctctccaagaggccagccccacagaggccaccgccacccaagcgcgagcccaggagatacagggccacagacggcgcacctgctgacgcccccgtgggcgtcctcggcaggcccttcccaacgccatcccctgcgtccctggatgtgtatgtggcccgcctgtccctctcccacagcccctctgtgttcagcagtgcccagccccaggacaccccgaaggccactgtctgtgagcgtggaagccagcatgtgagcggggacgcatcacgtcctctgccagaagcactgctccctcccaagcagcagcacctgcgcctgcagacggccaccatggagacctcgcgctccccctcgccccagttcgccccccagaaactgacggacaaacctcccctgctcatccaggatgaggattcaaccagaattgagcgggtgatggacaacaacaccacggtgaagatggtgcccatcaagatcgtgcactcggagagccagccagagaaggagagccgccagagcctggcatgccccgccgagccacctgccctgccccacgggctggagaaagaccagatcaagacgctgagcacatctgagcagttctactcgcgcttctgtctgtacacgcggcagggtgctgagcccgaggccccacatagggcccagccggctgagccccagcccctgggcacccaggtgccccccgagaaagaccgctgcacctcccctccagggctcagctacatgaaggccaaagagaagactgtggaagacctgaagtcggaggagctggccagggagatcgtggggaaggataagtccctggccgacatcctggatcccagtgtgaagatcaaaaccactatggacttgatggaaggcatcttccccaaagacgagcacctcctggaagaagcccagcaacggaggaagctgctccccaaaatcccctctcctagaagcacagaggagaggaaagaggagcccagcgtgcctgcggccgtgtccctggccaccaattctacctactacagcacgtcggcccccaaggcggagctgctgatcaagatgaaggacctgcaggagcagcaggagcacgaagaggattcgggaagcgacttggaccacgacctgtcggtgaagaagcaggagctcatcgagagcatcagccgcaagctgcaggtgctccgggaggcccgcgagagcctgctggaggacgtgcaggccaacaccgtgctgggggccgaggtggaggccatcgtgaaaggcgtctgcaagcccagcgagtttgacaagttccggatgttcattggagacctggacaaagtggtgaacctcctgctgtcgctgtcaggccgcctggcccgggtggagaatgccctcaataatttggacgacggcgcttctcccggtgatcggcaatcactgcttgagaagcagagagtcctgatccagca

SEQ ID NO: 181286 - DNA, 4615 bp, Homo sapiens
  Payload ID: 15706
  Gene Symbol: SHROOM2
  Gene Name: shroom family member 2
  ENST ID: ENST00000418909
  CDS Start-End: 759-2111
atcaacaagacagcaggcacagacaggccagctgttgtgagcttggctttaggactccattcagtaggcaggaggagagctgcagcagaggcgggctgtgggtccctgaagcacatcgctgccttcacagctgggcgaactcccatccagcacgacaagcagatgcccagtgtcgggaaggcagcccaggatcacagcagcacccaccgagtcagaaggcaccgaacccacccacattctctgaactatctcactgccggggagccccagagctgccccgggagggccggggccgagcgggaaccctacctcgagattatagatactcggaggagagcaccccagcagacttgggaccccgagcccagagccctggctcacccctgcatgctcgaggacaagactcgtggccagtgagctcagccctgctctccaagaggccagccccacagaggccaccgccacccaagcgcgagcccaggagatacagggccacagacggcgcacctgctgacgcccccgtgggcgtcctcggcaggcccttcccaacgccatcccctgcgtccctggatgtgtatgtggcccgcctgtccctctcccacagcccctctgtgttcagcagtgcccagccccaggacaccccgaaggccactgtctgtgagcgtggaagccagcatgtgagcggggacgcatcacgtcctctgccagaagcactgctccctcccaagcagcagcacctgcgcctgcagacggccaccatggagacctcgcgctccccctcgccccagttcgccccccagaaactgacggacaaacctcccctgctcatccaggatgaggattcaaccagaattgagcgggtgatggacaacaacaccacggtgaagatggtgcccatcaagatcgtgcactcggagagccagccagagaaggagagccgccagagcctggcatgccccgccgagccacctgccctgccccacgggctggagaaagaccagatcaagacgctgagcacatctgagcagttctactcgcgcttctgtctgtacacgcggcagggtgctgagcccgaggccccacatagggcccagccggctgagccccagcccctgggcacccaggtgccccccgagaaagaccgctgcacctcccctccagggctcagctacatgaaggccaaagagaagactgtggaagacctgaagtcggaggagctggccagggagatcgtggggaaggataagtccctggccgacatcctggatcccagtgtgaagatcaaaaccactatggacttgatggaaggcatcttccccaaagacgagcacctcctggaagaagcccagcaacggaggaagctgctccccaaaatcccctctcctagaagcacagaggagaggaaagaggagcccagcgtgcctgcggccgtgtccctggccaccaattctacctactacagcacgtcggcccccaaggcggagctgctgatcaagatgaaggacctgcaggagcagcaggagcacgaagaggattcgggaagcgacttggaccacgacctgtcggtgaagaaggagctcatcgagagcatcagccgcaagctgcaggtgctccgggaggcccgcgagagcctgctggaggacgtgcaggccaacaccgtgctgggggccgaggtggaggccatcgtgaaaggcgtctgcaagcccagcgagtttgacaagttccggatgttcattggagacctggacaaagtggtgaacctcctgctgtcgctgtcaggccgcctggcccgggtggagaatgccctcaataatttggacgacggcgcttctcccggtgatcggcaatcactgcttgagaagcagagagtcctgatccagcagcacgaggacgccaaggagctcaaggagaacctggaccgccgcgagcgcatcgtctttgacattttggccaactatctgagcgaggagagcctcgcggactatgagcacttcgtgaagatgaagtcggccctcatcatcgagcagcgggagctggaagataaaatccaccttggtgaagagcagctgaagtgcttattggacagccttcagcccgaaaggggcaaataagagaccagtccccggtggaggaggggcacggggcctccgagctccagctccgttcccaaggatactcgtgaagaccccatctgtgttcatggcctggaaagagacttctcccatagcaaagaggctgttataaaagcaataacttttgtgtttgtgtgggatgatttatttaattttttagtttcccctttgattgctgagagccattttcctttacacataactacacctgacaccaggctctgctggatgtgagtttccactgcatgggctgtgggctgggcctgtggtgcctgccgagtggtcactgtcagtgggaaacccgttgttcctcccgtcttcagatgctgagccaactgcttggacagcagccagcgcgtcatgacgtgcatgagagggggaccctggtgctcatcttctcttgtcattcatccaggcatgggctgccaggttttgtccctgctcgttcaacagtgtgagcatttgtctctgttatctaatgatgttctctgacccagcagaaatcatcatcatgatgatgataatttattaactttttggaagggtgaatagtttcctaatggttaaaaaccaactgtgaaaggaaccacctgtgtggttgggttcactcattctcagattaaattgccacttaaagaaataacgtgcatgctttaaaaaacacagtcacgcaccaagcaggcaaatagctttagtccttctcacctcacatcacagttgttctgcaaagtaaaattttttggttaagagcgtgtccagtagtaatgtgcttgttagctgtttctcaagaccaacagaagattttttcagttactttccccccatgtattttgtatgcatatgattgtccgtgataattggctacttttccattgtttcctccttaaatcgtttagcatggcatgagggccacattccatggacgggaagaccccttcctcttcagaggtcccgtggactacacagctcctgagcttgatctttttctgccatgaagtttaaagattctatgcccatttccttgattgaaatggcaggattctaaagagagcctggtttgttaaaagaaaacactgtcatgctgtcagttcccaattgacaagtcacagactgggagaaaatatttgcaaatcgtgtatctgacaaaaggtttgtgtccaggatgtacaaagaactctcaaaccggatagtaagaaaacaaacagcccaagtgaaaagcaggcaaaagacttgaatagacacttcaccaaagagcatacacgcgtggcaaacaagcacacgaaaagacgttcagccgccgatggcttggttataatttataacttacttatttttatctaataattgtagattcagtgtatttcttcaaaaaatgtttaattaaatgcatgttaatggtgagtgaatcccttgggtgacttcgtgtttaggtcgtattagggcatttgttggatcaacggatcattttaaccctgacttccccttattcccataaaagaagttttccagtggaatggagatttcattttgtcagcagcagtgaccacagccttaccaaagcagacgcgtgcgcgtgcacagatgcacacacacagatgtcttaaaagactagaatccacacttcctgagccagaggggccgtgttgacggtaatgcattctctatagagccaagtccaaactggcaagctcaatgatgcaggcaataaaccgcctttttggcagcctaccaatgccaaaaggataaatgtctttccaaaagtgtgtattcctgttaaattaagctcttgctaacttgaaaaatccctgttctgccagcgaagcttcctcctcctctccagctggtagtcacttgcgtgaatgctggtcagtctgaaaaggtgaagctggctgtgcacttacccccatctttctccctcggggagacgacccaaggaatttcagagtattttgtttggcagagcttttacctgttattctttgccctcaaatacagtattgtggtcattttgatgatatgtgtgtaaaatgtgaataatccaattggtgtctgtactcagccttttgatgtctttttaggactttctcttctacacagcaatacgtcgtgctcgagtatccttgtagcaaagcacatagagccagctgtcctgtcagttcccctgtttgcctctgaaacgtctggttagtggggacccaaagattctagtgagtcaacatccataactctgtatctagttgtattattcatagaaaatcaatctggtgctaatggttggccctggtgttgttgggtggcagctgctccttcgccctcttgtagtgtggctgtggagggctctgcctatggggggtggcctgtggcttgtatccttcagtccaccacagcaaatgtgtgtagatttcatgctcgacacttaccactcacctatcaacagatcatcctgcttgactgtaacaaaataaatagtgtctcttcaagtg

SEQ ID NO: 181287 - DNA, 11020 bp, Homo sapiens
  Payload ID: 15707
  Gene Symbol: SHROOM3
  Gene Name: shroom family member 3
  Uniprot ID: Q8TF72
  ENST ID: ENST00000296043
  CDS Start-End: 954-6944
gttattaactgtaagactgtttgaattgtcaggtctttgtggtgagctgaattctgcatggcagtgcttactgtgcagaaaggttgcaatgcctcactttgccttaatccatgttcctctaacttccttactctttctctcaagaggaggcaagtggctgtggcggccgcagcagtggctgatcatcactgaaaataccaaagaaaagaactgagctgcctccttcatattttttccattgaggattaatttaccgtgctttttcattttctctacatcctgcaaaagtttttttctctcctaagaaacaaactatgaactgattgttgaaaaaaagaagtaaaaagttttagcacagcttctctgtctcttcgggacaagttagaaaattctgaagtgagccgaagcatagtaagtgctttctttctttttaagctacttctggggagggaggaggctattgtaatggtaaatttcactccgagaggaagaaagggttgataatcaatcaaaaatgaggtattcctttgagtatttgtgattttcttactatattgtaagatgcttttaattttctctgtaaaataggcagaaatggttttagtgtgtgtatgtgtgaaataaaagctcagaaaagcaatcttcagagcgccactgaaggaagttttgacgaacggagtagagatgtataccacttgggggcttcagtgagaacccagaattcctggaggaggatttacattcagaaatgttgaagtgaaaattccttctggttcagcatcttggagttcagcttggaagaacattttacgtatggaagaatttgcttctccaaacctctcttttggccattgtgtgtcctgaaggatgggacaacttgtgctgtagaagcactgcttgcctgagtttgcttcaggcattttaaatttaacttgagggatcatgtgtttggcatgatgaggaccactgaagacttccacaagcctagtgccacattaaactctaacacggccaccaagggaaggtacatttatctggaggcattcctggagggaggagctccctggggttttactctaaagggtggcctggagcacggagaaccattaatcatctctaaggtcgaagaagggggcaaagcagacaccctgagctccaaactgcaggctggggatgaggttgtgcacatcaatgaggtgactctgagcagctccagaaaggaggcagtttccctggtgaaaggatcctacaagaccctcaggctggtagtgcgcagagatgtgtgcacagacccaggccatgcagatactggtgcctctaacttcgtcagcccagaacacctcacctctggcccccagcacaggaaagcagcgtggtcaggaggggttaaacttcggctgaagcacaggcgcagtgagcctgcaggccgacctcactcgtggcacacaactaaatctggggagaagcaacccgatgccagcatgatgcagatatctcagggtatgatcggccctccttggcaccaaagctaccattccagctcctctactagtgacctctccaactatgaccatgcttatctaaggcggagccctgaccagtgcagctcccaggggagcatggagagcctggagcccagtggggcatacccaccctgtcatctttcccctgccaagtccaccggcagcattgaccagctcagccacttccataacaagagagactcggcttacagctctttctccaccagttctagcatcctagagtatccacaccctggcatctctggccgggagcgttcaggctccatggacaatacttctgctcgaggtggcctcctcgaagggatgaggcaggcagatattcgctatgtcaagacagtctatgacacccggaggggagtctcagcagagtatgaggtgaactcttcagccctgctgcttcaaggtagggaggcccgagcctcagcaaatggtcagggctatgataaatggtctaatattcctcggggcaagggagtgccacccccatcctggagccagcagtgccccagttccttggagactgccacggacaaccttcctcctaaggtgggtgcacccctgcctccagctcggagtgacagttacgcagcatttcggcaccgtgagcggcccagctcctggtctagccttgatcagaaacggctctgccggcctcaggcaaactctttaggctccctgaagtctccattcatagaggagcagctgcatactgtgctggagaagagtccagagaacagccccccagtgaagcccaagcataactatacccagaaggcccaacctggccaacctctgctgccgaccagcatctacccggtaccttccctggagccacactttgcccaggtgcctcagccttctgtgagtagcaacggtatgctctaccctgcactggccaaggagagtggatacatagcccctcagggagcatgcaacaagatggctaccattgatgagaatgggaaccagaatggatctggcaggcctgggtttgccttctgccagcccttagaacatgacttgctgtccccagtggagaagaaaccagaagctacagccaagtatgtcccctccaaagtccatttctgttcagtgcctgaaaatgaggaggatgcctccctgaagagacatctcacacctccccaaggcaacagcccacattccaatgagagaaagagcacccacagtaacaaaccatcttctcatccccacagcctcaaatgccctcaggctcaggcctggcaagcgggtgaagacaagagatcttccaggctctcagagccctgggagggcgatttccaggaagaccacaatgccaacctctggaggaggctggagagagaaggcctaggccagagcctgtcaggcaactttggcaagaccaagtcagccttctcatctctccagaacattcctgagagtctgagaagacacagcagcctggagctaggccggggaacccaggagggttaccccgggggcaggcccacctgtgcagtcaacaccaaggcagaagaccctgggaggaaagccgctcctgacctcgggagccatctggaccggcaggtttcctacccgcggcccgaggggaggaccggtgcctcggcttctttcaacagcacagacccaagtcccgaagagccgcctgccccctcgcacccgcacacatccagtctgggccggagggggcccggcccaggcagcgcctcggctcttcagggctttcagtacgggaagccccactgctcggtgctggagaaggtctccaaattcgagcagcgagagcaagggagccagagaccgagtgtgggcggctctggttttggccataactataggccccacaggaccgtctcaacttccagtacttctgggaatgacttcgaggagacaaaagcacacattcgtttctctgagtcagctgaacccctaggcaacggggagcagcacttcaaaaacggggagctgaagttggaagaggcttcccggcagccctgcggtcagcagctgagcggaggagcgtcggacagcggccgtggcccccagaggccggacgctcggctcctccgtagccagagcaccttccagctctccagcgagccagagagggagcccgagtggcgggacaggcccggctcgcccgaatcgcccctgctggatgcccccttcagccgcgcctaccggaacagcatcaaggacgcacagtcccgtgtcttgggggccacctcctttcgacgtcgagacctggagctgggggcgcccgtggcgtcgaggtcctggcggccacggccttcctcggcccacgtggggctgcggagccccgaggcgtcggcctccgcctccccgcacacgccccgggagcggcacagcgtgacccctgctgagggcgacctggccaggcccgtgccccctgccgcccggagaggtgctcgccggcgcctgactcccgagcagaagaagcgctcctactcggagcccgagaagatgaacgaggtggggatcgtggaggaggccgaaccggcacccctgggcccgcagagaaatgggatgcgtttcccggagagcagcgtggccgaccggcgccgtctcttcgagcgcgatggcaaggcctgctccacgctcagcctgtcggggcccgagctgaagcagttccagcagagcgccctggcggactacatccagcgcaagaccggcaagcggcctacctccgccgccggctgcagcctccaggagcccgggccactgcgtgagcgcgcccagagtgcctacctccagcccggccccgcggcgctcgaaggctccggcctcgcctcggcctccagcttgagctcactgcgggagcccagcctgcagccccgcagggaggccacgctcctgccggccacagttgcagaaacccagcaggctccccgagatcgcagcagctccttcgccggtggccgccgcctcggggaacggcgacgcggggacctgcttagcggagcaaacggtggaacaaggggcacccagagaggggatgagacccccagggagccatcctcctggggggccagggccgggaagtccatgtcggccgaggacctgctggaacgctcggacgtccttgcgggccctgtccatgtgaggtccaggtcatctcccgccaccgcagacaagcgccaggatgtgcttttggggcaagacagtggctttggtcttgtgaaggatccatgttatttggctggtcctggatctaggtcactcagttgttcagaaagaggccaagaagagatgctgccgctcttccaccatctcacccctcgttggggtggttcaggctgcaaagccattggtgattcctccgttcctagtgaatgtcctggaaccctggaccatcagaggcaagccagtaggacaccctgccccaggccaccactggcaggaacgcaagggctggtcacagacaccagggctgcacccctgaccccaattggcacccctctgccttcagccattccctctggctactgctcacaggacggtcagacagggcgacagcctctcccgccctacacccctgccatgatgcacagaagcaatggtcacaccctgacccagcctcccggtccaagaggctgtgagggcgatggcccagagcatggggtagaagagggaacgaggaagagggtctcgctgcctcagtggccacctccttctcgagcaaagtgggcccacgcagccagagaggacagccttcctgaggaatcctcagcccctgattttgcaaacctgaagcactatcaaaaacagcagagtcttccaagtttatgcagcacttctgacccagacacacctcttggggccccgagcactccagggaggatctccctccgaatatctgagtctgtcctgcgggactccccgccacctcatgaggattatgaagacgaagtgtttgtgagggatccgcaccccaaggccacgtccagccccacatttgaacctcttcccccacccccacctcctccaccgagtcaggaaaccccggtgtatagcatggatgacttccctccacctcctccccacactgtatgtgaggcgcagctggacagtgaggatcccgaggggccacgccccagcttcaacaaactttctaaagtgacaattgcaagggaaaggcacatgcctggtgcagcccatgtggtaggtagtcagacactggcttccagactccaaacttctatcaagggttcagaggctgagtccacaccaccctccttcatgagcgttcacgcccaacttgctgggtctcttggtgggcagccagcacccatccagactcaaagcctcagccatgatccagtcagtggaactcagggtttagaaaagaaagtcagtcctgatcctcagaagagttcagaagacatcagaacagaggctttggccaaggaaattgtccaccaagacaaatctctagcagacattttggatccagactccaggctgaagacaacaatggacctgatggaaggtttgtttccccgagatgtgaacttgctgaaggaaaacagtgtaaagaggaaggccatacagagaactgtcagctcttcaggatgtgaaggcaagaggaatgaagacaaggaagcagtgagcatgttggttaactgccctgcctactacagtgtgtctgctcccaaggctgagctactgaacaaaatcaaagagatgccagcagaagtgaatgaggaagaggaacaggcagatgtcaatgaaaagaaggctgagctcattggaagtctcacccacaagctggagaccctccaggaggcgaaggggagcctgctcacggacatcaagctcaacaacgccctgggagaagaggtggaggctctgatcagcgagctctgcaagcccaatgagtttgacaagtataggatgttcataggggatttggacaaggtggtcaacctgctgctctccctctcggggcgtctagcccgtgttgagaatgtccttagcggccttggtgaagatgccagtaatgaagaaaggagctctctttacgagaaaaggaagatcctggctggtcagcatgaggatgcccgggagctgaaggagaacctggatcgcagggagcgagtagtgctgggcatcttggccaattacctttcagaggagcagctccaggactaccagcacttcgtgaaaatgaagtccacgctcctcattgagcaacggaagctggatgacaagatcaagctgggccaggagcaggtcaagtgtctgctggagagcctgccctcagatttcattcccaaggctggggccctggctctgcccccaaacctcacgagtgagcccattcctgctgggggctgtactttcagtggtattttcccaacattaacctctccactttaacctcttctaaaatacccaaccaaaagatcactgtttctctcaacactatttaatctgaaaaatgtttcagtacaaaccactgtttgaactatctgggttattggtgtttgttcctgatgaaaggaaaaaaattctctccaggaggaagcctttttccttcttgcccttcctgattgatcttctgagagctcgaatgctgctggacacgtacccctttctattattactttgtagtagaaagaaagttaatgaaactgagaactgattggagggtgtttgatcatttagtttttaacaggctgaggcaacatggatcagtgtgtgtccccctcaggaatgtatccacagtggccttccttgctggtgggcagtgtatcctgatggcagggtacaagtaccattaatgaagggtctgcaacataaagccttaaaaagacacacactaagaaaactgtaaaaccttgaacattgttatttatattttttaaaatggaaaagatcactatgtttgttgtgctaaccacttatttgattctgttttgtggtggacatagatgattacgtttgagctttgtattttgtgaaaaccttaatgaaatgaattccaaagatagtcacgttgagcgtgaagactttttttcttacattcctgtcttatttttaccaacacgagcaggcattctgcgcttccactggactgagtatgggggagtcctgctcccctcctgtctcacaccttccccaggaggaaggcctcatgcactgcggttattgcatcatttcctagtgcttcatgtcattatcactggtggggaaacaaagctaaattttattaacaaagacaactctcagacctatataataggaggaggacgtccagaatccaacaaaattcaaacggagcccatgctgttctcctgaacaagatttgggctaaatacggcctgtttattgaggctgttttaatgatgctttaaaaaaaaaaaatgttttctaaaatgtcaaacctgttgaccacactttgattaaaaactgcctccttaacctctgaagactgattttgctttatcatgtttcaataataacatttcagaggttactctgtagccccagttgtaagcttataaaaacaaactggaaggctgaggaggttatgggctggcagccaggctatgtttacagctgctggagatggcagtagccttatactttgagcaggtagtacatcccaggctgtgctagaggtagatttgttttttcacgtttgatctgtggctggtggccacctttgttgatttgggcttacgagtttcatagtagccagtcttagaaaattgggggagtaaaattttgaagtaaaaaaaaaaaaaaaatgacaagggaaccaaatgctccttctccccttagtacattttcattacttaatgaagttttatctcctatgtaagaatatcaaaattgtagtttgggtctccagtagagatgtcttttgattaacttataaacaactggccacccagaagtttcctttgcatagtcaaccaaagctatggctttgttctttggagcttatatactgcatgactccattgatacaaataagacagcaccttggtttcccagggatgttttcattcagaggtcctgtctcccaggaaagcagtagaaccagtgacagcattcaacagccacactgcatggtcatcagtcttaggccaacatgggagcctgaaattaactccatcagtaactacctgtgtgtcttgctgatactgaatgagccctcacaagccaagccaggtggaagacagccagcaaacgtctacagttattcttagtgaaattcctcagaggaatccagggggctcccagttcccaacactcttcgagatgaccatttttcgggatttgactggggaacattttacatattcagtctttctcaaaaatttttatttattttcttgagaaagggtcttactatgttgcccaggctggagtgcagagtggtgcgataacagctcattgcagtctgaacctctgaggctcaagccatcctcccatctcagcctcccaagtagctgggaccacaggtgtgcaccactatgcttggctaattttttgattttttatagagacgggggtctcgctatgttgcccaggctggtttcaaactcctgggctcaagggatccttccgctttggtcccagaagtgctgggattacaggcatgagccacttcacccagccacttttctaatttatagacataaaagtaattgactcccacagcacagtaacaggcaatgctgcttggcatgccacaaacatctgaaagcttgtgacactcctaggattgtgtccattctttcattatgtggaaactttgttctgttatgtgaaatgggtaaggcaccaagtgagactttgaaatctaatttttaggtggatgtgatatttattgtaataggacttgacctctgtactttaaagaaatcactaaccaaattttcaaagtttccttttaaatgcgtttagctagaaatctatgtatttatccctttcctattttgcattcttctcccactatttttaaaaactcatttacagtagaaaccattcttctttctcccaacagtatcctttgccaagaccatgagaacagtaaggagcatgttgttggtcagggtttcagaatacgcgtgatgtcactgagaatgtttgctcacagtcaataattgtctttgtggatgtgataattttggagatacacttctggtcagaactcaggtgagataatcttgcaatactccaaatgcagatactccagccacccgcaaggttccaggaaaggacaatgtcctgcgagaaaatcaggaggcctccacttcctgggccacttgagaagttcctgggcatgtcactacatgttggttgactcagccatttctcatgctgttttgtttcttgcggtggccacttaaccccaaagaatgaagggaggatccacagtgaaagtgcctgagtttctctatgagaccagatgctgtcgaaaccaaacatcttttcctttgctctatgggaacattttagggtttgttttgcacagctggtttccagactagaagattaacaagtttgggtccacccctaagaatcagtggctgtcttttaaggtgaggagtgtgggcttaactgaggtcctttgagggagctataaaggagaaacaacctgggacatcccagttttcctattcctccactgttaatatctcatctaaaataattcatgagtttaaatggtaaatatatgctttaagctctacctttaaacttgtatgttattcaggcatctcttattaagatactgggtctctggatacccaaggaaatgttggctttttattcttatgtggttccaaatttacttctcttcagtttaattgtccatggtagtgctggcttcattgttaggttggagttattattttccttttagaacaacatgaattttattcaccttactattagaaaaaggaataactacagccagaaataacttcatttcctacaaggtataaaaagtggtcaagtgaatgtgaaggggcttttctacacaggaatatattatcgggaacaaagtatttcctgctgccttaactctttgggatgcataggataaaatgataaagaccattttaatatcagaaagggttgtcttattaatttttaaataaaacttcacatttcttaatggggagctcattcagaaactaaataatggtttctcaaagtgtggtcaggatacgatctgcatcagaatccttggaatgcttgttaaaaataccaattgctatgacaaaaccaagtctgctggaaactgcatttcagcaggtttcccatgttattctgatgtattttaacatttgagagccactaccaatcatctgtacagttcctactgttatgatcacaataagactaacatgaatttaataatctgaataatttttaaaatttaaataaacagaaattgaagttaaatttaaaaataaaaataacctcagaagttgaaa

SEQ ID NO: 181288 - DNA, 6261 bp, Homo sapiens
  Payload ID: 15708
  Gene Symbol: SHROOM4
  Gene Name: shroom family member 4
  Uniprot ID: Q9ULL8
  ENST ID: ENST00000289292
  CDS Start-End: 285-4766
ccgttttcttgtccattacgcgctatccctccgcctctccttctttcttttcttttctttttttcccttctccttttcccccctctctccccctttctccagctccgtgtcatttcctccttgcgctcgctcgctgcctgagcgtctccagccgggagagtaggcggagcagggcggtgcggggtggcgtagagctggagggcgatggtggcggagctgctgggggcggaggcaacgtagccccctcggaaaaggagcccggcggcgcctgagcccagccgaggatggagaaccggcctgggtccttccagtacgtccctgtgcagctgcaagggggggcaccctggggcttcacccttaaggggggtctggaacactgtgagccgctcacagtgtctaagattgaagatggaggcaaggcagctttgtcccagaagatgaggactggtgatgagctggtgaatatcaatggcactccattatatggctcccgccaagaggccctcattctcatcaaaggctccttccggattctcaagctgattgtcaggaggaggaacgcccctgtcagtaggccgcactcatggcatgtggccaagctgctggagggatgccctgaagcagccaccaccatgcatttcccttctgaagccttcagcttgtcctggcattctggctgcaacacaagtgacgtgtgtgtgcagtggtgtccactctcccggcattgcagcaccgagaaaagcagctccattggcagcatggagagcctggagcaaccaggccaagccacctatgagagccatctgttgcctattgaccagaacatgtaccctaaccagcgtgactcagcctacagctccttctcggccagctcaaatgcttctgactgtgccctttccctcaggccagaggagccagcctctacagactgcatcatgcaaggcccagggccaactaaggcccccagtggccggcctaatgtggctgagacctcaggaggtagtcggcgcaccaatgggggccacctgacccccagctctcagatgtcatcccgtccacaggagggataccagtcagggcccgccaaagcagtcaggggcccaccacaacctccagtgaggcgggacagccttcaggcctccagagcccaactcctcaatggagagcagcgcagggcatctgagcctgtggtccccttgccacagaaggagaaactgagcttagagcctgtgctacccgcaaggaaccctaataggttctgttgcctcagtgggcatgaccaagtgacaagtgagggccatcagaactgtgagttcagtcagcctcctgaatccagccaacagggctctgagcatctactgatgcaggcctcaaccaaagctgttggatccccaaaagcctgtgacagagcttccagcgtggattccaacccactcaatgaggcttctgcagagctagctaaggcttcttttggcagacctccacatctcataggacccacagggcatcgccatagtgcccctgaacagctgctggcatcccacctgcagcatgtgcaccttgataccaggggcagcaaagggatggagctcccacccgtacaggatgggcaccagtggactctgtcccctttgcacagcagccacaaagggaagaaaagtccatgcccccctacaggaggaacccatgaccagtccagcaaagaaagaaagaccagacaagtggatgacaggtctttagttttgggacaccagagccaaagcagtcccccacatggagaggctgatggacacccctcagaaaaaggtttcctggacccaaacagaacaagcagagcagccagtgaattggccaaccagcaaccctctgcctctggctcccttgttcaacaagccacggactgttcttcaaccactaaagcagctagtggcacagaggcaggtgaagaaggggacagcgagcccaaggagtgcagccggatgggtggtaggcgaagtggagggacccggggccgctcgatccaaaaccggcggaagagtgagcgttttgctaccaatctgcgtaatgaaattcagaggaggaaggcccagctccagaaaagcaagggtcccttgtcacagctgtgtgacactaaggagccagtggaagagacccaggagcccccagaaagtcctccactcactgcctctaacacatctcttctatcttcatgtaaaaaacctcccagccccagagacaagctcttcaacaaaagcatgatgctcagagctaggtcttccgagtgcctcagccaagcccctgagagccatgaatctaggacaggcttagagggacgaataagccctggccagaggcctggccagtcctctttgggcctgaacacctggtggaaagcacctgacccatcctcctcagaccctgagaaagcacatgctcactgtggagtccgtggaggtcattggagatggtctccagagcataattcacagccacttgtggcagcagccatggaaggcccttccaacccaggtgacaacaaggaattgaaggcttctactgctcaagctggggaggatgccatcctcttgccttttgcagacagaagaaagttctttgaagagagtagcaaatccttatctacatctcatttgccaggtttaaccactcatagcaacaagacttttacccagagaccaaaacctatagaccaaaacttccagccaatgagctccagctgtagggaattgaggcgccatcccatggaccaatcatatcattccgcagaccaaccatatcatgccacagaccaatcatatcattccatgtcaccccttcagtcagaaactcccacttactcagaatgttttgcaagcaaaggtctagaaaattccatgtgttgtaagccactacactgtggtgattttgattaccacaggacctgctcttactcctgcagtgttcaaggagctctagtccatgatccttgcatttattgttctggggaaatctgccctgccttgctaaagagaaatatgatgccaaattgctacaactgccggtgccaccaccaccaatgcattcggtgttcagtttgctatcataatcctcagcacagtgccctcgaggacagcagcttggcacctggcaacacttggaaacccaggaagctgacagtgcaggaatttcctggggacaaatggaatccaataacaggaaacaggaagaccagccagtcagggagggaaatggctcattccaagactagcttttcatgggcaacccctttccatccttgccttgagaacccagcactggacttgtcaagctaccgagcaatttcttctcttgacctccttggagacttcaaacatgctttgaaaaaatcagaggaaacttcagtttatgaggaggggagctcccttgcctccatgccccacccactgcgcagccgtgccttctcagagagtcacatcagcttggcgccccaaagcacccgggcctgggggcagcataggagggagctctttagcaaaggtgatgagacccagtcggatcttctcggagccaggaagaaggcctttcctcctcctcgccctcctcctcccaactgggagaagtacaggctctttcgtgcagcccagcagcagaagcagcaacagcagcagcagaagcaacaggaggaggaggaggaggaggaagaagaagaagaagaggaagaggaagaggaggaggaggaggcagaggaggaggaagaggagctgccaccccagtatttcagttcagaaacctctggttcctgtgctctcaatcctgaggaggtcctagagcagccacaacccctcagctttggccacctggagggctcgagacagggttcacaaagtgtcccagcagagcaagaatcctttgcactccattccagtgatttcttgcctccaataaggggtcacttgggatctcaacctgagcaggctcagcccccttgctactatggcattggtgggctttggaggacatcgggacaggaagccactgaatccgccaaacaagagtttcagcacttttcgcctccttcaggggccccaggaatccctacctcttactcagcttattacaatatttctgtggccaaggcagagctgctgaacaaactgaaagaccaacctgagatggcagagattggcctaggagaggaggaagttgaccatgaactggctcaaaaaaagatacagcttatcgaaagcatcagcagaaaactttctgtcttgcgggaggcccagcgagggctgctagaggacatcaatgccaattctgcccttggggaggaggtggaggccaacttaaaagccgtctgcaaatccaatgaatttgaaaagtaccacttgtttgttggggacctggacaaagtggtcaacctgttgctgtcactctctggacgactggcccgggtggagaatgctctgaacagcatcgattcagaggccaaccaggagaagttggtactgatagagaagaagcagcagctgacggggcagttggcagatgccaaggagctgaaggagcacgtggaccgccgggagaagttggtgtttggcatggtctcccgctacctgcctcaggaccagctccaagattaccagcactttgtcaagatgaaatctgctctcatcattgaacagcgagagctggaggagaagatcaagctcggggaagagcaactcaaatgtctcagggagagtctactcctggggcccagcaatttctaattctaccagcactctgccacagcatccctgcccagccatgtgggaagtgctttcaatcttctttgttagcagtttctcagcaagtagatagcaattagcagtttgttccagccctctaccctggatgtctctcactaccccttccctagcagtggtcctaaccagctaggagaccctggggaagccacaagcttctacccaagggagctgcagcaaggtgtgatcttagaaccacactctccttcccacagttgccaagggcaagtacttgctgcacagagaaccaaggaagtgccttcattctgctttgtactaggacaccaaagacatcaagtactcatcacccacccatatcatcaacagcctctaaaggctcagagggaatctgccttgcagctctactctgccccagggcttgtggccagccatttctcacagagagctggctgccttgagggcattcacctggcaccagtttcagggcctcacccaagctttgcaggggaaagcacagagggaggaattacactgaaaaaaatgcaagcaaaggttgagtacccccaggtgccccttaggaaggaaccaggtttaaataggctctacccttacctttcccagcagcaagttcaggggaagaggcctactcttagccctggctagtgtgaccctcttcctgtcctaagactttggtcctaccacctcttgtttcatctttcctttacattgctgggggttaccgcaggtgcctaccccagggcttcaccatatgggccattaatagctctactaaaactgacttctagatgtaggtttcattattgggggagggggttcttattgttatattttaaatggccttttgattttatttatttttatgttttgattatttttttcttttttaactaataaggcgagaagagggaagttggagagggaaaagttagcccagaaggaaagcattttctgcagatcagcctgaatccaccgtggctaggcatattcttgctcttctcgtgttgctcacaactacctgcctggatgaatttaggaaagttgcaggatacaaggttaaaacacaagatcaaatgaacaatccgaaaatgttattaagaaaacagttccggccgggcatggtggctcacgcctgaaatcccagcactttgggaggccgaggcaggtggatcacgaggtcaggagatcaagaccatcctggctaacacggtgaaaccctatctctactaaaaatacaaaaaattagccaggtgtggtggcacgcaccagtagtcccagctactcgggaggctgaggcaggagaattgcttgaacctggaaggcagagattgcagtgagctgagaccacaccactgcactccatcctgggcaacagagtgagactttgtctcaaaaagaaagaaagaaagaaagaaagaaagaaagaaagaaaagaaagaaagaaagaaagaaagaaaacagttccatttacaatagcatc

SEQ ID NO: 181289 - DNA, 9556 bp, Homo sapiens
  Payload ID: 15708
  Gene Symbol: SHROOM4
  Gene Name: shroom family member 4
  Uniprot ID: Q9ULL8
  ENST ID: ENST00000376020
  CDS Start-End: 27-4508
ccggcggcgcctgagcccagccgaggatggagaaccggcctgggtccttccagtacgtccctgtgcagctgcaagggggggcaccctggggcttcacccttaaggggggtctggaacactgtgagccgctcacagtgtctaagattgaagatggaggcaaggcagctttgtcccagaagatgaggactggtgatgagctggtgaatatcaatggcactccattatatggctcccgccaagaggccctcattctcatcaaaggctccttccggattctcaagctgattgtcaggaggaggaacgcccctgtcagtaggccgcactcatggcatgtggccaagctgctggagggatgccctgaagcagccaccaccatgcatttcccttctgaagccttcagcttgtcctggcattctggctgcaacacaagtgacgtgtgtgtgcagtggtgtccactctcccggcattgcagcaccgagaaaagcagctccattggcagcatggagagcctggagcaaccaggccaagccacctatgagagccatctgttgcctattgaccagaacatgtaccctaaccagcgtgactcagcctacagctccttctcggccagctcaaatgcttctgactgtgccctttccctcaggccagaggagccagcctctacagactgcatcatgcaaggcccagggccaactaaggcccccagtggccggcctaatgtggctgagacctcaggaggtagtcggcgcaccaatgggggccacctgacccccagctctcagatgtcatcccgtccacaggagggataccagtcagggcccgccaaagcagtcaggggcccaccacaacctccagtgaggcgggacagccttcaggcctccagagcccaactcctcaatggagagcagcgcagggcatctgagcctgtggtccccttgccacagaaggagaaactgagcttagagcctgtgctacccgcaaggaaccctaataggttctgttgcctcagtgggcatgaccaagtgacaagtgagggccatcagaactgtgagttcagtcagcctcctgaatccagccaacagggctctgagcatctactgatgcaggcctcaaccaaagctgttggatccccaaaagcctgtgacagagcttccagcgtggattccaacccactcaatgaggcttctgcagagctagctaaggcttcttttggcagacctccacatctcataggacccacagggcatcgccatagtgcccctgaacagctgctggcatcccacctgcagcatgtgcaccttgataccaggggcagcaaagggatggagctcccacccgtacaggatgggcaccagtggactctgtcccctttgcacagcagccacaaagggaagaaaagtccatgcccccctacaggaggaacccatgaccagtccagcaaagaaagaaagaccagacaagtggatgacaggtctttagttttgggacaccagagccaaagcagtcccccacatggagaggctgatggacacccctcagaaaaaggtttcctggacccaaacagaacaagcagagcagccagtgaattggccaaccagcaaccctctgcctctggctcccttgttcaacaagccacggactgttcttcaaccactaaagcagctagtggcacagaggcaggtgaagaaggggacagcgagcccaaggagtgcagccggatgggtggtaggcgaagtggagggacccggggccgctcgatccaaaaccggcggaagagtgagcgttttgctaccaatctgcgtaatgaaattcagaggaggaaggcccagctccagaaaagcaagggtcccttgtcacagctgtgtgacactaaggagccagtggaagagacccaggagcccccagaaagtcctccactcactgcctctaacacatctcttctatcttcatgtaaaaaacctcccagccccagagacaagctcttcaacaaaagcatgatgctcagagctaggtcttccgagtgcctcagccaagcccctgagagccatgaatctaggacaggcttagagggacgaataagccctggccagaggcctggccagtcctctttgggcctgaacacctggtggaaagcacctgacccatcctcctcagaccctgagaaagcacatgctcactgtggagtccgtggaggtcattggagatggtctccagagcataattcacagccacttgtggcagcagccatggaaggcccttccaacccaggtgacaacaaggaattgaaggcttctactgctcaagctggggaggatgccatcctcttgccttttgcagacagaagaaagttctttgaagagagtagcaaatccttatctacatctcatttgccaggtttaaccactcatagcaacaagacttttacccagagaccaaaacctatagaccaaaacttccagccaatgagctccagctgtagggaattgaggcgccatcccatggaccaatcatatcattccgcagaccaaccatatcatgccacagaccaatcatatcattccatgtcaccccttcagtcagaaactcccacttactcagaatgttttgcaagcaaaggtctagaaaattccatgtgttgtaagccactacactgtggtgattttgattaccacaggacctgctcttactcctgcagtgttcaaggagctctagtccatgatccttgcatttattgttctggggaaatctgccctgccttgctaaagagaaatatgatgccaaattgctacaactgccggtgccaccaccaccaatgcattcggtgttcagtttgctatcataatcctcagcacagtgccctcgaggacagcagcttggcacctggcaacacttggaaacccaggaagctgacagtgcaggaatttcctggggacaaatggaatccaataacaggaaacaggaagaccagccagtcagggagggaaatggctcattccaagactagcttttcatgggcaacccctttccatccttgccttgagaacccagcactggacttgtcaagctaccgagcaatttcttctcttgacctccttggagacttcaaacatgctttgaaaaaatcagaggaaacttcagtttatgaggaggggagctcccttgcctccatgccccacccactgcgcagccgtgccttctcagagagtcacatcagcttggcgccccaaagcacccgggcctgggggcagcataggagggagctctttagcaaaggtgatgagacccagtcggatcttctcggagccaggaagaaggcctttcctcctcctcgccctcctcctcccaactgggagaagtacaggctctttcgtgcagcccagcagcagaagcagcaacagcagcagcagaagcaacaggaggaggaggaggaggaggaagaagaagaagaagaggaagaggaagaggaggaggaggaggcagaggaggaggaagaggagctgccaccccagtatttcagttcagaaacctctggttcctgtgctctcaatcctgaggaggtcctagagcagccacaacccctcagctttggccacctggagggctcgagacagggttcacaaagtgtcccagcagagcaagaatcctttgcactccattccagtgatttcttgcctccaataaggggtcacttgggatctcaacctgagcaggctcagcccccttgctactatggcattggtgggctttggaggacatcgggacaggaagccactgaatccgccaaacaagagtttcagcacttttcgcctccttcaggggccccaggaatccctacctcttactcagcttattacaatatttctgtggccaaggcagagctgctgaacaaactgaaagaccaacctgagatggcagagattggcctaggagaggaggaagttgaccatgaactggctcaaaaaaagatacagcttatcgaaagcatcagcagaaaactttctgtcttgcgggaggcccagcgagggctgctagaggacatcaatgccaattctgcccttggggaggaggtggaggccaacttaaaagccgtctgcaaatccaatgaatttgaaaagtaccacttgtttgttggggacctggacaaagtggtcaacctgttgctgtcactctctggacgactggcccgggtggagaatgctctgaacagcatcgattcagaggccaaccaggagaagttggtactgatagagaagaagcagcagctgacggggcagttggcagatgccaaggagctgaaggagcacgtggaccgccgggagaagttggtgtttggcatggtctcccgctacctgcctcaggaccagctccaagattaccagcactttgtcaagatgaaatctgctctcatcattgaacagcgagagctggaggagaagatcaagctcggggaagagcaactcaaatgtctcagggagagtctactcctggggcccagcaatttctaattctaccagcactctgccacagcatccctgcccagccatgtgggaagtgctttcaatcttctttgttagcagtttctcagcaagtagatagcaattagcagtttgttccagccctctaccctggatgtctctcactaccccttccctagcagtggtcctaaccagctaggagaccctggggaagccacaagcttctacccaagggagctgcagcaaggtgtgatcttagaaccacactctccttcccacagttgccaagggcaagtacttgctgcacagagaaccaaggaagtgccttcattctgctttgtactaggacaccaaagacatcaagtactcatcacccacccatatcatcaacagcctctaaaggctcagagggaatctgccttgcagctctactctgccccagggcttgtggccagccatttctcacagagagctggctgccttgagggcattcacctggcaccagtttcagggcctcacccaagctttgcaggggaaagcacagagggaggaattacactgaaaaaaatgcaagcaaaggttgagtacccccaggtgccccttaggaaggaaccaggtttaaataggctctacccttacctttcccagcagcaagttcaggggaagaggcctactcttagccctggctagtgtgaccctcttcctgtcctaagactttggtcctaccacctcttgtttcatctttcctttacattgctgggggttaccgcaggtgcctaccccagggcttcaccatatgggccattaatagctctactaaaactgacttctagatgtaggtttcattattgggggagggggttcttattgttatattttaaatggccttttgattttatttatttttatgttttgattatttttttcttttttaactaataaggcgagaagagggaagttggagagggaaaagttagcccagaaggaaagcattttctgcagatcagcctgaatccaccgtggctaggtaagcaagtgccaaggcgttgaattgttcccaccatagctaccgatgtctaggaaggagttttccccttgaactcagagcctccctactgtggcctggccttgtgcttcccttaaagtctaagtgacttgagtttagcattccccagcagggtttaagtttttcttactgatttctttttgaaaccaaagaaatctcctgaaatggagaaaggttcagtcatttctctaccatctccaagctatgggatcagtagaggtgagctcagaaggaactcctctaaccattgctttctcagcctgtggcctggctcaagggaaccaaaactcaaggtagctgggagctccagccagagccagctccccagagcaattgaagacccagccaggatcttaggcatacaaacaactaaaactgctgctgttgccaaggccctgacaccagtagctagtttctatgctggaaaagcagccctcaggtggacgatggcaagaagggggttatggccaaatgctgccctgttatccagcttagctccctgttcctcactaactggggccaatccttggtatcacacaacccagccaaggcctggcatctcttctagttactgctgagttcctcagggtccttgaaggtcaactgtagcagcagggatgtctcattcaaccaaagaatttgccaaggaacttttgctgctgttacaaatacttgtcactagcttccatttcctcttcattgtatttgaaaacaatgggagaatcttggccagcagggtgtcctggggtagggggtggggtaagcctttctgtggagctctgggtttgctcttagtactgctgccagaaacactgttagaatggcaaccctgccattctcccctccagtggaagattctactttattcaggaaggctggtggcttgcaggggctaggcttacacaagccagccaagattgagaaggtaggggagtgctttcaatggaggccatagttgtcatcttttcttctgagcaggctctaggacaaacaatgagcaaattgagatgtcctgtattgggaggatgaggctgatatgtttcatcattctcagaatttgtgggctagagcacctttttgggaatatgggcctagggaaaagaacggtcacttacctggacactatggccatagtcttgagtttttctagtcagcatgtgattggttgtaccttaagtttatgacaccaaaaatactattaactctgttatttttgttcttaatcccatctcaaattagtttctagagttagaatcagaacacaaggatgctcattttcacatggagggaaagttgccaaagcatttaaaaaataaccccaaaagtatatctagcagtgaagcttggtagataaaggtgaactgctaaacagacactggcgtgccacactcctgccagggcagtctcattgtgtgtgacggtgctgcaacactgccagtattacttgagatgcagtctctctcccctgttctcagttcctgggctcagccctcctccaaggcctgccagtgagtagcagtttggaaggcaggccaagggagatccccaaagacagttatcagtcttaacttctgctgtctcccgtcaaatacttatacaggcccccatgggtaataggcaagcatgatggctgatagagaagtcagtgcatgagttactatcacatgtccccccaacccctcctgccacctcccagggctctggataattgaatcttcctgagtcccacagctggagactcaaccaggatatagctgtaaatgcccaagtagaatctgacagaataagacagagacactgaaaataaagccctagaaaggaagaaattggaagcaaagaaaaggagaggtgaaaagataaaaagcctccttcaaggttaggttcaggttctgttttccatttaacctcatgtgccataaagctgcccaggcacaccagagccacatcctgaacccgaccctccctgacagtgctgctctgccagtagcaagccccagatggaggaagctgggcccatttctggccacttccacccatttggagctttgccagaggagtcgtctatgccaataatatttctgcaacagcatattatattatttgaagattagtagatctttttgggggggtggggcaggggacagtttctatagatgaagaaccagtgttggttgtacagctgttgggggtcatctatcccatgtgaagctattctttttccaaatcttgttgtttctgcatttgtgtcctccaccactcccttcttggctgacatagatatgcctgccagattgtcatcaagggtcatatttcaataaaaggtgctaaggacaaaaaaaaatctcatgtgttttaactcaggtgatggaagtctaaagattctgctgaaaagtactggaaaggaatttggtcacctatccatagtccttcacagataaacatatgaccagacccttacccacatccctaaacccttaccctggcctctgagggatggtattgatgctataccattcatcatccccagttaaatagcaggatctgccatagcctttttaggggaacagcttttagacatctatttcaagaccatcctgagtagggggtacagagtttaagccattggttatttctgttgttatcacagtattgaagcatggtatttttctactcagaaggatctcaggatcacagccctgccctttagctcactgatatatttcttcctctctggttactcagtggcaacatcacatccagtctaaccccatgtttagaatgcagaaaaagtcaacaataggtgtaatctcaggtatagacctaagcagtatacagagtctagttctggagtctagcctgatcgaaggtaagccattctttctagacttcttccaatcttgaattctgtctagtattttcatcttacttctagctgatagtccaatctcacaccttcatgctcagctccctggaaagcaagggccttggtgatctgctctccaaggcaacctcaaagattagactcaaatgtattccaggaagcaactctgacattgaaaagctttcttttttcgtgatccatattctgttcacattccaactatcctccttctactcaagatatccattgtggtagagtagaaagagtccagctttggcattagaatgaactgtgttcaaatcctggttctgccacttattcaatgaacctgggctactagctcaacttctgaggtcattttcttatctgtaaaatgggaacagtattatcttgcttgcagttattgtaacttgaaaataataaataaaagccactaacaatccaagaagttattaggcagaatcccaggcccaccccaaacccagtgatagcagtctgaattttaactagatttccaggagattcatgaacatattacagcatgggaagtactgacttgttgaaaacatattcagtacatggtaaccattattatagtcctgatctactcaattcattttttccttatcccaggcatattcttgctcttctcgtgttgctcacaactacctgcctggatgaatttaggaaagttgcaggatacaaggttaaaacacaagatcaaatgaacaatccgaaaatgttattaagaaaacagttccggccgggcatggtggctcacgcctgaaatcccagcactttgggaggccgaggcaggtggatcacgaggtcaggagatcaagaccatcctggctaacacggtgaaaccctatctctactaaaaatacaaaaaattagccaggtgtggtggcacgcaccagtagtcccagctactcgggaggctgaggcaggagaattgcttgaacctggaaggcagagattgcagtgagctgagaccacaccactgcactccatcctgggcaacagagtgagactttgtctcaaaaagaaagaaagaaagaaagaaagaaagaaagaaagaaaagaaagaaagaaagaaagaaagaaaacagttccatttacaatagcatc

SEQ ID NO: 181290 - DNA, 8919 bp, Homo sapiens
  Payload ID: 15708
  Gene Symbol: SHROOM4
  Gene Name: shroom family member 4
  Uniprot ID: Q9ULL8
  ENST ID: ENST00000460112
  CDS Start-End: 456-4589
ctttcatccttccctttgccaccagggtgctggctggttcctggagcagcgtcttcactcctatccagctcttgacactggctttcgttccctaaggctgtggccatatctaggtccatccaggctgatggtcataccttgccttcagtgctactccttcctgttcttagaactggaacctgactgtgcctgagccccttggatcacactcagcatcttgggctgatggtccctcgccccagaaggtcttaactggagggcagatgggtcccagctaagggaggacgctggctggagggtttgtcaacgagagtctgagctagccggataccccgctctctcccaagccatctctccaccctgggcaacttccatggaggaacgcccctgtcagtaggccgcactcatggcatgtggccaagctgctggagggatgccctgaagcagccaccaccatgcatttcccttctgaagccttcagcttgtcctggcattctggctgcaacacaagtgacgtgtgtgtgcagtggtgtccactctcccggcattgcagcaccgagaaaagcagctccattggcagcatggagagcctggagcaaccaggccaagccacctatgagagccatctgttgcctattgaccagaacatgtaccctaaccagcgtgactcagcctacagctccttctcggccagctcaaatgcttctgactgtgccctttccctcaggccagaggagccagcctctacagactgcatcatgcaaggcccagggccaactaaggcccccagtggccggcctaatgtggctgagacctcaggaggtagtcggcgcaccaatgggggccacctgacccccagctctcagatgtcatcccgtccacaggagggataccagtcagggcccgccaaagcagtcaggggcccaccacaacctccagtgaggcgggacagccttcaggcctccagagcccaactcctcaatggagagcagcgcagggcatctgagcctgtggtccccttgccacagaaggagaaactgagcttagagcctgtgctacccgcaaggaaccctaataggttctgttgcctcagtgggcatgaccaagtgacaagtgagggccatcagaactgtgagttcagtcagcctcctgaatccagccaacagggctctgagcatctactgatgcaggcctcaaccaaagctgttggatccccaaaagcctgtgacagagcttccagcgtggattccaacccactcaatgaggcttctgcagagctagctaaggcttcttttggcagacctccacatctcataggacccacagggcatcgccatagtgcccctgaacagctgctggcatcccacctgcagcatgtgcaccttgataccaggggcagcaaagggatggagctcccacccgtacaggatgggcaccagtggactctgtcccctttgcacagcagccacaaagggaagaaaagtccatgcccccctacaggaggaacccatgaccagtccagcaaagaaagaaagaccagacaagtggatgacaggtctttagttttgggacaccagagccaaagcagtcccccacatggagaggctgatggacacccctcagaaaaaggtttcctggacccaaacagaacaagcagagcagccagtgaattggccaaccagcaaccctctgcctctggctcccttgttcaacaagccacggactgttcttcaaccactaaagcagctagtggcacagaggcaggtgaagaaggggacagcgagcccaaggagtgcagccggatgggtggtaggcgaagtggagggacccggggccgctcgatccaaaaccggcggaagagtgagcgttttgctaccaatctgcgtaatgaaattcagaggaggaaggcccagctccagaaaagcaagggtcccttgtcacagctgtgtgacactaaggagccagtggaagagacccaggagcccccagaaagtcctccactcactgcctctaacacatctcttctatcttcatgtaaaaaacctcccagccccagagacaagctcttcaacaaaagcatgatgctcagagctaggtcttccgagtgcctcagccaagcccctgagagccatgaatctaggacaggcttagagggacgaataagccctggccagaggcctggccagtcctctttgggcctgaacacctggtggaaagcacctgacccatcctcctcagaccctgagaaagcacatgctcactgtggagtccgtggaggtcattggagatggtctccagagcataattcacagccacttgtggcagcagccatggaaggcccttccaacccaggtgacaacaaggaattgaaggcttctactgctcaagctggggaggatgccatcctcttgccttttgcagacagaagaaagttctttgaagagagtagcaaatccttatctacatctcatttgccaggtttaaccactcatagcaacaagacttttacccagagaccaaaacctatagaccaaaacttccagccaatgagctccagctgtagggaattgaggcgccatcccatggaccaatcatatcattccgcagaccaaccatatcatgccacagaccaatcatatcattccatgtcaccccttcagtcagaaactcccacttactcagaatgttttgcaagcaaaggtctagaaaattccatgtgttgtaagccactacactgtggtgattttgattaccacaggacctgctcttactcctgcagtgttcaaggagctctagtccatgatccttgcatttattgttctggggaaatctgccctgccttgctaaagagaaatatgatgccaaattgctacaactgccggtgccaccaccaccaatgcattcggtgttcagtttgctatcataatcctcagcacagtgccctcgaggacagcagcttggcacctggcaacacttggaaacccaggaagctgacagtgcaggaatttcctggggacaaatggaatccaataacaggaaacaggaagaccagccagtcagggagggaaatggctcattccaagactagcttttcatgggcaacccctttccatccttgccttgagaacccagcactggacttgtcaagctaccgagcaatttcttctcttgacctccttggagacttcaaacatgctttgaaaaaatcagaggaaacttcagtttatgaggaggggagctcccttgcctccatgccccacccactgcgcagccgtgccttctcagagagtcacatcagcttggcgccccaaagcacccgggcctgggggcagcataggagggagctctttagcaaaggtgatgagacccagtcggatcttctcggagccaggaagaaggcctttcctcctcctcgccctcctcctcccaactgggagaagtacaggctctttcgtgcagcccagcagcagaagcagcaacagcagcagcagaagcaacaggaggaggaggaggaggaggaagaagaagaagaagaggaagaggaagaggaggaggaggaggcagaggaggaggaagaggagctgccaccccagtatttcagttcagaaacctctggttcctgtgctctcaatcctgaggaggtcctagagcagccacaacccctcagctttggccacctggagggctcgagacagggttcacaaagtgtcccagcagagcaagaatcctttgcactccattccagtgatttcttgcctccaataaggggtcacttgggatctcaacctgagcaggctcagcccccttgctactatggcattggtgggctttggaggacatcgggacaggaagccactgaatccgccaaacaagagtttcagcacttttcgcctccttcaggggccccaggaatccctacctcttactcagcttattacaatatttctgtggccaaggcagagctgctgaacaaactgaaagaccaacctgagatggcagagattggcctaggagaggaggaagttgaccatgaactggctcaaaaaaagatacagcttatcgaaagcatcagcagaaaactttctgtcttgcgggaggcccagcgagggctgctagaggacatcaatgccaattctgcccttggggaggaggtggaggccaacttaaaagccgtctgcaaatccaatgaatttgaaaagtaccacttgtttgttggggacctggacaaagtggtcaacctgttgctgtcactctctggacgactggcccgggtggagaatgctctgaacagcatcgattcagaggccaaccaggagaagttggtactgatagagaagaagcagcagctgacggggcagttggcagatgccaaggagctgaaggagcacgtggaccgccgggagaagttggtgtttggcatggtctcccgctacctgcctcaggaccagctccaagattaccagcactttgtcaagatgaaatctgctctcatcattgaacagcgagagctggaggagaagatcaagctcggggaagagcaactcaaatgtctcagggagagtctactcctggggcccagcaatttctaattctaccagcactctgccacagcatccctgcccagccatgtgggaagtgctttcaatcttctttgttagcagtttctcagcaagtagatagcaattagcagtttgttccagccctctaccctggatgtctctcactaccccttccctagcagtggtcctaaccagctaggagaccctggggaagccacaagcttctacccaagggagctgcagcaaggtgtgatcttagaaccacactctccttcccacagttgccaagggcaagtacttgctgcacagagaaccaaggaagtgccttcattctgctttgtactaggacaccaaagacatcaagtactcatcacccacccatatcatcaacagcctctaaaggctcagagggaatctgccttgcagctctactctgccccagggcttgtggccagccatttctcacagagagctggctgccttgagggcattcacctggcaccagtttcagggcctcacccaagctttgcaggggaaagcacagagggaggaattacactgaaaaaaatgcaagcaaaggttgagtacccccaggtgccccttaggaaggaaccaggtttaaataggctctacccttacctttcccagcagcaagttcaggggaagaggcctactcttagccctggctagtgtgaccctcttcctgtcctaagactttggtcctaccacctcttgtttcatctttcctttacattgctgggggttaccgcaggtgcctaccccagggcttcaccatatgggccattaatagctctactaaaactgacttctagatgtaggtttcattattgggggagggggttcttattgttatattttaaatggccttttgattttatttatttttatgttttgattatttttttcttttttaactaataaggcgagaagagggaagttggagagggaaaagttagcccagaaggaaagcattttctgcagatcagcctgaatccaccgtggctaggtaagcaagtgccaaggcgttgaattgttcccaccatagctaccgatgtctaggaaggagttttccccttgaactcagagcctccctactgtggcctggccttgtgcttcccttaaagtctaagtgacttgagtttagcattccccagcagggtttaagtttttcttactgatttctttttgaaaccaaagaaatctcctgaaatggagaaaggttcagtcatttctctaccatctccaagctatgggatcagtagaggtgagctcagaaggaactcctctaaccattgctttctcagcctgtggcctggctcaagggaaccaaaactcaaggtagctgggagctccagccagagccagctccccagagcaattgaagacccagccaggatcttaggcatacaaacaactaaaactgctgctgttgccaaggccctgacaccagtagctagtttctatgctggaaaagcagccctcaggtggacgatggcaagaagggggttatggccaaatgctgccctgttatccagcttagctccctgttcctcactaactggggccaatccttggtatcacacaacccagccaaggcctggcatctcttctagttactgctgagttcctcagggtccttgaaggtcaactgtagcagcagggatgtctcattcaaccaaagaatttgccaaggaacttttgctgctgttacaaatacttgtcactagcttccatttcctcttcattgtatttgaaaacaatgggagaatcttggccagcagggtgtcctggggtagggggtggggtaagcctttctgtggagctctgggtttgctcttagtactgctgccagaaacactgttagaatggcaaccctgccattctcccctccagtggaagattctactttattcaggaaggctggtggcttgcaggggctaggcttacacaagccagccaagattgagaaggtaggggagtgctttcaatggaggccatagttgtcatcttttcttctgagcaggctctaggacaaacaatgagcaaattgagatgtcctgtattgggaggatgaggctgatatgtttcatcattctcagaatttgtgggctagagcacctttttgggaatatgggcctagggaaaagaacggtcacttacctggacactatggccatagtcttgagtttttctagtcagcatgtgattggttgtaccttaagtttatgacaccaaaaatactattaactctgttatttttgttcttaatcccatctcaaattagtttctagagttagaatcagaacacaaggatgctcattttcacatggagggaaagttgccaaagcatttaaaaaataaccccaaaagtatatctagcagtgaagcttggtagataaaggtgaactgctaaacagacactggcgtgccacactcctgccagggcagtctcattgtgtgtgacggtgctgcaacactgccagtattacttgagatgcagtctctctcccctgttctcagttcctgggctcagccctcctccaaggcctgccagtgagtagcagtttggaaggcaggccaagggagatccccaaagacagttatcagtcttaacttctgctgtctcccgtcaaatacttatacaggcccccatgggtaataggcaagcatgatggctgatagagaagtcagtgcatgagttactatcacatgtccccccaacccctcctgccacctcccagggctctggataattgaatcttcctgagtcccacagctggagactcaaccaggatatagctgtaaatgcccaagtagaatctgacagaataagacagagacactgaaaataaagccctagaaaggaagaaattggaagcaaagaaaaggagaggtgaaaagataaaaagcctccttcaaggttaggttcaggttctgttttccatttaacctcatgtgccataaagctgcccaggcacaccagagccacatcctgaacccgaccctccctgacagtgctgctctgccagtagcaagccccagatggaggaagctgggcccatttctggccacttccacccatttggagctttgccagaggagtcgtctatgccaataatatttctgcaacagcatattatattatttgaagattagtagatctttttgggggggtggggcaggggacagtttctatagatgaagaaccagtgttggttgtacagctgttgggggtcatctatcccatgtgaagctattctttttccaaatcttgttgtttctgcatttgtgtcctccaccactcccttcttggctgacatagatatgcctgccagattgtcatcaagggtcatatttcaataaaaggtgctaaggacaaaaaaaaatctcatgtgttttaactcaggtgatggaagtctaaagattctgctgaaaagtactggaaaggaatttggtcacctatccatagtccttcacagataaacatatgaccagacccttacccacatccctaaacccttaccctggcctctgagggatggtattgatgctataccattcatcatccccagttaaatagcaggatctgccatagcctttttaggggaacagcttttagacatctatttcaagaccatcctgagtagggggtacagagtttaagccattggttatttctgttgttatcacagtattgaagcatggtatttttctactcagaaggatctcaggatcacagccctgccctttagctcactgatatatttcttcctctctggttactcagtggcaacatcacatccagtctaaccccatgtttagaatgcagaaaaagtcaacaataggtgtaatctcaggtatagacctaagcagtatacagagtctagttctggagtctagcctgatcgaaggtaagccattctttctagacttcttccaatcttgaattctgtctagtattttcatcttacttctagctgatagtccaatctcacaccttcatgctcagctccctggaaagcaagggccttggtgatctgctctccaaggcaacctcaaagattagactcaaatgtattccaggaagcaactctgacattgaaaagctttcttttttcgtgatccatattctgttcacattccaactatcctccttctactcaagatatccattgtggtagagtagaaagagtccagctttggcattagaatgaactgtgttcaaatcctggttctgccacttattcaatgaacctgggctactagctcaacttctgaggtcattttcttatctgtaaaatgggaacagtattatcttgcttgcagttattgtaacttg

SEQ ID NO: 181291 - DNA, 2338 bp, Homo sapiens
  Payload ID: 15709
  Gene Symbol: SGOL1
  Gene Name: shugoshin-like 1 (S. pombe)
  Uniprot ID: Q5FBB7
  ENST ID: ENST00000263753
  CDS Start-End: 141-1826
agttccaggcgacggcggacggtggtacggtcctggagggcccagtgcgcggggctagccgtggctggagagcttcgaagagccttgaaatgtgaggaggaggaagatagctgttgcagaagtagtggccaaggcaaaagatggccaaggaaagatgcctgaaaaagtcctttcaagatagtcttgaagacataaagaagcgaatgaaagagaaaaggaataaaaacttggcagagattggcaaacgcaggtcttttatagctgcaccatgccaaataatcaccaacacttctacactgctgaaaaattaccaagacaacaacaaaatgttagttttagctttggaaaatgaaaaatccaaagtgaaagaagcccaagatatcatcctacagctgagaaaagaatgttactatctcacatgtcagctatatgcattgaaaggaaaacttacatcacaacaaacagtagaacctgctcagaaccaggaaatatgttcctctggaatggaccccaatagtgatgacagctccagaaatttatttgtgaaggatttaccgcaaattcctcttgaagaaactgaacttccaggacaaggagaatcatttcaaatagaagatcagatacctactattcctcaagacacactgggagttgattttgattcaggtgaagctaagtctactgataatgtcttacctagaactgtatctgttcgtagcagtttaaagaaacattgtaacagtatatgtcagtttgatagcttggatgattttgaaaccagtcatttggcagggaagtcttttgaattcgaaagagttggatttttagacccactagtaaacatgcacatacctgaaaatgtacaacacaatgcttgtcaatggagcaaggaccaagttaacttatcaccaaagctgattcagccaggaacgtttactaaaacaaaagaagacattttagaatctaaatctgaacaaactaaaagtaagcaaagagatacacaagaaagaaaaagagaagagaaaagaaaagctaacaggagaaaatcaaaacgtatgtcaaaatataaagagaataaaagcgaaaataaaaaaactgttccccaaaaaaaaatgcacaaatctgtcagttccaatgatgcttacaattttaatttggaagagggtgttcatcttactcctttccgacaaaaagtgagcaatgactctaatagagaagaaaacaacgagtctgaagtgagcctctgtgaatcaagtggttcaggagatgattccgatgacctctatttgcccacttgcaagtacattcagaatcccacgagcaattcagatagaccagtcaccaggcctctagctaaaagagcactgaaatacacagatgaaaaagagacggagggttctaagccaacaaaaactcctaccactacaccacctgaaactcagcagtcacctcatcttagcctgaaggatatcaccaatgtctccttgtatcctgttgtgaaaatcagaagactttctctttctccaaaaaagaataaagcaagcccagcagtggctctgcctaaacgtaggtgcacagccagcgtgaactataaggagcccaccctcgcttcgaaactgagaagaggggacccttttacagatttgtgttttttgaattctcctattttcaagcagaaaaaggatttgagacgttctaaaaaaagagccctggaggtatcacctgccaaagaagcaatttttattttatattatgttcgagaatttgtttcgagattcccagactgtaggaaatgtaaacttgaaacccacatctgcttgaggtaaagtccacgggcttcacatccttagaaaacttttttagtccatgcattcactaatgtatgcagacctttaatagattctagctttatgtgttgggggagagatggaggggtgttgacagtctgtttcactcagcctacatacataataaaatctaagccctttaattagagatagcaactttcccagggtgaccgaggaatcagtacgtgttgaacccctcttttaagtttccttttggttgtgtcacttggagattgccttttctttcttgtaagctcagctgtgtcctcaaatatattgcattttacccagcatttccaggtgttttcaggggtcaaagtttttaagttatcttagtctttgatattgtgtaagcgaaattctccaatcccatctcctagatgatttttttttaaatcacaaaatgtgattatgcttaacagctgtttcctgtttctcttaaaataaaatccatttcctatttctcttaaaataaaatccattattcttaa

SEQ ID NO: 181292 - DNA, 1531 bp, Homo sapiens
  Payload ID: 15709
  Gene Symbol: SGOL1
  Gene Name: shugoshin-like 1 (S. pombe)
  Uniprot ID: Q5FBB7
  ENST ID: ENST00000306698
  CDS Start-End: 141-1019
agttccaggcgacggcggacggtggtacggtcctggagggcccagtgcgcggggctagccgtggctggagagcttcgaagagccttgaaatgtgaggaggaggaagatagctgttgcagaagtagtggccaaggcaaaagatggccaaggaaagatgcctgaaaaagtcctttcaagatagtcttgaagacataaagaagcgaatgaaagagaaaaggaataaaaacttggcagagattggcaaacgcaggtcttttatagctgcaccatgccaaataatcaccaacacttctacactgctgaaaaattaccaagacaacaacaaaatgttagttttagctttggaaaatgaaaaatccaaagtgaaagaagcccaagatatcatcctacagctgagaaaagaatgttactatctcacatgtcagctatatgcattgaaaggaaaacttacatcacaacaaacagtagaacctgctcagaaccaggaaatatgttcctctggaatggaccccaatagtgatgacagctccagaaatttatttgtgaaggatttaccgcaaattcctcttgaagaaactgaacttccaggacaaggagaatcatttcaaatagaagctacaccacctgaaactcagcagtcacctcatcttagcctgaaggatatcaccaatgtctccttgtatcctgttgtgaaaatcagaagactttctctttctccaaaaaagaataaagcaagcccagcagtggctctgcctaaacgtaggtgcacagccagcgtgaactataaggagcccaccctcgcttcgaaactgagaagaggggacccttttacagatttgtgttttttgaattctcctattttcaagcagaaaaaggatttgagacgttctaaaaaaagagccctggaggtatcacctgccaaagaagcaatttttattttatattatgttcgagaatttgtttcgagattcccagactgtaggaaatgtaaacttgaaacccacatctgcttgaggtaaagtccacgggcttcacatccttagaaaacttttttagtccatgcattcactaatgtatgcagacctttaatagattctagctttatgtgttgggggagagatggaggggtgttgacagtctgtttcactcagcctacatacataataaaatctaagccctttaattagagatagcaactttcccagggtgaccgaggaatcagtacgtgttgaacccctcttttaagtttccttttggttgtgtcacttggagattgccttttctttcttgtaagctcagctgtgtcctcaaatatattgcattttacccagcatttccaggtgttttcaggggtcaaagtttttaagttatcttagtctttgatattgtgtaagcgaaattctccaatcccatctcctagatgatttttttttaaatcacaaaatgtgattatgcttaacagctgtttcctgtttctcttaaaataaaatccatttcctatttctcttaaaataaaatccattattcttaa

SEQ ID NO: 181293 - DNA, 1187 bp, Homo sapiens
  Payload ID: 15709
  Gene Symbol: SGOL1
  Gene Name: shugoshin-like 1 (S. pombe)
  Uniprot ID: Q5FBB7
  ENST ID: ENST00000437051
  CDS Start-End: 141-968
agttccaggcgacggcggacggtggtacggtcctggagggcccagtgcgcggggctagccgtggctggagagcttcgaagagccttgaaatgtgaggaggaggaagatagctgttgcagaagtagtggccaaggcaaaagatggccaaggaaagatgcctgaaaaagtcctttcaagatagtcttgaagacataaagaagcgaatgaaagagaaaaggaataaaaacttggcagagattggcaaacgcaggtcttttatagctgcaccatgccaaataatcaccaacacttctacactgctgaaaaattaccaagacaacaacaaaatgttagttttagctttggaaaatgaaaaatccaaagtgaaagaagcccaagatatcatcctacagctgagaaaagaatgttactatctcacatgtcagctatatgcattgaaaggaaaacttacatcacaacaaacagtagaacctgctcagaaccaggaaatatgttcctctggaatggaccccaatagtgatgacagctccagaaatttatttgtgaaggatttaccgcaaattcctcttgaagaaactgaacttccaggacaaggagaatcatttcaaatagaagatcagatacctactattcctcaagacacactgggagttgattttgattcagctacaccacctgaaactcagcagtcacctcatcttagcctgaaggatatcaccaatgtctccttgtatcctgttgtgaaaatcagaagactttctctttctccaaaaaagaataaagcaagcccagcagtggctctgcctaaacgtaggtgcacagccagcgtgaactataaggagcccaccctcgcttcgaaactgagaagaggggacccttttacagatttgtgttttttgaattctcctattttcaagcagaaaaaggatttgagacgttctaaaaaaagtatgaaacaaatacaatgaaggttttgttggatattgtttaaattcaatctacacctctttctgttgcttcaggagaggatctgtaagagtacacaaacagagtgagccattgccatagaatattctcttgacaggaccctagctcataaacatttcttcagaactatacttcaaatgggatgctttgtattaaaactttaataaatttaatttattttttcttttgaatataaataa

SEQ ID NO: 181294 - DNA, 1075 bp, Homo sapiens
  Payload ID: 15709
  Gene Symbol: SGOL1
  Gene Name: shugoshin-like 1 (S. pombe)
  Uniprot ID: Q5FBB7
  ENST ID: ENST00000417364
  CDS Start-End: 188-1015
ctggagagcttcgaagagccttgaaatgtgaggaggaggaagatagctgttgcagaagtagtggccaaggtatcgttctggacgcgcctgcggcaggagggtcgccgcgtccacttccgccagccccacctccccccggccttcctggagtccctgaaagaggaagaagtaggttttaaggcaaaagatggccaaggaaagatgcctgaaaaagtcctttcaagatagtcttgaagacataaagaagcgaatgaaagagaaaaggaataaaaacttggcagagattggcaaacgcaggtcttttatagctgcaccatgccaaataatcaccaacacttctacactgctgaaaaattaccaagacaacaacaaaatgttagttttagctttggaaaatgaaaaatccaaagtgaaagaagcccaagatatcatcctacagctgagaaaagaatgttactatctcacatgtcagctatatgcattgaaaggaaaacttacatcacaacaaacagtagaacctgctcagaaccaggaaatatgttcctctggaatggaccccaatagtgatgacagctccagaaatttatttgtgaaggatttaccgcaaattcctcttgaagaaactgaacttccaggacaaggagaatcatttcaaatagaagatcagatacctactattcctcaagacacactgggagttgattttgattcagctacaccacctgaaactcagcagtcacctcatcttagcctgaaggatatcaccaatgtctccttgtatcctgttgtgaaaatcagaagactttctctttctccaaaaaagaataaagcaagcccagcagtggctctgcctaaacgtaggtgcacagccagcgtgaactataaggagcccaccctcgcttcgaaactgagaagaggggacccttttacagatttgtgttttttgaattctcctattttcaagcagaaaaaggatttgagacgttctaaaaaaagtatgaaacaaatacaatgaaggttttgttggatattgtttaaattcaatctacacctctttctgttgcttcaggagagg

SEQ ID NO: 181295 - DNA, 1582 bp, Homo sapiens
  Payload ID: 15709
  Gene Symbol: SGOL1
  Gene Name: shugoshin-like 1 (S. pombe)
  Uniprot ID: Q5FBB7
  ENST ID: ENST00000419233
  CDS Start-End: 141-1070
agttccaggcgacggcggacggtggtacggtcctggagggcccagtgcgcggggctagccgtggctggagagcttcgaagagccttgaaatgtgaggaggaggaagatagctgttgcagaagtagtggccaaggcaaaagatggccaaggaaagatgcctgaaaaagtcctttcaagatagtcttgaagacataaagaagcgaatgaaagagaaaaggaataaaaacttggcagagattggcaaacgcaggtcttttatagctgcaccatgccaaataatcaccaacacttctacactgctgaaaaattaccaagacaacaacaaaatgttagttttagctttggaaaatgaaaaatccaaagtgaaagaagcccaagatatcatcctacagctgagaaaagaatgttactatctcacatgtcagctatatgcattgaaaggaaaacttacatcacaacaaacagtagaacctgctcagaaccaggaaatatgttcctctggaatggaccccaatagtgatgacagctccagaaatttatttgtgaaggatttaccgcaaattcctcttgaagaaactgaacttccaggacaaggagaatcatttcaaatagaagatcagatacctactattcctcaagacacactgggagttgattttgattcagctacaccacctgaaactcagcagtcacctcatcttagcctgaaggatatcaccaatgtctccttgtatcctgttgtgaaaatcagaagactttctctttctccaaaaaagaataaagcaagcccagcagtggctctgcctaaacgtaggtgcacagccagcgtgaactataaggagcccaccctcgcttcgaaactgagaagaggggacccttttacagatttgtgttttttgaattctcctattttcaagcagaaaaaggatttgagacgttctaaaaaaagagccctggaggtatcacctgccaaagaagcaatttttattttatattatgttcgagaatttgtttcgagattcccagactgtaggaaatgtaaacttgaaacccacatctgcttgaggtaaagtccacgggcttcacatccttagaaaacttttttagtccatgcattcactaatgtatgcagacctttaatagattctagctttatgtgttgggggagagatggaggggtgttgacagtctgtttcactcagcctacatacataataaaatctaagccctttaattagagatagcaactttcccagggtgaccgaggaatcagtacgtgttgaacccctcttttaagtttccttttggttgtgtcacttggagattgccttttctttcttgtaagctcagctgtgtcctcaaatatattgcattttacccagcatttccaggtgttttcaggggtcaaagtttttaagttatcttagtctttgatattgtgtaagcgaaattctccaatcccatctcctagatgatttttttttaaatcacaaaatgtgattatgcttaacagctgtttcctgtttctcttaaaataaaatccatttcctatttctcttaaaataaaatccattattcttaa

SEQ ID NO: 181296 - DNA, 2266 bp, Homo sapiens
  Payload ID: 15709
  Gene Symbol: SGOL1
  Gene Name: shugoshin-like 1 (S. pombe)
  Uniprot ID: Q5FBB7
  ENST ID: ENST00000442720
  CDS Start-End: 267-1043
gaatgtggcggcggtagttccaggcgacggcggacggtggtacggtcctggagggcccagtgcgcggggctagccgtggctggagagcttcgaagagccttgaaatgtgaggaggaggaagatagctgttgcagaagtagtggccaaggtatcgttctggacgcgcctgcggcaggagggtcgccgcgtccacttccgccagccccacctccccccggccttcctggagtccctgaaagaggaagaagtaggttttaaggcaaaagatggccaaggaaagatgcctgaaaaagtcctttcaagatagtcttgaagacataaagaagcgaatgaaagagaaaaggaataaaaacttggcagagattggcaaacgcaggtcttttatagctgcaccatgccaaataatcaccaacacttctacactgctgaaaaattaccaagacaacaacaaaatgttagttttagctttggaaaatgaaaaatccaaagtgaaagaagcccaagatatcatcctacagctgagaaaagaatgttactatctcacatgtcagctatatgcattgaaaggaaaacttacatcacaacaaacagtagaacctgctcagaaccaggaaatatgttcctctggaatggaccccaatagtgatgacagctccagaaatttatttgtgaaggatttaccgcaaattcctcttgaagaaactgaacttccaggacaaggagaatcatttcaaatagaagctacaccacctgaaactcagcagtcacctcatcttagcctgaaggatatcaccaatgtctccttgtatcctgttgtgaaaatcagaagactttctctttctccaaaaaagaataaagcaagcccagcagtggctctgcctaaacgtaggtgcacagccagcgtgaactataaggagcccaccctcgcttcgaaactgagaagaggggacccttttacagatttgtgttttttgaattctcctattttcaagcagaaaaaggatttgagacgttctaaaaaaagtatgaaacaaatacaatgaaggttttgttggatattgtttaaattcaatctacacctctttctgttgcttcaggagaggatctgtaagagtacacaaacagagtgagccattgccatagaatattctcttgacaggaccctagctcataaacatttcttcagaactatacttcaaatgggatgctttgtattaaaactttaataaatttaatttattttttcttttgaatataaataactgagcttaagcattatcatcatatcgatttcttatgctgcctaaacctcttaattttagtcgaaatatatctttttttttttttggaggcggaatttcattcttgttgcccaggctggagtgcaatggcacgatctcagcttaccgcaacctccgcctcccaggttcaagcgattctcctgcctcagactcccgagtagctgggactacaggcatgtgccactacgcccggctaattttgtatttttagtagagacagggtttctccatgttggtcaggttgctctcaaactcccaacctcaggtgatctgcccacctcggcctcccaaagtgctgggattactgagccactgtgcccagcccaaaatgtatcttatacaaacattgtagaaatgaataatgattactcaaataagatcttttaattataagcttctggcatctctatttttcccttaagtaggggatactaaagtgaatgattttctaagaggatcttttgaaactctttagtacaatatttgagtaaaataaattattgtggatcttttgaaactctgtgtagtattcgagtaaaataaatatttgacatttacagtagggtacaccctaagttgtttatgaattccttataccactgttatatttaatttttcagataaaatatgtatgggaaaatgactagagaaattgattcttttttaggctcagggacaagataagtgactaattgtgaaccccaagctctaattgtatgttcagagtgatgtctccataaaattacaaatgtcatgtactttcagggtagctccttatttagtcagaaatctcagagattaaatgtgtgaatatttagggtttttgcatatttttgaccaaccaatgaaagcgaattagttcagtttagaaagtttgatgtctatacttgtatatacctctttaaattttagaactttgtaggttattcatttttaaagagcaataaagtttgtataagatagtg

SEQ ID NO: 181297 - DNA, 663 bp, Homo sapiens
  Payload ID: 15709
  Gene Symbol: SGOL1
  Gene Name: shugoshin-like 1 (S. pombe)
  ENST ID: ENST00000456624
  CDS Start-End: 6-260
aaaagatggccaaggaaagatgcctgaaaaagtcctttcaagatagtcttgaagacataaagaagcgaatgaaagagaaaaggaataaaaacttggcagagattggcaaacgcaggtcttttatagctgcaccatgccaaataatcaccaacacttctacactgctgaaaaattaccaagacaacaacaaaataaccaggaaatatgttcctctggaatggaccccaatagtgatgacagctccagaaatttatttgtgaaggatttaccgcaaattcctcttgaagaaactgaacttccaggacaaggagaatcatttcaaatagaagatcagatacctactattcctcaagacacactgggagttgattttgattcaggtgaagctaagtctactgataatgtcttacctagaactgtatctgttcgtagcagtttaaagaaacattgtaacagtatatgtcagtttgatagcttggatgattttgaaaccagtcatttggcagggaagtcttttgaattcgaaagagttggatttttagacccactagtaaacatgcacatacctgaaaatgtacaacacaatgcttgtcaatggagcaaggaccaagttaacttatcaccaaagctgattcagccaggaacgtttactaaaacaaaaga

SEQ ID NO: 181298 - DNA, 2587 bp, Homo sapiens
  Payload ID: 15709
  Gene Symbol: SGOL1
  Gene Name: shugoshin-like 1 (S. pombe)
  Uniprot ID: Q5FBB7
  ENST ID: ENST00000412997
  CDS Start-End: 353-1936
tctgcctgcgacggtggtgttgggtgcatcctgcgccacgtgaccgcctcccagccaaccaatggaggagcgaggcggaaaatttcgaatgtggcggcggtagttccaggcgacggcggacggtggtacggtcctggagggcccagtgcgcggggctagccgtggctggagagcttcgaagagccttgaaatgtgaggaggaggaagatagctgttgcagaagtagtggccaaggtatcgttctggacgcgcctgcggcaggagggtcgccgcgtccacttccgccagccccacctccccccggccttcctggagtccctgaaagaggaagaagtaggttttaaggcaaaagatggccaaggaaagatgcctgaaaaagtcctttcaagatagtcttgaagacataaagaagcgaatgaaagagaaaaggaataaaaacttggcagagattggcaaacgcaggtcttttatagctgcaccatgccaaataatcaccaacacttctacactgctgaaaaattaccaagacaacaacaaaatgttagttttagctttggaaaatgaaaaatccaaagtgaaagaagcccaagatatcatcctacagctgagaaaagaatgttactatctcacatgtcagctatatgcattgaaaggaaaacttacatcacaacaaacagtagaacctgctcagaaccaggaaatatgttcctctggaatggaccccaatagtgatgacagctccagaaatttatttgtgaaggatttaccgcaaattcctcttgaagaaactgaacttccaggacaaggagaatcatttcaaatagaagatcagatacctactattcctcaagacacactgggagttgattttgattcaggtgaagctaagtctactgataatgtcttacctagaactgtatctgttcgtagcagtttaaagaaacattgtaacagtatatgtcagtttgatagcttggatgattttgaaaccagtcatttggcagggaagtcttttgaattcgaaagagttggatttttagacccactagtaaacatgcacatacctgaaaatgtacaacacaatgcttgtcaatggagcaaggaccaagttaacttatcaccaaagctgattcagccaggaacgtttactaaaacaaaagaagacattttagaatctaaatctgaacaaactaaaagtaagcaaagagatacacaagaaagaaaaagagaagagaaaagaaaagctaacaggagaaaatcaaaacgtatgtcaaaatataaagagaataaaagcgaaaataaaaaaactgttccccaaaaaaaaatgcacaaatctgtcagttccaatgatgcttacaattttaatttggaagagggtgttcatcttactcctttccgacaaaaagtgagcaatgactctaatagagaagaaaacaacgagtctgaagtgagcctctgtgaatcaagtggttcaggagatgattccgatgacctctatttgcccacttgcaagtacattcagaatcccacgagcaattcagatagaccagtcaccaggcctctagctaaaagagcactgaaatacacagatgaaaaagagacggagggttctaagccaacaaaaactcctaccactacaccacctgaaactcagcagtcacctcatcttagcctgaaggatatcaccaatgtctccttgtatcctgttgtgaaaatcagaagactttctctttctccaaaaaagaataaagcaagcccagcagtggctctgcctaaacgtaggtgcacagccagcgtgaactataaggagcccaccctcgcttcgaaactgagaagaggggacccttttacagatttgtgttttttgaattctcctattttcaagcagaaaaaggatttgagacgttctaaaaaaagtatgaaacaaatacaatgaaggttttgttggatattgtttaaattcaatctacacctctttctgttgcttcaggagaggatctgtaagagtacacaaacagagtgagccattgccatagaatattctcttgacaggaccctagctcataaacatttcttcagaactatacttcaaatgggatgctttgtattaaaactttaataaatttaatttattttttcttttgaatataaataactgagcttaagcattatcatcatatcgatttcttatgctgcctaaacctcttaattttagtcgaaatatatctttttttttttttggaggcggaatttcattcttgttgcccaggctggagtgcaatggcacgatctcagcttaccgcaacctccgcctcccaggttcaagcgattctcctgcctcagactcccgagtagctgggactacaggcatgtgccactacgcccggctaattttgtatttttagtagagacagggtttctccatgttggtcaggttgctctcaaactcccaacctcaggtgatctgcccacctcggcctcccaaagtgctgggattactgagccactgtgcccagcccaaaatgtatcttatacaaacattgtagaaatgaataatgattactcaaataagatcttttaattataa

SEQ ID NO: 181299 - DNA, 1162 bp, Homo sapiens
  Payload ID: 15709
  Gene Symbol: SGOL1
  Gene Name: shugoshin-like 1 (S. pombe)
  Uniprot ID: Q5FBB7
  ENST ID: ENST00000452020
  CDS Start-End: 188-1066
ctggagagcttcgaagagccttgaaatgtgaggaggaggaagatagctgttgcagaagtagtggccaaggtatcgttctggacgcgcctgcggcaggagggtcgccgcgtccacttccgccagccccacctccccccggccttcctggagtccctgaaagaggaagaagtaggttttaaggcaaaagatggccaaggaaagatgcctgaaaaagtcctttcaagatagtcttgaagacataaagaagcgaatgaaagagaaaaggaataaaaacttggcagagattggcaaacgcaggtcttttatagctgcaccatgccaaataatcaccaacacttctacactgctgaaaaattaccaagacaacaacaaaatgttagttttagctttggaaaatgaaaaatccaaagtgaaagaagcccaagatatcatcctacagctgagaaaagaatgttactatctcacatgtcagctatatgcattgaaaggaaaacttacatcacaacaaacagtagaacctgctcagaaccaggaaatatgttcctctggaatggaccccaatagtgatgacagctccagaaatttatttgtgaaggatttaccgcaaattcctcttgaagaaactgaacttccaggacaaggagaatcatttcaaatagaagctacaccacctgaaactcagcagtcacctcatcttagcctgaaggatatcaccaatgtctccttgtatcctgttgtgaaaatcagaagactttctctttctccaaaaaagaataaagcaagcccagcagtggctctgcctaaacgtaggtgcacagccagcgtgaactataaggagcccaccctcgcttcgaaactgagaagaggggacccttttacagatttgtgttttttgaattctcctattttcaagcagaaaaaggatttgagacgttctaaaaaaagagccctggaggtatcacctgccaaagaagcaatttttattttatattatgttcgagaatttgtttcgagattcccagactgtaggaaatgtaaacttgaaacccacatctgcttgaggtaaagtccacgggcttcacatccttagaaaacttttttagtccatgcattcactaatgtatgcagacctttaatagattctagctttatgtgttggggg

SEQ ID NO: 181300 - DNA, 931 bp, Homo sapiens
  Payload ID: 15709
  Gene Symbol: SGOL1
  Gene Name: shugoshin-like 1 (S. pombe)
  Uniprot ID: Q5FBB7
  ENST ID: ENST00000443724
  CDS Start-End: 188-835
ctggagagcttcgaagagccttgaaatgtgaggaggaggaagatagctgttgcagaagtagtggccaaggtatcgttctggacgcgcctgcggcaggagggtcgccgcgtccacttccgccagccccacctccccccggccttcctggagtccctgaaagaggaagaagtaggttttaaggcaaaagatggccaaggaaagatgcctgaaaaagtcctttcaagatagtcttgaagacataaagaagcgaatgaaagagaaaaggaataaaaacttggcagagattggcaaacgcaggtcttttatagctgcaccatgccaaataatcaccaacacttctacactgctgaaaaattaccaagacaacaacaaaatgttagttttagctttggaaaatgaaaaatccaaagtgaaagaagcccaagatatcatcctacagctgagaaaagaatgttactatctcacatgtcagctatatgcattgaaaggaaaacttacatcacaacaaacagtagaacctgctcagaaccaggaaatatgttcctctggaatggaccccaatagtgatgacagctccagaaatttatttgtgaaggatttaccgcaaattcctcttgaagaaactgaacttccaggacaaggagaatcatttcaaatagaagatcagatacctactattcctcaagacacactgggagttgattttgattcaggagccctggaggtatcacctgccaaagaagcaatttttattttatattatgttcgagaatttgtttcgagattcccagactgtaggaaatgtaaacttgaaacccacatctgcttgaggtaaagtccacgggcttcacatccttagaaaacttttttagtccatgcattcactaatgtatgcagacctttaatagattctagctttatgtgttggggg

SEQ ID NO: 181301 - DNA, 1969 bp, Homo sapiens
  Payload ID: 15709
  Gene Symbol: SGOL1
  Gene Name: shugoshin-like 1 (S. pombe)
  Uniprot ID: Q5FBB7
  ENST ID: ENST00000421451
  CDS Start-End: 188-1873
ctggagagcttcgaagagccttgaaatgtgaggaggaggaagatagctgttgcagaagtagtggccaaggtatcgttctggacgcgcctgcggcaggagggtcgccgcgtccacttccgccagccccacctccccccggccttcctggagtccctgaaagaggaagaagtaggttttaaggcaaaagatggccaaggaaagatgcctgaaaaagtcctttcaagatagtcttgaagacataaagaagcgaatgaaagagaaaaggaataaaaacttggcagagattggcaaacgcaggtcttttatagctgcaccatgccaaataatcaccaacacttctacactgctgaaaaattaccaagacaacaacaaaatgttagttttagctttggaaaatgaaaaatccaaagtgaaagaagcccaagatatcatcctacagctgagaaaagaatgttactatctcacatgtcagctatatgcattgaaaggaaaacttacatcacaacaaacagtagaacctgctcagaaccaggaaatatgttcctctggaatggaccccaatagtgatgacagctccagaaatttatttgtgaaggatttaccgcaaattcctcttgaagaaactgaacttccaggacaaggagaatcatttcaaatagaagatcagatacctactattcctcaagacacactgggagttgattttgattcaggtgaagctaagtctactgataatgtcttacctagaactgtatctgttcgtagcagtttaaagaaacattgtaacagtatatgtcagtttgatagcttggatgattttgaaaccagtcatttggcagggaagtcttttgaattcgaaagagttggatttttagacccactagtaaacatgcacatacctgaaaatgtacaacacaatgcttgtcaatggagcaaggaccaagttaacttatcaccaaagctgattcagccaggaacgtttactaaaacaaaagaagacattttagaatctaaatctgaacaaactaaaagtaagcaaagagatacacaagaaagaaaaagagaagagaaaagaaaagctaacaggagaaaatcaaaacgtatgtcaaaatataaagagaataaaagcgaaaataaaaaaactgttccccaaaaaaaaatgcacaaatctgtcagttccaatgatgcttacaattttaatttggaagagggtgttcatcttactcctttccgacaaaaagtgagcaatgactctaatagagaagaaaacaacgagtctgaagtgagcctctgtgaatcaagtggttcaggagatgattccgatgacctctatttgcccacttgcaagtacattcagaatcccacgagcaattcagatagaccagtcaccaggcctctagctaaaagagcactgaaatacacagatgaaaaagagacggagggttctaagccaacaaaaactcctaccactacaccacctgaaactcagcagtcacctcatcttagcctgaaggatatcaccaatgtctccttgtatcctgttgtgaaaatcagaagactttctctttctccaaaaaagaataaagcaagcccagcagtggctctgcctaaacgtaggtgcacagccagcgtgaactataaggagcccaccctcgcttcgaaactgagaagaggggacccttttacagatttgtgttttttgaattctcctattttcaagcagaaaaaggatttgagacgttctaaaaaaagagccctggaggtatcacctgccaaagaagcaatttttattttatattatgttcgagaatttgtttcgagattcccagactgtaggaaatgtaaacttgaaacccacatctgcttgaggtaaagtccacgggcttcacatccttagaaaacttttttagtccatgcattcactaatgtatgcagacctttaatagattctagctttatgtgttggggg

SEQ ID NO: 181302 - DNA, 1213 bp, Homo sapiens
  Payload ID: 15709
  Gene Symbol: SGOL1
  Gene Name: shugoshin-like 1 (S. pombe)
  Uniprot ID: Q5FBB7
  ENST ID: ENST00000425061
  CDS Start-End: 188-1117
ctggagagcttcgaagagccttgaaatgtgaggaggaggaagatagctgttgcagaagtagtggccaaggtatcgttctggacgcgcctgcggcaggagggtcgccgcgtccacttccgccagccccacctccccccggccttcctggagtccctgaaagaggaagaagtaggttttaaggcaaaagatggccaaggaaagatgcctgaaaaagtcctttcaagatagtcttgaagacataaagaagcgaatgaaagagaaaaggaataaaaacttggcagagattggcaaacgcaggtcttttatagctgcaccatgccaaataatcaccaacacttctacactgctgaaaaattaccaagacaacaacaaaatgttagttttagctttggaaaatgaaaaatccaaagtgaaagaagcccaagatatcatcctacagctgagaaaagaatgttactatctcacatgtcagctatatgcattgaaaggaaaacttacatcacaacaaacagtagaacctgctcagaaccaggaaatatgttcctctggaatggaccccaatagtgatgacagctccagaaatttatttgtgaaggatttaccgcaaattcctcttgaagaaactgaacttccaggacaaggagaatcatttcaaatagaagatcagatacctactattcctcaagacacactgggagttgattttgattcagctacaccacctgaaactcagcagtcacctcatcttagcctgaaggatatcaccaatgtctccttgtatcctgttgtgaaaatcagaagactttctctttctccaaaaaagaataaagcaagcccagcagtggctctgcctaaacgtaggtgcacagccagcgtgaactataaggagcccaccctcgcttcgaaactgagaagaggggacccttttacagatttgtgttttttgaattctcctattttcaagcagaaaaaggatttgagacgttctaaaaaaagagccctggaggtatcacctgccaaagaagcaatttttattttatattatgttcgagaatttgtttcgagattcccagactgtaggaaatgtaaacttgaaacccacatctgcttgaggtaaagtccacgggcttcacatccttagaaaacttttttagtccatgcattcactaatgtatgcagacctttaatagattctagctttatgtgttggggg

SEQ ID NO: 181303 - DNA, 4214 bp, Homo sapiens
  Payload ID: 15710
  Gene Symbol: SGOL2
  Gene Name: shugoshin-like 2 (S. pombe)
  Uniprot ID: Q562F6
  ENST ID: ENST00000357799
  CDS Start-End: 99-3896
aaccgccaacggctgtggcgtttaaacccaagccgcagccgctgctgctcgccgagctcccggagctgggtgggggtgccccacgctgaaagagagtgatggagtgcccagtgatggaaactggctcactttttacctcaggaattaagagacatttgaaagacaaaagaatttcaaagactactaagttgaatgtttctcttgcttcaaaaataaaaacaaaaatactaaataattcttctattttcaaaatatctttaaagcacaacaacagggcattagctcaggctcttagtagagaaaaagagaattctcgaagaattacaactgaaaagatgctattgcaaaaagaagtagagaaactgaattttgagaacacatttcttcgcctaaagctaaataacttgaataagaagcttatagacatagaagctctcatgaacaataacttgataactgcaattgaaatgagcagtctttctgagttccatcagagttcctttctactgtcagctagcaagaagaaacgaattagtaaacagtgcaagttgatgcgtcttccatttgcaagggttccattaacttcaaatgatgatgaagatgaagataaagagaaaatgcagtgtgacaacaatattaaatcaaagacattacctgatattccctcttcaggatcaacaacacaacctttatcaactcaggataattcggaagtgttatttcttaaagaaaataatcaaaatgtatatggtttagatgattcagaacatatttcttctatagttgatgtacctcccagagaaagccattcccactcagaccaaagttctaagacttctctaatgagtgagatgagaaacgcccagtctattggccgcagatgggagaaaccatctcctagtaatgtgactgaaaggaagaagcgtgggtcatcttgggaatcaaataatctttctgcagacactccctgtgcaacagttttagataaacaacacatttcaagtccagaattaaattgcaataatgagataaatggtcatactaatgaaacaaatactgaaatgcaaagaaataaacaggatcttcctggcttatcttctgagtctgccagagaacctaatgcagagtgcatgaatcaaattgaggataatgatgactttcaattgcagaaaactgtgtatgatgctgacatggatttaactgctagtgaagtcagcaaaattgtcacagtctcaacaggcattaaaaagaaaagtaataaaaaaacaaatgaacatggaatgaaaactttcagaaaagtgaaagattccagctctgaaaaaaagagagaaagatcaaagagacagtttaaaaatagttcagatgtcgatattggggaaaagattgaaaacaggacagaaagatctgatgtcctggatggcaaaaggggtgcagaagatcccggttttattttcaataatgaacagctggctcagatgaatgaacagctggctcaggtgaatgaactaaagaaaatgacccttcaaactggctttgaacaaggtgacagagaaaatgtactgtgtaataaaaaggagaaaagaataacaaatgagcaagaggaaacatactctttatcccaaagttcaggtaaatttcaccaggagagtaaatttgataagggtcagaattccctaacttgtaataaaagtaaagcttctagacagacatttgtgattcacaaattagaaaaagataacttactcccaaaccaaaaggataaagtaaccatttatgaaaacctagacgtcacaaatgaatttcacacagccaatctttccaccaaagataatggaaatttatgtgattatgggacccacaatatattggatttgaaaaagtatgtcactgatattcaaccctcagagcaaaatgaatcaaacattaataagcttagaaagaaagtaaaccggaagacagaaataatttctggaatgaaccacatgtatgaggataatgataaagatgtggtgcatggcctaaaaaaaggtaatttttttttcaaaacccaagaggataaagaacctatctctgaaaacatagaagtttccaaagagcttcaaatcccagctctttctactagagataatgaaaatcaatgtgactataggacccagaatgtgttgggtttgcaaaagcagatcaccaatatgtaccccgttcagcaaaatgaatcaaaagttaataagaagcttaggcagaaagtaaatcggaagacagaaataatttctgaagtgaatcatttagataatgacaaaagtatagaatacacagttaaaagtcactcactctttttaacgcaaaaagataaggaaatcatccctggaaacctagaagacccaagtgagtttgaaacacctgctctttctaccaaagatagtggaaacctgtatgattctgagattcaaaatgttttgggggtgaaacatggccatgatatgcaacctgcttgtcaaaatgattcaaaaataggtaagaagcctagactaaatgtatgtcaaaagtcagaaataattcctgaaaccaaccaaatatatgagaatgataacaaaggtgtacatgacctagaaaaagataacttcttctctctaaccccaaaggataaagaaacaatttctgaaaatctacaagtcacaaatgaatttcaaacagttgatcttctcatcaaagataatggaaatttatgtgattatgacacccagaatatattggagttgaaaaagtatgttactgataggaaatctgctgagcaaaatgaatcaaaaataaataagctcaggaataaagtgaattggaagacagaaataatttctgaaatgaaccagatatatgaggataatgataaagatgcacatgtccaagaaagctatacaaaagatcttgattttaaagtaaataaatctaaacaaaaacttgaatgccaagacattatcaataaacactatatggaagtcaacagtaatgaaaaggaaagttgtgatcaaattttagattcctacaaagtagttaaaaaacgtaagaaagaatcatcatgcaaggcaaagaacattttgacaaaagctaagaacaaacttgcttcacagttaacagaatcttcacagacatctatctccttagaatctgatttaaaacatattactagtgaagcagattctgatccaggaaacccagttgaactatgtaagactcagaagcaaagcactaccactttgaataaaaaagatctcccttttgtggaagaaataaaagaaggagagtgtcaggttaaaaaggtaaataaaatgacatctaagtcaaagaaaaggaagacctccatagatccttctccagagagccatgaagtaatggaaagaatacttgacagcgttcagggaaagtctactgtatctgaacaagctgataaggaaaacaatttggagaatgagaaaatggtcaaaaataagccagacttttacacaaaggcatttagatctttgtctgagatacattcacctaacatacaagattcttcctttgacagtgttcgtgaaggtttagtacctttgagcgtttcttctggtaaaaatgtgataataaaagaaaattttgccttggagtgctccccagcctttcaagtaagtgatgatgagcatgagaagatgaacaagatgaaatttaaagtcaaccggagaacccaaaaatcaggaataggtgatagaccattacaggacttgtcaaataccagttttgtttcaaataacactgctgaatctgaaaataagtcagaagatctatcttcagaacggacaagcagaagaagaaggtgtactcctttctattttaaagagccaagcctcagagacaagatgagaagatgaagtgaatttatggattctggtttttctgaattttcaaagcataaggaatcaaaacagaaatatagtatcaagaagatgaaatgcttaatgaaaaggttttttttttgtttctttggcctttcatggagtgttgatttgtccattcttaatgtttattaataggtatatgtgcataaaatagctattttgtaacattaaactttttgagtcattttggtcatcatataacttaccttcctgtttatttaagcttctttttacctagtagcctttaaccaaacaataaccttttaaccaaataaaatgtgttaataaata

SEQ ID NO: 181304 - DNA, 1041 bp, Homo sapiens
  Payload ID: 15710
  Gene Symbol: SGOL2
  Gene Name: shugoshin-like 2 (S. pombe)
  Uniprot ID: Q562F6
  ENST ID: ENST00000409203
  CDS Start-End: 89-832
ggctgtggcgtttaaacccaagccgcagccgctgctgctcgccgagctcccggagctgggtgggggtgccccacgctgaaagagagtgatggagtgcccagtgatggaaactggctcactttttacctcaggaattaagagacatttgaaagacaaaagaatttcaaagactactaagttgaatgtttctcttgcttcaaaaataaaaacaaaaatactaaataattcttctattttcaaaatatctttaaagcacaacaacagggcattagctcaggctcttagtagagaaaaagagaattctcgaagaattacaactgaaaagatgctattgcaaaaagaagtagagaaactgaattttgagaacacatttcttcgcctaaagctaaataacttgaataagaagcttatagacatagaagctctcatgaacaataacttgataactgcaattgaaatgagcagtctttctgagttccatcagagttcctttctactgtcagctagcaagaagaaacgaattagtaaacagtgcaagttgatgcgtcttccatttgcaagggttccattaacttcaaatgatgatgaagatgaagataaagagaaaatgcagtgtgacaacaatattaaatcaaagacattacctgatattccctcttcaggatcaacaacacaacctttatcaactcaggataattcggaagtgttatttcttaaagaaaataatcaaaatgtatatggtttagatgattcagaacatatttcttctatagttgatgtacctcccagaggtgagattgttttaaaaattcattttgagtatttgtattagttacattcatcagatgttcttcctgagggcaattatgtataacagttaataagttagctctcttatgttaccgatttgctaacttctgccatttaaaactgctggtgatagatttaattttaaagtaaatatgctgacaaacatcacacccacagtggcctaatactgttactctggaagaaatatttagaaataaatggacctaatga

SEQ ID NO: 181305 - DNA, 640 bp, Homo sapiens
  Payload ID: 15710
  Gene Symbol: SGOL2
  Gene Name: shugoshin-like 2 (S. pombe)
  ENST ID: ENST00000418045
  CDS Start-End: 379-640
gacctgcggcccgccagaccctcggcgcggccgccggacgccgcggggcggacgcggaagtgaacgccttctcagctgctcggcaactcgggagcagagcggccccagcggcgcccccgtgcggcccggctctgaggcagcggctcagggagggagggaggccacgtcccgggcacgccacgccacgccacgccccgcccccagattcgtctcgccccagtgggccgcctcggagtcgggtgggtcttccatcccggaggacccgattggctgatggggcaaccgccaacggctgtggcgtttaaacccaagccgcagccgctgctgctcgccgagctcccggagctgggtgggggtgccccacgctgaaagagagtgatggagtgcccagtgatggaaactggctcactttttacctcaggaattaagagacatttgaaagacaaaagaatttcaaagactactaagttgaatgtttctcttgcttcaaaaataaaaacaaaaatactaaataattcttctattttcaaaatatctttaaagcacaacaacagggcattagctcaggctcttagtagagaaaaagagaattctcgaagaattacaactgaaaagatgctattgcaaaaagaagtagaga

SEQ ID NO: 181306 - DNA, 1631 bp, Homo sapiens
  Payload ID: 15711
  Gene Symbol: SBDS
  Gene Name: Shwachman-Bodian-Diamond syndrome
  Uniprot ID: Q9Y3A5
  ENST ID: ENST00000246868
  CDS Start-End: 185-937
gtaagtaagcctgccagacacactgtgacggctgcctgaagctagtgagtcgcggcgccgcgcactggtggttgggtcagtgccgcgcgccgatcggtcgttaccgcgaggcgctggtggccttcaggctggacggcgcgggtcagccctggttcgccggcttctgggtctttgaacagccgcgatgtcgatcttcacccccaccaaccagatccgcctaaccaatgtggccgtggtacggatgaagcgtgccgggaagcgcttcgaaatcgcctgctacaaaaacaaggtcgtcggctggcggagcggcgtggaaaaagacctcgatgaagttctgcagacccactcagtgtttgtaaatgtttctaaaggtcaggttgccaaaaaggaagatctcatcagtgcgtttggaacagatgaccaaactgaaatctgtaagcagattttgactaaaggagaagttcaagtatcagataaagaaagacacacacaactggagcagatgtttagggacattgcaactattgtggcagacaaatgtgtgaatcctgaaacaaagagaccatacaccgtgatccttattgagagagccatgaaggacatccactattcggtgaaaaccaacaagagtacaaaacagcaggctttggaagtgataaagcagttaaaagagaaaatgaagatagaacgtgctcacatgaggcttcggttcatccttccagtcaatgaaggcaagaagctgaaagaaaagctcaagccactgatcaaggtcatagaaagtgaagattatggccaacagttagaaatcgtatgtctgattgacccgggctgcttccgagaaattgatgagctaataaaaaaggaaactaaaggcaaaggttctttggaagtactcaatctgaaagatgtagaagaaggagatgagaaatttgaatgacacccatcaatctcttcacctctaaaacactaaagtgtttccgtttccgacggcactgtttcatgtctgtggtctgccaaatacttgcttaaactatttgacattttctatctttgtgttaacagtggacacagcaaggctttcctacataagtataataatgtgggaatgatttggttttaattataaactggggtctaaatcctaaagcaaaattgaaactccaagatgcaaagtccagagtggcattttgctactctgtctcatgccttgatagctttccaaaatgaaagttacttgaggcagctcttgtgggtgaaaagttatttgtacagtagagtaagattattaggggtatgtctatacaacaaaagggggggtctttcctaaaaaagaaaacatatgatgcttcatttctacttaatggaacttgtgttctgagggtcattatggtatcgtaatgtaaagcttggatgatgttcctgattatctgagaaacagatatagaaaaattgtgccggacttacctttcattgaacatgctgccataacttagattattcttggttaaaaaataaaagtcacttatttctaattcttaaagtttataatatatattaatatagctaaaattgtatgtaatcaataaaaccactcttatgtttattaaactatggcttgtgtttctagacaa

SEQ ID NO: 181307 - DNA, 1531 bp, Homo sapiens
  Payload ID: 15711
  Gene Symbol: SBDS
  Gene Name: Shwachman-Bodian-Diamond syndrome
  ENST ID: ENST00000414306
  CDS Start-End: 160-420
tgacggctgcctgaagctagtgagtcgcggcgccgcgcactggtggttgggtcagtgccgcgcgccgatcggtcgttaccgcgaggcgctggtggccttcaggctggacggcgcgggtcagccctggttcgccggcttctgggtctttgaacagccgcgatgtcgatcttcacccccaccaaccagatccgcctaaccaatgtggccgtggtacggatgaagcgtgccgggaagcgcttcgaaatcgcctgctacaaaaacaaggtcgtcggctggcggagcggcgtggaaaaagacctcgatgaagttctgcagacccactcagtgtttgtaaatgtttctaaaggtcaggttgccaaaaaggaagatctcatcagtgcgtttggaacagatgaccaaactgaaatctattttgactaaaggagaagttcaagtatcagataaagaaagacacacacaactggagcagatgtttagggacattgcaactattgtggcagacaaatgtgtgaatcctgaaacaaagagaccatacaccgtgatccttattgagagagccatgaaggacatccactattcggtgaaaaccaacaagagtacaaaacagcaggctttggaagtgataaagcagttaaaagagaaaatgaagatagaacgtgctcacatgaggcttcggttcatccttccagtcaatgaaggcaagaagctgaaagaaaagctcaagccactgatcaaggtcatagaaagtgaagattatggccaacagttagaaatcgtatgtctgattgacccgggctgcttccgagaaattgatgagctaataaaaaaggaaactaaaggcaaaggttctttggaagtactcaatctgaaagatgtagaagaaggagatgagaaatttgaatgacacccatcaatctcttcacctctaaaacactaaagtgtttccgtttccgacggcactgtttcatgtctgtggtctgccaaatacttgcttaaactatttgacattttctatctttgtgttaacagtggacacagcaaggctttcctacataagtataataatgtgggaatgatttggttttaattataaactggggtctaaatcctaaagcaaaattgaaactccaagatgcaaagtccagagtggcattttgctactctgtctcatgccttgatagctttccaaaatgaaagttacttgaggcagctcttgtgggtgaaaagttatttgtacagtagagtaagattattaggggtatgtctatacaacaaaagggggggtctttcctaaaaaagaaaacatatgatgcttcatttctacttaatggaacttgtgttctgagggtcattatggtatcgtaatgtaaagcttggatgatgttcctgattatctgagaaacagatatagaaaaattgtgccggacttacctttcattgaacatgctgccataacttagattattcttggttaaaaaataaaagtcacttatttctaattcttaaagtttataatatatattaatatagc

SEQ ID NO: 181308 - DNA, 953 bp, Homo sapiens
  Payload ID: 15711
  Gene Symbol: SBDS
  Gene Name: Shwachman-Bodian-Diamond syndrome
  ENST ID: ENST00000617799
  CDS Start-End: 171-923
cagacacactgtgacggctgcctgaagctagtgagtcgcggcgccgcgcactggtggttgggtcagtgccgcgcgccgatcggtcgttaccgcgaggcgctggtggccttcaggctggacggcgcgggtcagccctggttcgccggcttctgggtctttgaacagccgcgatgtcgatcttcacccccaccaaccagatccgcctaaccaatgtggccgtggtacggatgaagcgtgccgggaagcgcttcgaaatcgcctgctacaaaaacaaggtcgtcggctggcggagcgcgtgggaaaaagacctcgatgaagttctgcagacccactcagtgtttgtaaatgtttctaaaggtcaggttgccaaaaaggaagatctcatcagtgcgtttggaacagatgaccaaactgaaatctgtaagcagattttgactaaaggagaagttcaagtatcagataaagaaagacacacacaactggagcagatgtttagggacattgcaactattgtggcagacaaatgtgtgaatcctgaaacaaagagaccatacaccgtgatccttattgagagagccatgaaggacatccactattcggtgaaaaccaacaagagtacaaaacagcaggctttggaagtgataaagcagttaaaagagaaaatgaagatagaacgtgctcacatgaggcttcggttcatccttccagtcaatgaaggcaagaagctgaaagaaaagctcaagccactgatcaaggtcatagaaagtgaagattatggccaacagttagaaatcgtatgtctgattgacccgggctgcttccgagaaattgatgagctaataaaaaaggaaactaaaggcaaaggttctttggaagtactcaatctgaaagatgtagaagaaggagatgagaaatttgaatgacacccatcaatctcttcacctctaaaacac

SEQ ID NO: 181309 - DNA, 2415 bp, Homo sapiens
  Payload ID: 15712
  Gene Symbol: SIAH1
  Gene Name: siah E3 ubiquitin protein ligase 1
  Uniprot ID: Q8IUQ4
  ENST ID: ENST00000356721
  CDS Start-End: 425-1366
gcaggcaggctcctgcagtaactcttgagctggctcagggagcgcacttccttctcagccagcgcgtcgccccctgcatccgtggcctccactggagctgggcaggaccctacccagtgaatctggagaaaacaaacttgggagacagacgaaagcttagggcacattggaggacagcgcagctgtggctcccatttttggagatgcagtcgaatttgagctcacagggaggtgtggttgcctcctggggatggaaaggcttcctttctccacctctgtaactggtgcttctgagaagtaaatggtatttggatcctgacctcagacgcgaatttgggtcttctgtgcttaggagcagaaagagcccaggaggggcctgttcctttacttcttgggggaaacgcaatgcgtggcctgacttctcatgacgggaaaggctactccaccttctctgtactcctggaggggagtcttgttcacatgtttaccagcggccaggacaaggaagagaaaagaaatgagccgtcagactgctacagcattacctaccggtacctcgaagtgtccaccatcccagagggtgcctgccctgactggcacaactgcatccaacaatgacttggcgagtctttttgagtgtccagtctgctttgactatgtgttaccgcccattcttcaatgtcagagtggccatcttgtttgtagcaactgtcgcccaaagctcacatgttgtccaacttgccggggccctttgggatccattcgcaacttggctatggagaaagtggctaattcagtacttttcccctgtaaatatgcgtcttctggatgtgaaataactctgccacacacagaaaaagcagaccatgaagagctctgtgagtttaggccttattcctgtccgtgccctggtgcttcctgtaaatggcaaggctctctggatgctgtaatgccccatctgatgcatcagcataagtccattacaaccctacagggagaggatatagtttttcttgctacagacattaatcttcctggtgctgttgactgggtgatgatgcagtcctgttttggctttcacttcatgttagtcttagagaaacaggaaaaatacgatggtcaccagcagttcttcgcaatcgtacagctgataggaacacgcaagcaagctgaaaattttgcttaccgacttgagctaaatggtcataggcgacgattgacttgggaagcgactcctcgatctattcatgaaggaattgcaacagccattatgaatagcgactgtctagtctttgacaccagcattgcacagctttttgcagaaaatggcaatttaggcatcaatgtaactatttccatgtgttgaaatggcaatcaaacattttctggccagtgtttaaaacttcagtttcacagaaaataaggcacccatctgtctgccaacctaaaactctttcggtaggtggaagctagacacatgaaggtaaataaaaagaaaggctgttaaatacaggaaacagttgcatgtagtaacactaatatatttaaaaataagtcaacagtaaaccactgaaaaaatatatgtatatacacccaagatgggcatcttttgtattaagaaaggaagcattgtaaaataattctgagttttgtgtttgttgtagattgattgtattgttgaaaaagtttgtttttgcgtgggagtgtgtgcctgcgtgggtgtgtgcgtgtttgggtttttttcctttaactgacaagccatcttgagtggtcatgggccactgcttttccctttgtgagtcaatacatagtgctgctgtgtgctttttttgtgtgtatttgctaatttttattaattttagtttttcattaaataaatttgacttttctgtaattcaggtttttcctttttttgtaccattttaaagttagtatcttttgatatgcatatttgtttatggtaaaaaatttataacgtgttcaatattttcttttcccccattaatcagttcattagaaatattttaaaatcagctattttgtgaagccatgagttccagaaagtaaaggtgacatcggaaaaataatcaaaagctatttaaagcatctataaggtgctctctttctgtcttctacagatgagtcacacctttgagcttaatctttgaaaggttagagaataaattgatttttataaatactgcaaatcaggcttttgtttcctttttcagatatcttggacaaatcacatattttaaaatttgttcttgtatttattggttttgcagaagaaggcatcgtcatgcacagtatttgtaattaaaagcaaatcatttgtttaaaaaggcagtttgcaaaaaatgtttttggtcttttataattctcattaaaagaatatctggcaaattaaaaaaa

SEQ ID NO: 181310 - DNA, 3352 bp, Homo sapiens
  Payload ID: 15712
  Gene Symbol: SIAH1
  Gene Name: siah E3 ubiquitin protein ligase 1
  Uniprot ID: Q8IUQ4
  ENST ID: ENST00000380006
  CDS Start-End: 1455-2303
tttcacccccaagacaaatagtggcctgccattttccagcccaggtagcttcctgggaaaagttgcttgttttatctttgactcagcctggctagttacattgtcgattatttcttccagatgatatttacctgttaaataatgtttattactctgctgatgaatgttttcagcaacgctggagaaccctaggctgcaaggggttcttcacctgttgactccatcccccacccccagtatggcatatatctctgccgtgctatcatctttattctttcctttttcattgtctcttcctgactgtcctcctttgttcattatgtctgacacatattgtggattgaaagtagaacagaaagatatactttctctaccagactaaaaagttttgagatggccctccatttctcccatgcctcacttcaccttagttgtgtttttatttatttttatattttcgccaccttcactagcgagtacatcccctcactcttgaggtgggcactgatcagtaggaaataagattaatacctggctggtgataatttggggggaagacttaattagatagagatggataatgggatggcagcagacctttccccttgtgacccttcccctcatttccaaaatacacctctagagtagataattgcttaccattaagaagagttaatggaaggtgatactctgattctttggcattggaactacattcaatccgcggtatcctcggattagttctaggacccccttctccataccaaaacctgaggatgctcaagtccctgatagaaaatggtgtcatatttgtatgtgcatattctcttgtataatttaagtgatctctggattacttaatacaatgtaaacaatatgtaaatagttgttatagactgtattttaaaaattttgtattctttataaatttttctgaatattttcaatccatggctggtgaagtcctcggatgcagaccgtgtggatacagagtgccgattttatacaggagttcacctgtaactccctgtacctatcaacagctgactccaaattagaaagaaatagagtaagggagcctcagggagagtcctagcaaaacggattcgattaaacttcagttccttgtatagtttctttagttgtttatggtccattttctattttagcatttattattctatgtagtctatccaaagacgattaagggagttccacatgttttccggaacattttgaaaagagagcttatccagtgtacagatcctaataaagtgcacattcagtgtaattttatttttttaatatcttttttaatcctatttttcttcctcttttgctcagtaaattttgtatgaaactttaaaaggacttatggcatgtaaacattatttataaagtaagtcatggttataattatttttctcctgcctccttatgtatttatttcagaaatgagccgtcagactgctacagcattacctaccggtacctcgaagtgtccaccatcccagagggtgcctgccctgactggcacaactgcatccaacaatgacttggcgagtctttttgagtgtccagtctgctttgactatgtgttaccgcccattcttcaatgtcagagtggccatcttgtttgtagcaactgtcgcccaaagctcacatgttgtccaacttgccggggccctttgggatccattcgcaacttggctatggagaaagtggctaattcagtacttttcccctgtaaatatgcgtcttctggatgtgaaataactctgccacacacagaaaaagcagaccatgaagagctctgtgagtttaggccttattcctgtccgtgccctggtgcttcctgtaaatggcaaggctctctggatgctgtaatgccccatctgatgcatcagcataagtccattacaaccctacagggagaggatatagtttttcttgctacagacattaatcttcctggtgctgttgactgggtgatgatgcagtcctgttttggctttcacttcatgttagtcttagagaaacaggaaaaatacgatggtcaccagcagttcttcgcaatcgtacagctgataggaacacgcaagcaagctgaaaattttgcttaccgacttgagctaaatggtcataggcgacgattgacttgggaagcgactcctcgatctattcatgaaggaattgcaacagccattatgaatagcgactgtctagtctttgacaccagcattgcacagctttttgcagaaaatggcaatttaggcatcaatgtaactatttccatgtgttgaaatggcaatcaaacattttctggccagtgtttaaaacttcagtttcacagaaaataaggcacccatctgtctgccaacctaaaactctttcggtaggtggaagctagacacatgaaggtaaataaaaagaaaggctgttaaatacaggaaacagttgcatgtagtaacactaatatatttaaaaataagtcaacagtaaaccactgaaaaaatatatgtatatacacccaagatgggcatcttttgtattaagaaaggaagcattgtaaaataattctgagttttgtgtttgttgtagattgattgtattgttgaaaaagtttgtttttgcgtgggagtgtgtgcctgcgtgggtgtgtgcgtgtttgggtttttttcctttaactgacaagccatcttgagtggtcatgggccactgcttttccctttgtgagtcaatacatagtgctgctgtgtgctttttttgtgtgtatttgctaatttttattaattttagtttttcattaaataaatttgacttttctgtaattcaggtttttcctttttttgtaccattttaaagttagtatcttttgatatgcatatttgtttatggtaaaaaatttataacgtgttcaatattttcttttcccccattaatcagttcattagaaatattttaaaatcagctattttgtgaagccatgagttccagaaagtaaaggtgacatcggaaaaataatcaaaagctatttaaagcatctataaggtgctctctttctgtcttctacagatgagtcacacctttgagcttaatctttgaaaggttagagaataaattgatttttataaatactgcaaatcaggcttttgtttcctttttcagatatcttggacaaatcacatattttaaaatttgttcttgtatttattggttttgcagaagaaggcatcgtcatgcacagtatttgtaattaaaagcaaatcatttgtttaaaaaggcagtttgcaaaaaatgtttttggtcttttataattctcattaaaagaatatctggcaaattaaaaaaa

SEQ ID NO: 181311 - DNA, 2147 bp, Homo sapiens
  Payload ID: 15712
  Gene Symbol: SIAH1
  Gene Name: siah E3 ubiquitin protein ligase 1
  Uniprot ID: Q8IUQ4
  ENST ID: ENST00000394725
  CDS Start-End: 250-1098
cagtgtgtggtatttagcgggggcgcgcggcgggctcgaggacgcgcgaaacggcggcggcggcggcggccaggggggagccggggcggccgttgcggggcgcgctctcgagaggcggcggcggcccagggtgtcccgtcggtctcggcgccgggaagaggcggtggcgctgcccgcggtggcgggggttggcgacggagcgcgttggtgccaggaccggggtccgaggcgcgctctccgcccacagaaatgagccgtcagactgctacagcattacctaccggtacctcgaagtgtccaccatcccagagggtgcctgccctgactggcacaactgcatccaacaatgacttggcgagtctttttgagtgtccagtctgctttgactatgtgttaccgcccattcttcaatgtcagagtggccatcttgtttgtagcaactgtcgcccaaagctcacatgttgtccaacttgccggggccctttgggatccattcgcaacttggctatggagaaagtggctaattcagtacttttcccctgtaaatatgcgtcttctggatgtgaaataactctgccacacacagaaaaagcagaccatgaagagctctgtgagtttaggccttattcctgtccgtgccctggtgcttcctgtaaatggcaaggctctctggatgctgtaatgccccatctgatgcatcagcataagtccattacaaccctacagggagaggatatagtttttcttgctacagacattaatcttcctggtgctgttgactgggtgatgatgcagtcctgttttggctttcacttcatgttagtcttagagaaacaggaaaaatacgatggtcaccagcagttcttcgcaatcgtacagctgataggaacacgcaagcaagctgaaaattttgcttaccgacttgagctaaatggtcataggcgacgattgacttgggaagcgactcctcgatctattcatgaaggaattgcaacagccattatgaatagcgactgtctagtctttgacaccagcattgcacagctttttgcagaaaatggcaatttaggcatcaatgtaactatttccatgtgttgaaatggcaatcaaacattttctggccagtgtttaaaacttcagtttcacagaaaataaggcacccatctgtctgccaacctaaaactctttcggtaggtggaagctagacacatgaaggtaaataaaaagaaaggctgttaaatacaggaaacagttgcatgtagtaacactaatatatttaaaaataagtcaacagtaaaccactgaaaaaatatatgtatatacacccaagatgggcatcttttgtattaagaaaggaagcattgtaaaataattctgagttttgtgtttgttgtagattgattgtattgttgaaaaagtttgtttttgcgtgggagtgtgtgcctgcgtgggtgtgtgcgtgtttgggtttttttcctttaactgacaagccatcttgagtggtcatgggccactgcttttccctttgtgagtcaatacatagtgctgctgtgtgctttttttgtgtgtatttgctaatttttattaattttagtttttcattaaataaatttgacttttctgtaattcaggtttttcctttttttgtaccattttaaagttagtatcttttgatatgcatatttgtttatggtaaaaaatttataacgtgttcaatattttcttttcccccattaatcagttcattagaaatattttaaaatcagctattttgtgaagccatgagttccagaaagtaaaggtgacatcggaaaaataatcaaaagctatttaaagcatctataaggtgctctctttctgtcttctacagatgagtcacacctttgagcttaatctttgaaaggttagagaataaattgatttttataaatactgcaaatcaggcttttgtttcctttttcagatatcttggacaaatcacatattttaaaatttgttcttgtatttattggttttgcagaagaaggcatcgtcatgcacagtatttgtaattaaaagcaaatcatttgtttaaaaaggcagtttgcaaaaaatgtttttggtcttttataattctcattaaaagaatatctggcaaattaaaaaaa

SEQ ID NO: 181312 - DNA, 2683 bp, Homo sapiens
  Payload ID: 15712
  Gene Symbol: SIAH1
  Gene Name: siah E3 ubiquitin protein ligase 1
  Uniprot ID: Q8IUQ4
  ENST ID: ENST00000568007
  CDS Start-End: 1596-2444
gggcagtgtggatggcatgcagtgggatggtgaaggatggggccagaggaaggaaggacatgcccgcccagctgtgtttgggatgctgcctccctggagaggggtcatgaagcctagcaggcagtggagcccaggtaatggtggaccttgaggggaacgccagtgggaaacttagacccatgaactccagactgtacattgaggccatcagtttcaaatgtttactttttggtatttgctattccaagctgaacacagggaggtgggtgagttggaagcttgtttgtgcttggaagcttgtttgtgctggatgtactttagcaggacttccccggactacagggggcttctgagccactgggctccccagagtgatgagagacctgctgtgtagactactcctgaaagactttcatgaaggcacaaaagcaacaggtttgctgagtggtgctgcccgtgccccataaggagaacggtgtatactgtttccacacgatgcagcaagccaagctccaggctgcacacttggggtctttaaaggatgcctcattagagtaaaatgggacttacttttttttttataactcaattttattctgagcccctgttatgctaggtggcagaaatgtcatctcaggcaatgttgggggcctgcccctttcctcagggcttgctatcgaggaagtcatcgagggcttgcgatcaaggcctggggtcccacctgtcctcacagcttgctgctgggacacctgctcctccgtgccccaggtctagagtctctgctggtgttgggcgcctggcagcgtttcactggggaggcctccttggctccagctcattcctctttctctgtgtctggtgcctgcccagggcctttcccattaaatggtactgggtgctctctggtcatcggctccacagtctggatggatgttttgcctcccatctgaagcttagacaaggcacgagggtcaaggatccccactcaggacccatcaacatctgtattcccccacctggggaagggtgctggttttcttcattatgcaccccccatctttaggagtctataaagcatcaactcaaagtgacaagaagtggacacatattctaagggagctccccaggacaaaaggaagatggaggaaatggtctctgaaggctcaaagcagctccccctgccccgtgtaaagcgctgatgagatggcaatttaaactgctttgatgaccaggtttcattaggatcaagggatgaaaagactgagattgtatacatgtaaataccaagttcagtgagtttccatggcctcttctgtcttaatacaacttaccaaacaatccagacagatttctgcctccactttgttgatttacccagggaagtggggaaagtaagaagtaacttggactcttctagaggagagcaggcacaaactaagccaagaaaagcacgtttgagaattccagaggcagaagttgcttctgggtgcctgacgtcaacgatccagcacttcaagactggtgtgcggcatcctcaggggacactgtgtcctgggcacccctgcagtttaagagaatccactagtttataagaaatgagccgtcagactgctacagcattacctaccggtacctcgaagtgtccaccatcccagagggtgcctgccctgactggcacaactgcatccaacaatgacttggcgagtctttttgagtgtccagtctgctttgactatgtgttaccgcccattcttcaatgtcagagtggccatcttgtttgtagcaactgtcgcccaaagctcacatgttgtccaacttgccggggccctttgggatccattcgcaacttggctatggagaaagtggctaattcagtacttttcccctgtaaatatgcgtcttctggatgtgaaataactctgccacacacagaaaaagcagaccatgaagagctctgtgagtttaggccttattcctgtccgtgccctggtgcttcctgtaaatggcaaggctctctggatgctgtaatgccccatctgatgcatcagcataagtccattacaaccctacagggagaggatatagtttttcttgctacagacattaatcttcctggtgctgttgactgggtgatgatgcagtcctgttttggctttcacttcatgttagtcttagagaaacaggaaaaatacgatggtcaccagcagttcttcgcaatcgtacagctgataggaacacgcaagcaagctgaaaattttgcttaccgacttgagctaaatggtcataggcgacgattgacttgggaagcgactcctcgatctattcatgaaggaattgcaacagccattatgaatagcgactgtctagtctttgacaccagcattgcacagctttttgcagaaaatggcaatttaggcatcaatgtaactatttccatgtgttgaaatggcaatcaaacattttctggccagtgtttaaaacttcagtttcacagaaaataaggcacccatctgtctgccaacctaaaactctttcgctgctggatacaattttcatggcaataggaactgaagtacttcaaataatgtgagcttaaacatgttacttcattgaaacaaccaaaactacttgatgtttacatctaaaatcctggttaaaataaattttagatttggaaagggaa

SEQ ID NO: 181313 - DNA, 589 bp, Homo sapiens
  Payload ID: 15712
  Gene Symbol: SIAH1
  Gene Name: siah E3 ubiquitin protein ligase 1
  ENST ID: ENST00000563745
  CDS Start-End: 294-589
aagcagctccccctgccccgtgtaaagcgctgatgagatggcaatttaaactgctttgatgaccaggtttcattagggaagtggggaaagtaagaagtaacttggactcttctagaggagagcaggcacaaactaagccaagaaaagcacgtttgagaattccagaggcagaagttgcttctgggtgcctgacgtcaacgatccagcacttcaagactggtgtgcggcatcctcaggggacactgtgtcctgggcacccctgcagtttaagagaatccactagtttataagaaatgagccgtcagactgctacagcattacctaccggtacctcgaagtgtccaccatcccagagggtgcctgccctgactggcacaactgcatccaacaatgacttggcgagtctttttgagtgtccagtctgctttgactatgtgttaccgcccattcttcaatgtcagagtggccatcttgtttgtagcaactgtcgcccaaagctcacatgttgtccaacttgccggggccctttgggatccattcgcaacttggctatggagaaagtggctaattcagtacttttcccctgtaa

SEQ ID NO: 181314 - DNA, 2517 bp, Homo sapiens
  Payload ID: 15713
  Gene Symbol: SIAH2
  Gene Name: siah E3 ubiquitin protein ligase 2
  Uniprot ID: O43255
  ENST ID: ENST00000312960
  CDS Start-End: 529-1503
ccccgcggggctgcagcgagccaggcatgctcactggcgcaggcccggcccgcagcccgagcaggaagcgccggcgctaggcggccccctgcgctgccagctggagccgggcggagccagcgccccggcgcagggtggctctgccagtccccgcgcgcctgggcggccgcacacgtgtccaggcgtcacgtccgcgcgcgcccccggggcttgcgtcagcggctgttccagaagcgggtgggccagggctctgcgcaccgctggggttcggggcccgggacgccgccgggaggagggcaccgcgcggggtccgacgcggaggcgtgctcggaacgccgggggctgcggagtgcatcagcgcggtccagccctccgcctgccgggcgccgagcgtctccgccgcccggacctgggctgggcgccgtggcgttgcctcggagctcgctgcccgcggggcgcgcaccgccttgacccgggcggccccgcggcaggcaggcgcccgcagttccatggttggttcggagcgcgatgagccgcccgtcctccaccggccccagcgctaataaaccctgcagcaagcagccgccgccgcagccccagcacactccgtccccggctgcgcccccggccgccgccaccatctcggctgcgggccccggctcgtccgcggtgcccgccgcggcggcggtgatctcgggccccggcggcggcggcggggccggcccggtgtccccgcagcaccacgagctgacctcgctcttcgagtgtccggtctgctttgactatgtcctgcctcctattctgcagtgccaggccgggcacctggtgtgtaaccaatgccgccagaagttgagctgctgcccgacgtgcaggggcgccctgacgcccagcatcaggaacctggctatggagaaggtggcctcggcagtcctgtttccctgtaagtatgccaccacgggctgttccctgaccctgcaccatacggagaaaccagaacatgaagacatatgtgaataccgtccctactcctgcccatgtcctggtgcttcctgcaagtggcaggggtccctggaagctgtgatgtcccatctcatgcacgcccacaagagcattaccacccttcagggagaagacatcgtctttctagctacagacattaacttgccaggggctgtcgactgggtgatgatgcagtcatgttttggccatcacttcatgctggtgctggagaaacaagagaagtacgaaggccaccagcagttttttgccatcgtcctgctcattggcacccgcaagcaagccgagaactttgcctacagactggagttgaatgggaaccggcggagattgacctgggaggccacgccccgttcgattcatgacggtgtggctgcggccatcatgaacagcgactgccttgttttcgacacagccatagcacatctttttgcagataatgggaaccttggaatcaatgttactatttctacatgttgtccatgatgtgactttcgtaaaccttcaaaattatttgggcatagtgctctatgtttaataaaggtttttatagatgttttattccatatgtcttcacaagtcaggacccacaattacccgtgttttgtttgaacagcagtgtcccatctggcttcgacccaacaaagttcattaacctgggatgaatggggttggcctgttggtgatttggatgctgttctgtgatctaaaacaactcttattgaattgtatttactccctaaacaacacttgacaggctgttgcacagggcttctatagatcagtgtgttaggaatgggaggccccttcctgcctgccttcccatattggtcccttgacattgacaaaagcacagtgactgtcagcagattcctttacttttgtttgtgggaggtaggaattgttttaatgcattttaaacagtgtttctgaaattggatggctggctaatagacactgaatcacccggagtgcttatcttaaaattgcagatttagggagcctgccaatttaacagtctcatcaggtgattcttttcaacagtaatgtttgagaattactgggttaaattgtgggaaagggtccagattttaaaggtgctttaaggttgccctctgccgatactgtttgtctttctactgtttcatcccctaacttcccccaaccctcaaattaaaactagaactatagatccacatgaacgcacgcctgagatttggccactcacctatgttttgggtggattgcctaggaaagcaagtcatatggccattgatagttctcatgtaattagttttgctcaccactagtacagatgacccgtttacacgtggcttccctcggaagccctcctcaacagtagctggtgtgaaagactaaatcagtagagttggaaaagctttataaccggtgtgtcatatgcttgctatttaaagctgtgtgttggttttgtttttctgccacattcactagttttttaataaatattttccaaaaatg

SEQ ID NO: 181315 - DNA, 427 bp, Homo sapiens
  Payload ID: 15713
  Gene Symbol: SIAH2
  Gene Name: siah E3 ubiquitin protein ligase 2
  ENST ID: ENST00000482706
  CDS Start-End: 178-427
acttcggcgacgcttccccgagagtagcccccctcctcaacccagaaaagacaaccccgcggggctgcagcgagccagtgccaggccgggcacctggtgtgtaaccaatgccgccagaagttgagctgctgcccgacgtgcaggggcgccctgacgcccagcatcaggaacctggctatggagaaggtggcctcggcagtcctgtttccctgtaagtatgccaccacgggctgttccctgaccctgcaccatacggagaaaccagaacatgaagacatatgtgaataccgtccctactcctgcccatgtcctggtgcttcctgcaagtggcaggggtccctggaagctgtgatgtcccatctcatgcacgcccacaagagcattaccacccttcagggagaagacatcgtctttctagctacagaca

SEQ ID NO: 181316 - DNA, 7057 bp, Homo sapiens
  Payload ID: 15714
  Gene Symbol: SIAH3
  Gene Name: siah E3 ubiquitin protein ligase family member 3
  Uniprot ID: Q8IW03
  ENST ID: ENST00000400405
  CDS Start-End: 108-917
aagccgggctggagcggagtgtctcagaggctgcgctccttccagggcccaaggactcacagcttcctccgctgccttcccggaccaacaaccccccaaaagttgtgatgcttttctttacccagtgctttggggctgtattagatctcattcatctccggtttcagcactacaaggctaaacgggttttctccgctgccgggcaacttgtctgtgtcgtcaaccccacacacaacctaaagtatgtgtccagtcggcgcgccgtcactcagagcgctccagagcaaggcagcttccaccctcaccatctctcccaccaccactgccaccaccgccaccaccaccacctccgccaccacgcccacccccaccaccttcaccaccaggaggcggggctgcacgccaacccggtgacgccctgcctgtgcatgtgtcccttgttctcctgccagtgggaaggccgcctggaggtggtggtgccccacctgcggcagatccatagggttgacatcctccagggagccgagatcgtcttcctggccacggacatgcacctccccgcgccggctgattggatcatcatgcactcctgccttggccaccactttctgttggtgctgaggaaacaggagaggcatgaagggcacccccagttctttgccaccatgatgctgattgggacccccacccaggccgactgcttcacctatcgcctggagctcaacagaaaccatcggcgcctcaagtgggaggccacgccccggtctgttcttgagtgcgtggactcggtgattacggacggggactgcctcgtcctcaacacctcgctggcacagctcttctctgacaacggcagccttgccattgggattgccatcaccgcgacagaggtcctcccctcagaagctgaaatgtgaggccaggagccacggatgctccccacacagcctccctaggaaacgcctgggacctcccaataccaggactccagactcctttttattcttctcctttcttttttttttttttaatttttaattattattatttttttgtctcaggtactttgtgagatttagtttttgtctgccatgggcattatattatgtaaacatcctgtaatttaagatcttggtgtgatgtttgtcctgccttgttggtgttgttttatagaatgtttgtaagatttattcagaatagttttttcctgtcacctccaagtcctttctccgctagttttgaaaggatcaaaacaccatcaagcagactgttggggttgaaaggaggcttcgtgtgagaatcatttcttgtttctcttttcagtctatttcagagcaagctaaatctgaacgtgtgcagtcggcaggttggggaaggggcccagctcagagatggatcacatttcagaccatccagacatgactctgacagcttcccaggaacctcaaggtcaaagctgagctagccgggcatgaggagatcgtgtctccaccgcagggctggggactgggctagaggtgtcattgtgtgctgagtgctcaggttgatgctggggctcaggagagtagtcagaggcccaccttcctgtgacgggctcttgtcaccttgttcccaggctgtgccgtcttctcctgctctggaatcaaagtcctcagatttttgatgctttcttaaaaacccctttgccttctgttgagcaagtagtagaaaagaataggcaagatggggggtggggatgaaaagcaacaggaaaaagagaacataaaattaatctcccatctctgagagggcactccctcctcagagagttttattatcaagttataaaatccatcagttcctccctagggtgcagttctttcatatcatgcaaaaagcagaaccaggactcatcatcaaatgcaaagaactcagagggtggcacccaggatctctgacctggcgggctggtcatcacttacaaacctgggaggctctcttccctttcctcactttctaaaatgctcctaccgtcccattcagcacgcagacgtgaccacggctcaagtatgtattcagcacctgttgcagtatgaatgacacagtgacggaaatccatatttcctctgcgcaggctgctttctcttatttggttgtcagaacaattcatcaacatcttcttgtagaagtctctcgtgtatttgaagaaagtcagcatgtttagtcaactttgtcttttctgttctaagttggacacctataagccttcccagtaggacctcttctagctcctttttatcgcatttgtcccccccctctggctgctctccagacactgcagaagtcaggcaccccatccccagcacattcccatgacagccaaatgggcctttggccaaccagacattactctccgtgccctgttcctgcacctcaccccctcggcttggtcctggcaggcatccaagtgactacttagtctcaggcaggttgccctggctggccatctgcaattttttctccaccaaaaataactgatcctgaaacacaacacccttcccccaacaactgggttaattctccagccacttttggtgccaacttacacccccacgcaccagaagggaggtgccagtcgatacaagatttaataacagaggctgctctggtcacacagtaatcgctgggcccctggggctgagactgcattccgtcagagccctgagaggggcaaaaaacattgccacagatggaggcacatgtcagatgctgcagtcgcaaaaaaggattggggcctgcgcattctttgagctctcagatgccctgccagggcaccagccaccctcctccaatcacacagatgcccaagaacacctgaggctggtccgtctgtgcgtggaaagactggctgtcttcctcctcactgcatccccaatccccttcccagaacctaagacccccttggctgtaagtcttatgcctttagaagccacaggtcctctcctggtttttgagactcaaccactttgaaagcatttgtgtagcatcacaggtgctccagatcaacaaacaaaaacctcactaagaatataactaacattcacagggccttagggctcctgcagacatcacctttgccttctggttgtgccaagttacctgagccacactgggaatgacttcaggttattttcactgcacacaagactgtattatgaataagtgatcccagatgggagcttatatttttgttcctagaaagctttaggacaaagcatgggaaatgtattattatcttccatctatggtgctccccaaaaggcctctccatatccatatgtgaagaactggagaagaaggagcaaactaacaaccaagaattgggaataggaaatggtaccagcagtttgtatttgagcttcacagttcctgaagggctctttgatttgagtctcaggttaatcctcattagtatcctcaatatactaacagaatagaggttctaagacatgaagtgatcttttcaaggtcacacatcaggtggttagaccacaaccaaaacccagatcaactgactgcaaacttggtgttcttgaagtaagactgatccgaaatattcagcagtcttgccagcttaccagtggactgaggacctgagaatcaactgagtctttgtcctgggatagttgagggagcagggagagaaagactggagtagatttgcttttagaagcatctctgctttaagaactaggccagggatggtggctcacgtccataatcccaggactttgggaggccaaggaaggaggattgcttgagctcaggagtttgagaccagcctgggcaatatagcgagacttcatttctacaaaaaaaaaaatcagctgggcatggtgacacaagcctatagtcttaactactcggaggccaagacagggggatggcttgagcccaggaggttgaggtcacagtgagctgtgattgcaccacttgtaactccagcctgggcaacagagtgagaccctatctctttagaaaaaaaaaaaaagcactagtccacctggaagcagggggcccaggaagtgggtgggctgcagatggaggcttcagtgcgccaggccctttctgaatccctttgcccacacccaggtttctcaccttagagtcccaggagtccctgcacagaacgctgggatctggttgcctcattcacaccaaggtgcaagagttaatgactcactctctaaggagtaattgccttttaaaagaaggcctagagagacagcgcacttaacagtgaaaaatgagttaccagtatctgaacttcaggcatctgccagaggtttttttcaggaggtgtggagagaggagcattcctccccttgaggctgagcctacatacatggttgacgccgaaatggaggtcaggccacacgaagattgtctttaacaattggtatctgcatgaatctgtacctggtaaaccccatcactagctgtggctactctggacattttaggaatagatcagcatagtaaccataatagtactcatggctaccacttattgaggcttttctatatgatccagtaggctgcgtactttgaatatagtagatcatgtaatccccataacaaccttagcaagcaggtgctctttattgtattcatgttacgggtgggaaacgtaagctaagagaatttagccaacttgcttaagatcacccagctagcaaatggcagagctgggcctgggaccgggtacgtatggcttctgaccaacagcaaccatgtcatttctatgaacatatggacccaaggctcagaaggaccgagtcataaagtgtgaatggcatagaggccttttagtgctttcatactcaatatggccttttagctcccctttttctccctcttttttcaacccaagacctagtggagtactagagctgcttgtattctggttgttaatctttcaggaattttgcaagctgattgttaattaagtacagtcagtattaaaaatgatatacatttacaattaaataaattatatttaaagcaaaggtcaaaagtacttaaaactcatcacttcctaattatttcactactctttttattctctatgctcctggggttatttacatctatcacatctgtatgatgaacatactatataataatgtgctgcaccgcatcttccagctccacatttagtgacgtcatggtgattgcttgaaattagccatggtggaagtattcataccatggaaattagcaaatgctactagacagggatttttctccctagaaagccagttgttaagcacttaacagtataatcatccctcagtatccttgggggattggttccaggaatctcgtggacactaaaatctgaagatgctcaagtcccttatataaaacggcatagtatttgtatataacctacgcaatcctcccatatactttaaataatctctagagtacttataatacctaatacaatgtaaatgctatgtcaatagtttttatactgcattatttcttattgttgtattatttcttttttttttcctgaatattcttgattcacagttggtggaatccacaggtgtggaacatgtggatacagagggttgacttaataccactgcctagacattgctgatgagcacagcagggtgggagaggggactttggaaggagaagcaaggccctggaaggccgtactgacaagggcataaatgacagccaagccagcggaacagcaaattgttggggaaacacgaactcttctggagaagagactctgaggcttaagcagcttcaagagcattttctgccacagagcaccctctgctttctccccggacacttccctattgctgttagtgtggaaagttctatttggtggctttcatggaaaaattgggctccgcaaactcagcctattggctatcccaatccaaaaagcaaaaccagctctataaagctcaaatttcctgttacttgttcttacaggtcaccctccctacctctttcttacatgctggccaaaacctaaagaaatgttttactttgaaattagaaattggaaatatctaccattcaagagacacagcaagcagtggtgtcaaacaccacataagatgcattatcacaaaagtgggacccccgtaaagcatgaagctgagggacagaaaacataatgagccaaggaatgtcacatgaagaacagggccccgggccttactttcctacttggctacctcacttttttgcaacccagtaaggaccctgttcacaatccatagcctacccagaccaatactctttctaaatctggggcacagtttccactaggacaagagtcactggaaacttccagctaagtccattgaagcaggcagaatcttcaaggtcaatagtgcatcagttactctgatcccagtggtttcagtggaagggatggaagaagtgagggttgctgaagtttctacttggatgcatttctaagggaaaggggaagggatcatgggtgggaccccaaagagttaggctttgattgaggttcagctgcaaatagcatcatgagtggcgtctcctagtcagattgttaaatttcagatttttttgttcataagattttcttcaggaattggtgagttccccattgtgttcacctggaaaatagccagctgaagaaaaacttcactgaaaagaaatctgagagatctagtgtagataaacattaatttccccccaaatcaggtcatcacatgaactacctgggttagaatttgtcttttccaatattttctgaaagtatttcaccttggctactatactataaatactcctcaacctttttcagtcttttttttagggtattgagataagaaagagaaaggaaattgagaagcattttacttgccctgaattaatgtatatataattttctatgctttcttataatgttaaagacaataacttggacaaactcaaactgctacttcatctctgccctctcatagaaaatgtcattaaattgcatttgatattgtttccttcg

SEQ ID NO: 181317 - DNA, 5583 bp, Homo sapiens
  Payload ID: 15715
  Gene Symbol: SIAE
  Gene Name: sialic acid acetylesterase
  Uniprot ID: Q9HAT2
  ENST ID: ENST00000263593
  CDS Start-End: 174-1745
aaaaaaaaaaaaaaactacggcggccgagaaggggcgagtacagcccagtcctgaggtcgcgggaggctgcgaggactgcaaaagggtggagtcggcctcgcccccgcccaggccccgcccctgccgggaacccactttcccagtcctaggcggcggtcagatccttgcaagcatggtcgcgccggggcttgtactcgggctggtgctgccattaatcctgtgggccgacagaagtgcaggtattggttttcgctttgcttcatacatcaataatgatatggtgctgcagaaggagcctgctggggcagtgatatggggcttcggtacacctggagccacagtgaccgtgaccctgcgccaaggtcaggaaaccatcatgaagaaagtgaccagtgtgaaagctcactctgatacgtggatggtggtactggatcctatgaagcctggaggacctttcgaagtgatggcacaacagactttggagaaaataaacttcaccctgagagttcatgacgtcctgtttggagatgtctggctctgtagtgggcagagtaacatgcagatgactgtgttacagatatttaatgctacaagggagttgtctaacactgcggcatatcagtctgtccgcatcctctctgtctctcccattcaagcagagcaggagctggaggaccttgttgcggttgacttgcagtggtctaagcccacctcagaaaacttaggccatggatatttcaagtacatgtcagcagtgtgctggctctttggacgtcacctttatgacactctgcagtatcccatcgggctgatcgcctccagctggggcgggacacccattgaagcctggtcatctggacggtcactgaaagcctgtggggtccctaaacaagggtccattccatacgattctgtaactggtcccagtaagcactctgttctctggaatgccatgatccatccactgtgcaatatgactctgaaaggggtagtatggtaccagggggagtccaatataaattataacacggatctgtacaattgcacattccctgcactcatcgaagactggcgtgaaaccttccaccgtggttcccaggggcagacggagcgtttcttcccatttggacttgtccagttatcttcagatttgtctaagaagagctcagacgatggatttccccagatccgttggcatcaaacagcagacttcggctatgtccccaacccaaagatgcccaatactttcatggctgtagctatggatctctgtgatagagactcgccttttggcagcatccaccctcgagataaacagactgtggcttatcggctgcatttgggggcccgtgctctggcttatggtgagaagaatttgacctttgaaggaccactgcctgagaagatagaactcttggctcacaaggggctgctcaatctcacatattaccagcaaatccaggtgcagaaaaaggacaacaagatatttgagatctcctgttgcagtgaccatcgatgcaagtggcttccagcttctatgaacaccgtctccacccagtccctgaccctggcgatcgattcttgtcatggcactgtggttgctctccgctatgcttggaccacgtggccttgtgaatataagcagtgtcccctataccaccccagtagtgccctgccagcccctcccttcattgctttcattacagaccagggtcctggacatcagagcaatgttgctaaatgactgtttcagtatgatcagaacttagatataaggatgggtccttcagattttagcatttaggagtttcaataataaccattgcttttaaaggaaattaatagaaagcctcattgaatggctttcagctagcacatggctgtttctatattctgatgagcccaggcttataggtaacttgaaatgcttgctttttgttccctagttggtctaagggtctgtattggactaattctgaactacagacaaattggacctcaatgtcatttacttccctcatattaatgggagtgaaatgtctaatacttttgcccctttttatccagagttgtgggaatctcaggattggaagagattttaaaggccacataggccagctagtgttcatgtgttctttataaaatttctcccatccaagtactaaccaggcccgaccctgcttagcttccgagatcagatgagatcaggcgcgttcagggtgatatggccgtagacgtctttacaaaattcctgacaggtggttactgaatctctctatgaactttccattcaaaactttccaagtttttccttatgtggaaccgaaatctttctttctcccgtgaaactttactactatcagataattgaagacagatctctttgtattctcttcaagcccaaaccaattctgttccttcaatctaaatagtggtaatatgaatgtttaagaaatgaaataagaaacatgtgcaggcactttggaaggtgctaagtgactgccctaaggaatgaaaagcaagggccaggtgggagtagcccagcgaaggcacttgggctgccaggaacaggaggcgtgggaaactctggcttaggaaaacatgaacacaggggcaacagaggcaaactgttgttcgagttaaatataaatctcaggctctttaaaggtaaaaggtttaaggataatccatttggaagaagaaaagagtgaggctgaaagtaaagccacatgacaagcatataaaaaaaaatgcagatgatacaaatatgaaagaggccttcagtgtttgtttattaagaatcttaatgcagtttactgatggattaaaaacagctaacattgtctgaaaattatgttacctataagaagttggaaataaataaaagcataatcactagtgatgtgtatgtatttatatccacttgcaaactgtccttgaagcatgtgaaaaggagtaagaatactatctatgggtagctttcctccccttaatgtgaaaaatgagaactaaagcaaaaagcatcactcactgtacatatacaatgtattttacgtagtgtaaaaaatatggtttagatagtgaatatattaatgaaatcatatgtaaatttatttttagtggctgaataatttaaaacattatgtggaattcactatgtttcccccaatttaggaactttttactgtgtgaaaatgaaatttataatactctgtagggtgaatgatggtttttgctttagttctacccctctgtagagttccaaggggttctggtgtagctccaaacagcaggaataactttgtcagtgccaagattttatttagttaaaaaacaaaaaatctacacactttacaaggaacgttggctcccctgaggacttcctagcattcaactcgttcagttaacccctattgcccatgctttgacctctcatgcatctggccccatagaaaccatgaaccttgtaacagattgatgcctgagaaaaagtcaatctacccgtccactcctccactcccaatacacatacccccatgggctgttctaattcgggggcagccagaggtagccaagaactctaagtccagattcctttcacctccaggaacctagagtacatagtgtgaaaaatacggttcaggcaatgattatgttaatgacgccatgcacattcatttttagtggctgagtaatttaaaacatgatgtgggaattcactgcatttccccaaatgtaagaactttttagttttaaaatgaaatttatagtcactgtagaaaatttggacactaaagtataagcaagtaaaaatcacccccaaattcatcattcagagaaacactattttgctgaaccattcacttgacttgagttatataattttatacagtacatattattttgtaatctgtgtttttgacttacttactttaccaaaataattttcttatgtaaataatagaatatagatttagagtgtttcagtttgtggaagcctcattttatttaaccaatttcctattaatggacatatagatttttaacaattttctactattaaaataatactgtaatgaatatcacatgcaaacatcataccacactcgtccagttatttcttagggttcttaacatggaagaggataaatatatatttaaaatttagatatctacagcttaaccctcccaaaggattaaacaacttacattctcaccaaggtagtcctttttttgccctcaccctcattgacactggatgttgtcaaatttaaaaaaaatccttaacaatctgatagatgaaaagatagtttaagtatactaaggcagtgtttttcaaggtgtttttgtttttgtttttgagttggagttttgctctgttgcccaggctggagtgcagtggcgcggtctcggctcactgcaacctctgcctcccgggttcaagcgattcttcctgcctcagcctcccgagtagctgggactacaggcgcgtgccaccacgcctggctaattttttgtatttttattagagaccgacttagccaggatggtctcgatctcctgacctcttgatccacccgcctcagcctcccaaagtgctgggattacaggcgtgagccaccgtgcccagcttttcaagtttcttaaatccatgatccatagtaaaaacattttacacatatcttcatacaagtatatgtatatgtggtatacgtacacactatagttgtatatgcattatagctgaaaaaccagttcaacctttctacatgtggtatgttccaaaaattttaaatgtctttctaaaatgaggctcttttaatacgggtattactcaggctgtaatagtgggaaaatatttgttatatgataaaagcagcatatatcatttctgtgtaaatgccagtatgctcaagccatttatgcagagaaaaaaagaaaaacactgcattaacattttaagcagtccccttcccgatttgctattatacaaagtttgtttcttttacattgtaaagtgtatacaacttataaaaagactatactcaaaatcataaaataccagttaacttagcttctcagtttacagtggccagtgtggtgtgctctaaacactgctgcctgatccctccctctgctggtcagatttattactataaagtaccaatcccatttgtgttgtcctcaattggcaattatgaatggcagtgcattaaccattcaattctcaccactccatccccattcttctacttctgggtccttttgtccctccctttccagacagcccttggtaacctgctgctgggtaactaaggcatcccacaggtagtgttgaggtgttaggtgatagagtaaacctctaccttaatgctattaacagggtccaaaaatccagttgcatggaacatggagttatattattacatggctaatgaaaagacaggactaagtctgttatagagtatgggactaacccccaattatatgtgaatttgtgttatcatatggtttcagtgtactgagctaaaaagcacattatctgaggtgcaatacaaaggttaaagaggttaaagatcccc

SEQ ID NO: 181318 - DNA, 2921 bp, Homo sapiens
  Payload ID: 15715
  Gene Symbol: SIAE
  Gene Name: sialic acid acetylesterase
  Uniprot ID: Q9HAT2
  ENST ID: ENST00000545756
  CDS Start-End: 293-1759
agttaccttccacgctgtatgtccgtgagaaatacaatgaagacggtctgaataatgaactggtaatcttcgataatatgaaacgaatttaagagaacatatcaaagagaaggctctcaaaataggctgctgcaaaagctggtatattgtccggttgctctctcagaatctcgcgtgtcagcccttcaagaagattcccaaatccttgtggaattcggtagtgggtgttggagaatggaatcgacatcttcttggtattggttttcgctttgcttcatacatcaataatgatatggtgctgcagaaggagcctgctggggcagtgatatggggcttcggtacacctggagccacagtgaccgtgaccctgcgccaaggtcaggaaaccatcatgaagaaagtgaccagtgtgaaagctcactctgatacgtggatggtggtactggatcctatgaagcctggaggacctttcgaagtgatggcacaacagactttggagaaaataaacttcaccctgagagttcatgacgtcctgtttggagatgtctggctctgtagtgggcagagtaacatgcagatgactgtgttacagatatttaatgctacaagggagttgtctaacactgcggcatatcagtctgtccgcatcctctctgtctctcccattcaagcagagcaggagctggaggaccttgttgcggttgacttgcagtggtctaagcccacctcagaaaacttaggccatggatatttcaagtacatgtcagcagtgtgctggctctttggacgtcacctttatgacactctgcagtatcccatcgggctgatcgcctccagctggggcgggacacccattgaagcctggtcatctggacggtcactgaaagcctgtggggtccctaaacaagggtccattccatacgattctgtaactggtcccagtaagcactctgttctctggaatgccatgatccatccactgtgcaatatgactctgaaaggggtagtatggtaccagggggagtccaatataaattataacacggatctgtacaattgcacattccctgcactcatcgaagactggcgtgaaaccttccaccgtggttcccaggggcagacggagcgtttcttcccatttggacttgtccagttatcttcagatttgtctaagaagagctcagacgatggatttccccagatccgttggcatcaaacagcagacttcggctatgtccccaacccaaagatgcccaatactttcatggctgtagctatggatctctgtgatagagactcgccttttggcagcatccaccctcgagataaacagactgtggcttatcggctgcatttgggggcccgtgctctggcttatggtgagaagaatttgacctttgaaggaccactgcctgagaagatagaactcttggctcacaaggggctgctcaatctcacatattaccagcaaatccaggtgcagaaaaaggacaacaagatatttgagatctcctgttgcagtgaccatcgatgcaagtggcttccagcttctatgaacaccgtctccacccagtccctgaccctggcgatcgattcttgtcatggcactgtggttgctctccgctatgcttggaccacgtggccttgtgaatataagcagtgtcccctataccaccccagtagtgccctgccagcccctcccttcattgctttcattacagaccagggtcctggacatcagagcaatgttgctaaatgactgtttcagtatgatcagaacttagatataaggatgggtccttcagattttagcatttaggagtttcaataataaccattgcttttaaaggaaattaatagaaagcctcattgaatggctttcagctagcacatggctgtttctatattctgatgagcccaggcttataggtaacttgaaatgcttgctttttgttccctagttggtctaagggtctgtattggactaattctgaactacagacaaattggacctcaatgtcatttacttccctcatattaatgggagtgaaatgtctaatacttttgcccctttttatccagagttgtgggaatctcaggattggaagagattttaaaggccacataggccagctagtgttcatgtgttctttataaaatttctcccatccaagtactaaccaggcccgaccctgcttagcttccgagatcagatgagatcaggcgcgttcagggtgatatggccgtagacgtctttacaaaattcctgacaggtggttactgaatctctctatgaactttccattcaaaactttccaagtttttccttatgtggaaccgaaatctttctttctcccgtgaaactttactactatcagataattgaagacagatctctttgtattctcttcaagcccaaaccaattctgttccttcaatctaaatagtggtaatatgaatgtttaagaaatgaaataagaaacatgtgcaggcactttggaaggtgctaagtgactgccctaaggaatgaaaagcaagggccaggtgggagtagcccagcgaaggcacttgggctgccaggaacaggaggcgtgggaaactctggcttaggaaaacatgaacacaggggcaacagaggcaaactgttgttcgagttaaatataaatctcaggctctttaaaggtaaaaggtttaaggataatccatttggaagaagaaaagagtgaggctgaaagtaaagccacatgacaagcatataaaaaaaaatgcagatgatacaaatatgaaagaggccttcagtgtttgtttattaagaatcttaatgcagtttactgatggattaaaaacagctaacattgtctgaaaattatgttacctataagaagttggaaataaataaaagcataatcactagtgatgtg

SEQ ID NO: 181319 - DNA, 1980 bp, Homo sapiens
  Payload ID: 15715
  Gene Symbol: SIAE
  Gene Name: sialic acid acetylesterase
  Uniprot ID: Q9HAT2
  ENST ID: ENST00000618733
  CDS Start-End: 410-1876
ggagtgcccaggatggagtgcagtggctattcacaggtttaatcatagctcactaccgtcttgaatccctgggctcaagtgatcctcctgcctcagcccctgagtagctggtactaaagttaccttccacgctgtatgtccgtgagaaatacaatgaagacggtctgaataatgaactggtaatcttcgataatatgaaacgaatttaagagaacatatcaaagagaaggctctcaaaataggctgctgcaaaagctggtatattgtccggttgctctctcagaatctcgcgtgtcagcccttcaagaagattcccaaatccttgtggaattcggtagtgggtgttggagaatggaatcgacatcttcttggtattggttttcgctttgcttcatacatcaataatgatatggtgctgcagaaggagcctgctggggcagtgatatggggcttcggtacacctggagccacagtgaccgtgaccctgcgccaaggtcaggaaaccatcatgaagaaagtgaccagtgtgaaagctcactctgatacgtggatggtggtactggatcctatgaagcctggaggacctttcgaagtgatggcacaacagactttggagaaaataaacttcaccctgagagttcatgacgtcctgtttggagatgtctggctctgtagtgggcagagtaacatgcagatgactgtgttacagatatttaatgctacaagggagttgtctaacactgcggcatatcagtctgtccgcatcctctctgtctctcccattcaagcagagcaggagctggaggaccttgttgcggttgacttgcagtggtctaagcccacctcagaaaacttaggccatggatatttcaagtacatgtcagcagtgtgctggctctttggacgtcacctttatgacactctgcagtatcccatcgggctgatcgcctccagctggggcgggacacccattgaagcctggtcatctggacggtcactgaaagcctgtggggtccctaaacaagggtccattccatacgattctgtaactggtcccagtaagcactctgttctctggaatgccatgatccatccactgtgcaatatgactctgaaaggggtagtatggtaccagggggagtccaatataaattataacacggatctgtacaattgcacattccctgcactcatcgaagactggcgtgaaaccttccaccgtggttcccaggggcagacggagcgtttcttcccatttggacttgtccagttatcttcagatttgtctaagaagagctcagacgatggatttccccagatccgttggcatcaaacagcagacttcggctatgtccccaacccaaagatgcccaatactttcatggctgtagctatggatctctgtgatagagactcgccttttggcagcatccaccctcgagataaacagactgtggcttatcggctgcatttgggggcccgtgctctggcttatggtgagaagaatttgacctttgaaggaccactgcctgagaagatagaactcttggctcacaaggggctgctcaatctcacatattaccagcaaatccaggtgcagaaaaaggacaacaagatatttgagatctcctgttgcagtgaccatcgatgcaagtggcttccagcttctatgaacaccgtctccacccagtccctgaccctggcgatcgattcttgtcatggcactgtggttgctctccgctatgcttggaccacgtggccttgtgaatataagcagtgtcccctataccaccccagtagtgccctgccagcccctcccttcattgctttcattacagaccagggtcctggacatcagagcaatgttgctaaatgactgtttcagtatgatcagaacttagatataaggatgggtccttcagattttagcatttaggagtttcaataataaccattgcttttaaaggaaattaatagaaa

SEQ ID NO: 181320 - DNA, 6720 bp, Homo sapiens
  Payload ID: 15716
  Gene Symbol: SIGLEC1
  Gene Name: sialic acid binding Ig-like lectin 1, sialoadhesin
  Uniprot ID: Q9BZZ2
  ENST ID: ENST00000344754
  CDS Start-End: 1-5130
atgggcttcttgcccaagcttctcctcctggcctcattcttcccagcaggccaggcctcatggggcgtctccagtccccaggacgtgcagggtgtgaaggggtcttgcctgcttatcccctgcatcttcagcttccctgccgacgtggaggtgcccgacggcatcacggccatctggtactacgactactcgggccagcggcaggtggtgagccactcggcggaccccaagctggtggaggcccgcttccgcggccgcaccgagttcatggggaaccccgagcacagggtgtgcaacctgctgctgaaggacctgcagcccgaggactctggttcctacaacttccgcttcgagatcagtgaggtcaaccgctggtcagatgtgaaaggcaccttggtcacagtaacagaggagcccagggtgcccaccattgcctccccggtggagcttctcgagggcacagaggtggacttcaactgctccactccctacgtatgcctgcaggagcaggtcagactgcagtggcaaggccaggaccctgctcgctctgtcaccttcaacagccagaagtttgagcccaccggcgtcggccacctggagaccctccacatggccatgtcctggcaggaccacggccggatcctgcgctgccagctctccgtggccaatcacagggctcagagcgagattcacctccaagtgaagtatgcccccaagggtgtgaagatcctcctcagcccctcggggaggaacatccttccaggtgagctggtcacactcacctgccaggtgaacagcagctaccctgcagtcagttccattaagtggctcaaggatggggtacgcctccaaaccaagactggtgtgctgcacctgccccaggcagcctggagcgatgctggcgtctacacctgccaagctgagaacggcgtgggctctttggtctcaccccccatcagcctccacatcttcatggctgaggtccaggtgagcccagcaggtcccatcctggagaaccagacagtgacactagtctgcaacacacccaatgaggcacccagtgatctccgctacagctggtacaagaaccatgtcctgctggaggatgcccactcccataccctccggctgcacttggccactagggctgatactggcttctacttctgtgaggtgcagaacgtccatggcagcgagcgctcgggccctgtcagcgtggtagtcaaccacccgcctctcactccagtcctgacagccttcctggagacccaggcgggacttgtgggcatccttcactgctctgtggtcagtgagcccctggccacactggtgctgtcacatgggggtcatatcctggcctccacctccggggacagtgatcacagcccacgcttcagtggtacctctggtcccaactccctgcgcctggagatccgagacctggaggaaactgacagtggggagtacaagtgctcagccaccaactcccttggaaatgcaacctccaccctggacttccatgccaatgccgcccgtctcctcatcagcccggcagccgaggtggtggaaggacaggcagtgacactgagctgcagaagcggcctaagccccacacctgatgcccgcttctcctggtacctgaatggagccctgcttcacgagggtcccggcagcagcctcctgctccccgcggcctccagcactgacgccggctcataccactgccgggcccgggacggccacagtgccagtggcccctcttcgccagctgttctcactgtgctctacccccctcgacaaccaacattcaccaccaggctggaccttgatgccgctggggccggggctggacggcgaggcctccttttgtgccgtgtggacagcgacccccccgccaggctgcagctgctccacaaggaccgtgttgtggccacttccctgccatcagggggtggctgcagcacctgtgggggctgttccccacgcatgaaggtcaccaaagcccccaacttgctgcgtgtggagattcacaaccctttgctggaagaggagggcttgtacctctgtgaggccagcaatgccctgggcaacgcctccacctcagccaccttcaatggccaggccactgtcctggccattgcaccatcacacacacttcaggagggcacagaagccaacttgacttgcaacgtgagccgggaagctgctggcagccctgctaacttctcctggttccgaaatggggtgctgtgggcccagggtcccctggagaccgtgacactgctgcccgtggccagaactgatgctgccctttacgcctgccgcatcctgactgaggctggtgcccagctctccactcccgtgctcctgagtgtactctatcccccggaccgtccaaagctgtcagccctcctagacatgggccagggccacatggctctgttcatctgcactgtggacagccgccccctggccttgctggccttgttccatggggagcacctcctggccaccagcctgggtccccaggtcccatcccatggtcggttccaggctaaagctgaggccaactccctgaagttagaggtccgagaactgggccttggggactctggcagctaccgctgtgaggccacaaatgttcttggatcatccaacacctcactcttcttccaggtccgaggagcctgggtccaggtgtcaccatcacctgagctccaagagggccaggctgtggtcctgagctgccaggtacacacaggagtcccagaggggacctcatatcgttggtatcgggatggccagcccctccaggagtcgacctcggccacgctccgctttgcagccataactttgacacaagctggggcctatcattgccaagcccaggccccaggctcagccaccacgagcctagctgcacccatcagcctccacgtgtcctatgccccacgccacgtcacactcactaccctgatggacacaggccctggacgactgggcctcctcctgtgccgtgtggacagtgaccctccggcccagctgcggctgctccacggggatcgccttgtggcctccaccctacaaggtgtggggggacccgaaggcagctctcccaggctgcatgtggctgtggcccccaacacactgcgtctggagatccacggggctatgctggaggatgagggtgtctatatctgtgaggcctccaacaccctgggccaggcctcggcctcagctgacttcgacgctcaagctgtgaatgtgcaggtgtggcccggggctaccgtgcgggaggggcagctggtgaacctgacctgccttgtgtggaccactcacccggcccagctcacctacacatggtaccaggatgggcagcagcgcctggatgcccactccatccccctgcccaacgtcacagtcagggatgccacctcctaccgctgcggtgtgggcccccctggtcgggcaccccgcctctccagacctatcaccttggacgtcctctacgcgccccgcaacctgcgcctgacctacctcctggagagccatggcgggcagctggccctggtactgtgcactgtggacagccgcccgcccgcccagctggccctcagccacgccggtcgcctcttggcctcctcgacagcagcctctgtccccaacaccctgcgcctggagctgcgagggccacagcccagggatgagggtttctacagctgctctgcccgcagccctctgggccaggccaacacgtccctggagctgcggctggagggtgtgcgggtgatcctggctccggaggctgccgtgcctgaaggtgcccccatcacagtgacctgtgcggaccctgctgcccacgcacccacactctatacttggtaccacaacggtcgttggctgcaggagggtccagctgcctcactctcattcctggtggccacgcgggctcatgcaggcgcctactcttgccaggcccaggatgcccagggcacccgcagctcccgtcctgctgccctgcaagtcctctatgcccctcaggacgctgtcctgtcctccttccgggactccagggccagatccatggctgtgatacagtgcactgtggacagtgagccacctgctgagctggccctatctcatgatggcaaggtgctggccacgagcagcggggtccacagcttggcatcagggacaggccatgtccaggtggcccgaaacgccctacggctgcaggtgcaagatgtgcctgcaggtgatgacacctatgtttgcacagcccaaaacttgctgggctcaatcagcaccatcgggcggttgcaggtagaaggtgcacgcgtggtggcagagcctggcctggacgtgcctgagggcgctgccctgaacctcagctgccgcctcctgggtggccctgggcctgtgggcaactccacctttgcatggttctggaatgaccggcggctgcacgcggagcctgtgcccactctcgccttcacccacgtggctcgtgctcaagctgggatgtaccactgcctggctgagctccccactggggctgctgcctctgctccagtcatgctccgtgtgctctaccctcccaagacgcccaccatgatggtcttcgtggagcctgagggtggcctccggggcatcctggattgccgagtggacagcgagccgctcgccagcctgactctccaccttggcagtcgactggtggcctccagtcagccccagggtgctcctgcagagccacacatccatgtcctggcttcccccaatgccctgagggtggacatcgaggcgctgaggcccagcgaccaaggggaatacatctgttctgcctcaaatgtcctgggctctgcctctacctccacctactttggggtcagagccctgcaccgcctgcatcagttccagcagctgctctgggtcctgggactgctggtgggcctcctgctcctgctgttgggcctgggggcctgctacacctggagaaggaggcgtgtttgtaagcagagcatgggcgagaattcggtggagatggcttttcagaaagagaccacgcagctcattgatcctgatgcagccacatgtgagacctcaacctgtgccccacccctgggctgaccagtggtgttgcctgccctccggaggagaaagtggccagaatctgtgatgactccagcctatgaatgtgaatgaggcagtgttgagtcctgcccgcctctacgaaaacagctctgtgacatctgactttttatgacctggccccaagcctcttgcccccccaaaaatgggtggtgagaggtctgcccaggagggtgttgaccctggaggacactgaagagcactgagctgatctcgctctctcttctctggatctcctcccttctctccatttctccctcaaaggaagccctgccctttcacatccttctcctcgaaagtcaccctggactttggttggattgcagcatcctgcatcctcagaggctcaccaaggcattctgtattcaacagagtatcagtcagcctgctctaacaagagaccaaatacagtgacttcaacatgatagaattttatttttctctcccacgctagtctggctgttacgatggtttatgatgttggggctcaggatccttctatcttccttttctctatccctaaaatgatgcctttgattgtgaggctcaccatggccccgctttgtccacatgccctccagccagaagaaggaagagtggaggtagaagcacacccatgcccatggtggacgcaactcagaagctgcacaggacttttccactcacttcccattggctggagtattgtcacatggctactgcaagctacaagggagactgggaaatgtagtttttattttgagtccagaggacatttggaattggacttccaaaggactcccaactgtgagctcatccctgagacttttgacattgttgggaatgccaccagcaggccatgttttgtctcagtgcccatctactgagggccagggtgtgcccctggccattctggttgtgggcttcctggaagaggtgatcactctcacactaagactgaggaaataaaaaaggtttggtgttttcctagggagagagcatgccaggcagtggagttgcctaagcagacatccttgtgccagatttggcccctgaaagaagagatgccctcattcccaccaccaccccccctacccccagggactgggtactaccttactggcccttacaagagtggagggcagacacagatgttgtcagcatccttattcctgctccagatgcatctctgttcatgactgtgtgagctcctgtccttttcctggagaccctgtgtcgggctgttaaagagaatgagttaccaagaaggaatgacgtgcccctgcgaatcagggaccaacaggagagagctcttgagtgggctagtgactccccctgcagcctggtggagatggtgtgaggagcgaagagccctctgctctaggatttgggttgaaaaacagagagagaagtggggagttgccacaggagctaacacgctgggaggcagttgggggcgggtgaactttgtgtagccgaggccgcaccctccctcattccaggctcattcattttcatgctccattgccagactcttgctgggagcccgtccagaatgtcctcccaataaaactccatcctatgacgcaa

SEQ ID NO: 181321 - DNA, 4326 bp, Homo sapiens
  Payload ID: 15716
  Gene Symbol: SIGLEC1
  Gene Name: sialic acid binding Ig-like lectin 1, sialoadhesin
  ENST ID: ENST00000419548
  CDS Start-End: 1-1390
gctggccctggtactgtgcactgtggacagccgcccgcccgcccagctggccctcagccacgccggtcgcctcttggcctcctcgacagcagcctctgtccccaacaccctgcgcctggagctgcgagggccacagcccagggatgagggtttctacagctgctctgcccgcagccctctgggccaggccaacacgtccctggagctgcggctggagggtgtgcgggtgatcctggctccggaggctgccgtgcctgaaggtgcccccatcacagtgacctgtgcggaccctgctgcccacgcacccacactctatacttggtaccacaacggtcgttggctgcaggagggtccagctgcctcactctcattcctggtggccacgcgggctcatgcaggcgcctactcttgccaggcccaggatgcccagggcacccgcagctcccgtcctgctgccctgcaagtcctctatgcccctcaggacgctgtcctgtcctccttccgggactccagggccagatccatggctgtgatacagtgcactgtggacagtgagccacctgctgagctggccctatctcatgatggcaaggtgctggccacgagcagcggggtccacagcttggcatcagggacaggccatgtccaggtggcccgaaacgccctacggctgcaggtgcaagatgtgcctgcaggtgatgacacctatgtttgcacagcccaaaacttgctgggctcaatcagcaccatcgggcggttgcaggtagaaggtgcacgcgtggtggcagagcctggcctggacgtgcctgagggcgctgccctgaacctcagctgccgcctcctgggtggccctgggcctgtgggcaactccacctttgcatggttctggaatgaccggcggctgcacgcggagcctgtgcccactctcgccttcacccacgtggctcgtgctcaagctgggatgtaccactgcctggctgagctccccactggggctgctgcctctgctccagtcatgctccgtgtgctctaccctcccaagacgcccaccatgatggtcttcgtggagcctgagggtggcctccggggcatcctggattgccgagtggacagcgagccgctcgccagcctgactctccaccttggcagtcgactggtggcctccagtcagccccagggtgctcctgcagagccacacatccatgtcctggcttcccccaatgccctgagggtggacatcgaggcgctgaggcccagcgaccaaggggaatacatctgttctgcctcaaatgtcctgggctctgcctctacctccacctactttggggtcagaggtgaggggagggggctccatctcccaggccactctgcacaaaagcccagctcttaggcccaaaggcttccttccctgtatccctcctgctgcagcatgatttgcctgtcgactctaaactgattgctcggggcacccttgtgtggagagcttcagcgataaagcaaaagttagaaggtgtcatcttgggtgggtccccttggaaggaagcactgggggcctgcagctgtggctgctctgagtcccgctctgtgttccagccctgcaccgcctgcatcagttccagcagctgctctgggtcctgggactgctggtgggcctcctgctcctgctgttgggcctgggggcctgctacacctggaggtgggtctggagctgggagtgggccagaagattggggtaaggcagcccacctcgtcttctccccaaattcccccaggtcctttaggacctcctattaagttcacaggctgcctacttcccagactgcccctccaaattggaaatcccttctagaattgtccctaaatcctccttgctgtagtttccttctttcctcctctctgccctggctgtgctaaagcaagggctagggaggaagacagaggaagcacccactctccatgaggttcccacgctcttgtggtctggagccagcctgtggggagcgggagaggaatgggggcaggaggtggggaggggagaggctctctgagtccactccgggccttgcagaaggaggcgtgtttgtaagcagagcatgggcgagaattcggtggagatggcttttcagaaagagaccacgcaggtatccattcaacacacacgggcagatataatacccagctaacccacagtgccaactggcatctggagactgctgtcatttagaggatggtgcctgggaccaaggggaggttggggagagtgtgcagggaaccaggagcccctcaggagataggagagccctgttctgctcggggcagagggaatccctgtgtcagctggcggctggcttagaggactaggggagactttctggacttggcagcatcccctccatttccaagacacgtatgttctgactcccccacctttgttctgaggcctcttccccactcccaagcctgcccgtcacctgggcagaagtgaaagtcagtttctcctcccctgtggtgtgtcccttctgcagctgattcacctggtaggccagggctccaagtcacacttccagccatgcacactcccaccaatcctcttgggaccccacctgaggctgggggcctgggggcctgccctggctcccagaggcctcctgtgaccagggttttctctgtgggaagctcattgatcctgatgcagccacatgtgagacctcaacctgtgccccacccctgggctgaccagtggtgttgcctgccctccggaggagaaagtggccagaatctgtgatgactccagcctatgaatgtgaatgaggcagtgttgagtcctgcccgcctctacgaaaacagctctgtgacatctgactttttatgacctggccccaagcctcttgcccccccaaaaatgggtggtgagaggtctgcccaggagggtgttgaccctggaggacactgaagagcactgagctgatctcgctctctcttctctggatctcctcccttctctccatttctccctcaaaggaagccctgccctttcacatccttctcctcgaaagtcaccctggactttggttggattgcagcatcctgcatcctcagaggctcaccaaggcattctgtattcaacagagtatcagtcagcctgctctaacaagagaccaaatacagtgacttcaacatgatagaattttatttttctctcccacgctagtctggctgttacgatggtttatgatgttggggctcaggatccttctatcttccttttctctatccctaaaatgatgcctttgattgtgaggctcaccatggccccgctttgtccacatgccctccagccagaagaaggaagagtggaggtagaagcacacccatgcccatggtggacgcaactcagaagctgcacaggacttttccactcacttcccattggctggagtattgtcacatggctactgcaagctacaagggagactgggaaatgtagtttttattttgagtccagaggacatttggaattggacttccaaaggactcccaactgtgagctcatccctgagacttttgacattgttgggaatgccaccagcaggccatgttttgtctcagtgcccatctactgagggccagggtgtgcccctggccattctggttgtgggcttcctggaagaggtgatcactctcacactaagactgaggaaataaaaaaggtttggtgttttcctagggagagagcatgccaggcagtggagttgcctaagcagacatccttgtgccagatttggcccctgaaagaagagatgccctcattcccaccaccaccccccctacccccagggactgggtactaccttactggcccttacaagagtggagggcagacacagatgttgtcagcatccttattcctgctccagatgcatctctgttcatgactgtgtgagctcctgtccttttcctggagaccctgtgtcgggctgttaaagagaatgagttaccaagaaggaatgacgtgcccctgcgaatcagggaccaacaggagagagctcttgagtgggctagtgactccccctgcagcctggtggagatggtgtgaggagcgaagagccctctgctctaggatttgggttgaaaaacagagagagaagtggggagttgccacaggagctaacacgctgggaggcagttgggggcgggtgaactttgtgtagccgaggccgcaccctccctcattccaggctcattcattttcatgctccattgccagactcttgctgggagcccgtccagaatgtcctcccaataaaactccatcctatgacgcaa

SEQ ID NO: 181322 - DNA, 3109 bp, Homo sapiens
  Payload ID: 15717
  Gene Symbol: SIGLEC10
  Gene Name: sialic acid binding Ig-like lectin 10
  Uniprot ID: Q96LC7
  ENST ID: ENST00000353836
  CDS Start-End: 223-2031
gcccccaggagacccagaggacaactgggcaaggtgggccggagagtgtgggggaaggcaaaggagttctgtgagctcagcgtctgaagctcatttcatgcatcaggccccagggctcagcttccgccttcggcttccccttctgccaagagccctgagccactcacagcacgaccagagaacaggcctgtctcaggcaggccctgcgcctcctatgcggagatgctactgccactgctgctgtcctcgctgctgggcgggtcccaggctatggatgggagattctggatacgagtgcaggagtcagtgatggtgccggagggcctgtgcatctctgtgccctgctctttctcctacccccgacaggactggacagggtctaccccagcttatggctactggttcaaagcagtgactgagacaaccaagggtgctcctgtggccacaaaccaccagagtcgagaggtggaaatgagcacccggggccgattccagctcactggggatcccgccaaggggaactgctccttggtgatcagagacgcgcagatgcaggatgagtcacagtacttctttcgggtggagagaggaagctatgtgagatataatttcatgaacgatgggttctttctaaaagtaacagccctgactcagaagcctgatgtctacatccccgagaccctggagcccgggcagccggtgacggtcatctgtgtgtttaactgggcctttgaggaatgtccacccccttctttctcctggacgggggctgccctctcctcccaaggaaccaaaccaacgacctcccacttctcagtgctcagcttcacgcccagaccccaggaccacaacaccgacctcacctgccatgtggacttctccagaaagggtgtgagcgcacagaggaccgtccgactccgtgtggcctatgcccccagagaccttgttatcagcatttcacgtgacaacacgccagccctggagccccagccccagggaaatgtcccatacctggaagcccaaaaaggccagttcctgcggctcctctgtgctgctgacagccagccccctgccacactgagctgggtcctgcagaacagagtcctctcctcgtcccatccctggggccctagacccctggggctggagctgcccggggtgaaggctggggattcagggcgctacacctgccgagcggagaacaggcttggctcccagcagcgagccctggacctctctgtgcagtatcctccagagaacctgagagtgatggtttcccaagcaaacaggacagtcctggaaaaccttgggaacggcacgtctctcccagtactggagggccaaagcctgtgcctggtctgtgtcacacacagcagccccccagccaggctgagctggacccagaggggacaggttctgagcccctcccagccctcagaccccggggtcctggagctgcctcgggttcaagtggagcacgaaggagagttcacctgccacgctcggcacccactgggctcccagcacgtctctctcagcctctccgtgcactataagaagggactcatctcaacggcattctccaacggagcgtttctgggaatcggcatcacggctcttcttttcctctgcctggccctgatcatcatgaagattctaccgaagagacggactcagacagaaaccccgaggcccaggttctcccggcacagcacgatcctggattacatcaatgtggtcccgacggctggccccctggctcagaagcggaatcagaaagccacaccaaacagtcctcggacccctcttccaccaggtgctccctccccagaatcaaagaagaaccagaaaaagcagtatcagttgcccagtttcccagaacccaaatcatccactcaagccccagaatcccaggagagccaagaggagctccattatgccacgctcaacttcccaggcgtcagacccaggcctgaggcccggatgcccaagggcacccaggcggattatgcagaagtcaagttccaatgagggtctcttaggctttaggactgggacttcggctagggaggaaggtagagtaagaggttgaagataacagagtgcaaagtttccttctctccctctctctctctctttctctctctctctctctttctctctcttttaaaaaaacatctggccagggcacagtggctcacgcctgtaatcccagcactttgggaggttgaggtgggcagatcgcctgaggtcgggagttcgagaccagcctggccaacttggtgaaaccccgtctctactaaaaatacaaaaattagctgggcatggtggcaggcgcctgtaatcctacctacttgggaagctgaggcaggagaatcacttgaacctgggagacggaggttgcagtgagccaagatcacaccattgcacgccagcctgggcaacaaagcgagactccatctcaaaaaaaaaatcctccaaatgggttgggtgtctgtaatcccagcactttgggaggctaaggtgggtggattgcttgagcccaggagttcgagaccagcctgggcaacatggtgaaaccccatctctacaaaaaatacaaaacatagctgggcttggtggtgtgtgcctgtagtcccagctgtcagacatttaaaccagagcaactccatctggaataggagctgaataaaatgaggctgagacctactgggctgcattctcagacagtggaggcattctaagtcacaggatgagacaggaggtccgtacaagatacaggtcataaagactttgctgataaaacagattgcagtaaagaagccaaccaaatcccaccaaaaccaagttggccacgagagtgacctctggtcgtcctcactgctacactcctgacagcaccatgacagtttacaaatgccatggcaacatcaggaagttacccgatatgtcccaaaagggggaggaatgaataatccaccccttgtttagcaaataagcaagaaataaccataaaagtgggcaaccagcagctctaggcgctgctcttgtctatggagtagccattcttttgttcctttactttcttaataaacttgctttcacctta

SEQ ID NO: 181323 - DNA, 2256 bp, Homo sapiens
  Payload ID: 15717
  Gene Symbol: SIGLEC10
  Gene Name: sialic acid binding Ig-like lectin 10
  Uniprot ID: Q96LC7
  ENST ID: ENST00000339313
  CDS Start-End: 118-2211
ggccccagggctcagcttccgccttcggcttccccttctgccaagagccctgagccactcacagcacgaccagagaacaggcctgtctcaggcaggccctgcgcctcctatgcggagatgctactgccactgctgctgtcctcgctgctgggcgggtcccaggctatggatgggagattctggatacgagtgcaggagtcagtgatggtgccggagggcctgtgcatctctgtgccctgctctttctcctacccccgacaggactggacagggtctaccccagcttatggctactggttcaaagcagtgactgagacaaccaagggtgctcctgtggccacaaaccaccagagtcgagaggtggaaatgagcacccggggccgattccagctcactggggatcccgccaaggggaactgctccttggtgatcagagacgcgcagatgcaggatgagtcacagtacttctttcgggtggagagaggaagctatgtgagatataatttcatgaacgatgggttctttctaaaagtaacagccctgactcagaagcctgatgtctacatccccgagaccctggagcccgggcagccggtgacggtcatctgtgtgtttaactgggcctttgaggaatgtccacccccttctttctcctggacgggggctgccctctcctcccaaggaaccaaaccaacgacctcccacttctcagtgctcagcttcacgcccagaccccaggaccacaacaccgacctcacctgccatgtggacttctccagaaagggtgtgagcgcacagaggaccgtccgactccgtgtggcctatgcccccagagaccttgttatcagcatttcacgtgacaacacgccagccctggagccccagccccagggaaatgtcccatacctggaagcccaaaaaggccagttcctgcggctcctctgtgctgctgacagccagccccctgccacactgagctgggtcctgcagaacagagtcctctcctcgtcccatccctggggccctagacccctggggctggagctgcccggggtgaaggctggggattcagggcgctacacctgccgagcggagaacaggcttggctcccagcagcgagccctggacctctctgtgcagtatcctccagagaacctgagagtgatggtttcccaagcaaacaggacagtcctggaaaaccttgggaacggcacgtctctcccagtactggagggccaaagcctgtgcctggtctgtgtcacacacagcagccccccagccaggctgagctggacccagaggggacaggttctgagcccctcccagccctcagaccccggggtcctggagctgcctcgggttcaagtggagcacgaaggagagttcacctgccacgctcggcacccactgggctcccagcacgtctctctcagcctctccgtgcactactccccgaagctgctgggcccctcctgctcctgggaggctgagggtctgcactgcagctgctcctcccaggccagcccggccccctctctgcgctggtggcttggggaggagctgctggaggggaacagcagccaggactccttcgaggtcacccccagctcagccgggccctgggccaacagctccctgagcctccatggagggctcagctccggcctcaggctccgctgtgaggcctggaacgtccatggggcccagagtggatccatcctgcagctgccagataagaagggactcatctcaacggcattctccaacggagcgtttctgggaatcggcatcacggctcttcttttcctctgcctggccctgatcatcatgaagattctaccgaagagacggactcagacagaaaccccgaggcccaggttctcccggcacagcacgatcctggattacatcaatgtggtcccgacggctggccccctggctcagaagcggaatcagaaagccacaccaaacagtcctcggacccctcttccaccaggtgctccctccccagaatcaaagaagaaccagaaaaagcagtatcagttgcccagtttcccagaacccaaatcatccactcaagccccagaatcccaggagagccaagaggagctccattatgccacgctcaacttcccaggcgtcagacccaggcctgaggcccggatgcccaagggcacccaggcggattatgcagaagtcaagttccaatgagggtctcttaggctttaggactgggacttcggctagggaggaagg

SEQ ID NO: 181324 - DNA, 2126 bp, Homo sapiens
  Payload ID: 15717
  Gene Symbol: SIGLEC10
  Gene Name: sialic acid binding Ig-like lectin 10
  Uniprot ID: Q96LC7
  ENST ID: ENST00000439889
  CDS Start-End: 157-2076
ttctgtgagctcagcgtctgaagctcatttcatgcatcaggccccagggctcagcttccgccttcggcttccccttctgccaagagccctgagccactcacagcacgaccagagaacaggcctgtctcaggcaggccctgcgcctcctatgcggagatgctactgccactgctgctgtcctcgctgctgggcgggtcccaggctatggatgggagattctggatacgagtgcaggagtcagtgatggtgccggagggcctgtgcatctctgtgccctgctctttctcctacccccgacaggactggacagggtctaccccagcttatggctactggttcaaagcagtgactgagacaaccaagggtgctcctgtggccacaaaccaccagagtcgagaggtggaaatgagcacccggggccgattccagctcactggggatcccgccaaggggaactgctccttggtgatcagagacgcgcagatgcaggatgagtcacagtacttctttcgggtggagagaggaagctatgtgagatataatttcatgaacgatgggttctttctaaaagtaacagtgctcagcttcacgcccagaccccaggaccacaacaccgacctcacctgccatgtggacttctccagaaagggtgtgagcgcacagaggaccgtccgactccgtgtggcctatgcccccagagaccttgttatcagcatttcacgtgacaacacgccagccctggagccccagccccagggaaatgtcccatacctggaagcccaaaaaggccagttcctgcggctcctctgtgctgctgacagccagccccctgccacactgagctgggtcctgcagaacagagtcctctcctcgtcccatccctggggccctagacccctggggctggagctgcccggggtgaaggctggggattcagggcgctacacctgccgagcggagaacaggcttggctcccagcagcgagccctggacctctctgtgcagtatcctccagagaacctgagagtgatggtttcccaagcaaacaggacagtcctggaaaaccttgggaacggcacgtctctcccagtactggagggccaaagcctgtgcctggtctgtgtcacacacagcagccccccagccaggctgagctggacccagaggggacaggttctgagcccctcccagccctcagaccccggggtcctggagctgcctcgggttcaagtggagcacgaaggagagttcacctgccacgctcggcacccactgggctcccagcacgtctctctcagcctctccgtgcactactccccgaagctgctgggcccctcctgctcctgggaggctgagggtctgcactgcagctgctcctcccaggccagcccggccccctctctgcgctggtggcttggggaggagctgctggaggggaacagcagccaggactccttcgaggtcacccccagctcagccgggccctgggccaacagctccctgagcctccatggagggctcagctccggcctcaggctccgctgtgaggcctggaacgtccatggggcccagagtggatccatcctgcagctgccagataagaagggactcatctcaacggcattctccaacggagcgtttctgggaatcggcatcacggctcttcttttcctctgcctggccctgatcatcatgaagattctaccgaagagacggactcagacagaaaccccgaggcccaggttctcccggcacagcacgatcctggattacatcaatgtggtcccgacggctggccccctggctcagaagcggaatcagaaagccacaccaaacagtcctcggacccctcttccaccaggtgctccctccccagaatcaaagaagaaccagaaaaagcagtatcagttgcccagtttcccagaacccaaatcatccactcaagccccagaatcccaggagagccaagaggagctccattatgccacgctcaacttcccaggcgtcagacccaggcctgaggcccggatgcccaagggcacccaggcggattatgcagaagtcaagttccaatgagggtctcttaggctttaggactgggacttcggctagggaggaaggtagag

SEQ ID NO: 181325 - DNA, 2442 bp, Homo sapiens
  Payload ID: 15717
  Gene Symbol: SIGLEC10
  Gene Name: sialic acid binding Ig-like lectin 10
  Uniprot ID: Q96LC7
  ENST ID: ENST00000442846
  CDS Start-End: 1-1365
atgctactgccactgctgctgtcctcgctgctgggcgggtcccaggctatggatgggagattctggatacgagtgcaggagtcagtgatggtgccggagggcctgtgcatctctgtgccctgctctttctcctacccccgacaggactggacagggtctaccccagcttatggctactggttcaaagcagtgactgagacaaccaagggtgctcctgtggccacaaaccaccagagtcgagaggtggaaatgagcacccggggccgattccagctcactggggatcccgccaaggggaactgctccttggtgatcagagacgcgcagatgcaggatgagtcacagtacttctttcgggtggagagaggaagctatgtgagatataatttcatgaacgatgggttctttctaaaagtaacagtgctcagcttcacgcccagaccccaggaccacaacaccgacctcacctgccatgtggacttctccagaaagggtgtgagcgcacagaggaccgtccgactccgtgtggcctatgcccccagagaccttgttatcagcatttcacgtgacaacacgccagatcctccagagaacctgagagtgatggtttcccaagcaaacaggacagtcctggaaaaccttgggaacggcacgtctctcccagtactggagggccaaagcctgtgcctggtctgtgtcacacacagcagccccccagccaggctgagctggacccagaggggacaggttctgagcccctcccagccctcagaccccggggtcctggagctgcctcgggttcaagtggagcacgaaggagagttcacctgccacgctcggcacccactgggctcccagcacgtctctctcagcctctccgtgcactataagaagggactcatctcaacggcattctccaacggagcgtttctgggaatcggcatcacggctcttcttttcctctgcctggccctgatcatcatgaagattctaccgaagagacggactcagacagaaaccccgaggcccaggttctcccggcacagcacgatcctggattacatcaatgtggtcccgacggctggccccctggctcagaagcggaatcagaaagccacaccaaacagtcctcggacccctcttccaccaggtgctccctccccagaatcaaagaagaaccagaaaaagcagtatcagttgcccagtttcccagaacccaaatcatccactcaagccccagaatcccaggagagccaagaggagctccattatgccacgctcaacttcccaggcgtcagacccaggcctgaggcccggatgcccaagggcacccaggcggattatgcagaagtcaagttccaatgagggtctcttaggctttaggactgggacttcggctagggaggaaggtagagtaagaggttgaagataacagagtgcaaagtttccttctctccctctctctctctctttctctctctctctctctttctctctcttttaaaaaaacatctggccagggcacagtggctcacgcctgtaatcccagcactttgggaggttgaggtgggcagatcgcctgaggtcgggagttcgagaccagcctggccaacttggtgaaaccccgtctctactaaaaatacaaaaattagctgggcatggtggcaggcgcctgtaatcctacctacttgggaagctgaggcaggagaatcacttgaacctgggagacggaggttgcagtgagccaagatcacaccattgcacgccagcctgggcaacaaagcgagactccatctcaaaaaaaaaatcctccaaatgggttgggtgtctgtaatcccagcactttgggaggctaaggtgggtggattgcttgagcccaggagttcgagaccagcctgggcaacatggtgaaaccccatctctacaaaaaatacaaaacatagctgggcttggtggtgtgtgcctgtagtcccagctgtcagacatttaaaccagagcaactccatctggaataggagctgaataaaatgaggctgagacctactgggctgcattctcagacagtggaggcattctaagtcacaggatgagacaggaggtccgtacaagatacaggtcataaagactttgctgataaaacagattgcagtaaagaagccaaccaaatcccaccaaaaccaagttggccacgagagtgacctctggtcgtcctcactgctacactcctgacagcaccatgacagtttacaaatgccatggcaacatcaggaagttacccgatatgtcccaaaagggggaggaatgaataatccaccccttgtttagcaaataagcaagaaataaccataaaagtgggcaaccagcagctctaggcgctgctcttgtctatggagtagccattcttttgttcctttactttcttaataaacttgctttcacctt

SEQ ID NO: 181326 - DNA, 2768 bp, Homo sapiens
  Payload ID: 15717
  Gene Symbol: SIGLEC10
  Gene Name: sialic acid binding Ig-like lectin 10
  Uniprot ID: Q96LC7
  ENST ID: ENST00000441969
  CDS Start-End: 56-1690
agcacgaccagagaacaggcctgtctcaggcaggccctgcgcctcctatgcggagatgctactgccactgctgctgtcctcgctgctgggcgggtcccaggctatggatgggagattctggatacgagtgcaggagtcagtgatggtgccggagggcctgtgcatctctgtgccctgctctttctcctacccccgacaggactggacagggtctaccccagcttatggctactggttcaaagcagtgactgagacaaccaagggtgctcctgtggccacaaaccaccagagtcgagaggtggaaatgagcacccggggccgattccagctcactggggatcccgccaaggggaactgctccttggtgatcagagacgcgcagatgcaggatgagtcacagtacttctttcgggtggagagaggaagctatgtgagatataatttcatgaacgatgggttctttctaaaagtaacagtgctcagcttcacgcccagaccccaggaccacaacaccgacctcacctgccatgtggacttctccagaaagggtgtgagcgcacagaggaccgtccgactccgtgtggcctatgcccccagagaccttgttatcagcatttcacgtgacaacacgccagccctggagccccagccccagggaaatgtcccatacctggaagcccaaaaaggccagttcctgcggctcctctgtgctgctgacagccagccccctgccacactgagctgggtcctgcagaacagagtcctctcctcgtcccatccctggggccctagacccctggggctggagctgcccggggtgaaggctggggattcagggcgctacacctgccgagcggagaacaggcttggctcccagcagcgagccctggacctctctgtgcagtatcctccagagaacctgagagtgatggtttcccaagcaaacaggacagtcctggaaaaccttgggaacggcacgtctctcccagtactggagggccaaagcctgtgcctggtctgtgtcacacacagcagccccccagccaggctgagctggacccagaggggacaggttctgagcccctcccagccctcagaccccggggtcctggagctgcctcgggttcaagtggagcacgaaggagagttcacctgccacgctcggcacccactgggctcccagcacgtctctctcagcctctccgtgcactataagaagggactcatctcaacggcattctccaacggagcgtttctgggaatcggcatcacggctcttcttttcctctgcctggccctgatcatcatgaagattctaccgaagagacggactcagacagaaaccccgaggcccaggttctcccggcacagcacgatcctggattacatcaatgtggtcccgacggctggccccctggctcagaagcggaatcagaaagccacaccaaacagtcctcggacccctcttccaccaggtgctccctccccagaatcaaagaagaaccagaaaaagcagtatcagttgcccagtttcccagaacccaaatcatccactcaagccccagaatcccaggagagccaagaggagctccattatgccacgctcaacttcccaggcgtcagacccaggcctgaggcccggatgcccaagggcacccaggcggattatgcagaagtcaagttccaatgagggtctcttaggctttaggactgggacttcggctagggaggaaggtagagtaagaggttgaagataacagagtgcaaagtttccttctctccctctctctctctctttctctctctctctctctttctctctcttttaaaaaaacatctggccagggcacagtggctcacgcctgtaatcccagcactttgggaggttgaggtgggcagatcgcctgaggtcgggagttcgagaccagcctggccaacttggtgaaaccccgtctctactaaaaatacaaaaattagctgggcatggtggcaggcgcctgtaatcctacctacttgggaagctgaggcaggagaatcacttgaacctgggagacggaggttgcagtgagccaagatcacaccattgcacgccagcctgggcaacaaagcgagactccatctcaaaaaaaaaatcctccaaatgggttgggtgtctgtaatcccagcactttgggaggctaaggtgggtggattgcttgagcccaggagttcgagaccagcctgggcaacatggtgaaaccccatctctacaaaaaatacaaaacatagctgggcttggtggtgtgtgcctgtagtcccagctgtcagacatttaaaccagagcaactccatctggaataggagctgaataaaatgaggctgagacctactgggctgcattctcagacagtggaggcattctaagtcacaggatgagacaggaggtccgtacaagatacaggtcataaagactttgctgataaaacagattgcagtaaagaagccaaccaaatcccaccaaaaccaagttggccacgagagtgacctctggtcgtcctcactgctacactcctgacagcaccatgacagtttacaaatgccatggcaacatcaggaagttacccgatatgtcccaaaagggggaggaatgaataatccaccccttgtttagcaaataagcaagaaataaccataaaagtgggcaaccagcagctctaggcgctgctcttgtctatggagtagccattcttttgttcctttactttcttaataaacttgctttcacctta

SEQ ID NO: 181327 - DNA, 1776 bp, Homo sapiens
  Payload ID: 15717
  Gene Symbol: SIGLEC10
  Gene Name: sialic acid binding Ig-like lectin 10
  Uniprot ID: Q96LC7
  ENST ID: ENST00000436984
  CDS Start-End: 62-1726
actcacagcacgaccagagaacaggcctgtctcaggcaggccctgcgcctcctatgcggagatgctactgccactgctgctgtcctcgctgctgggcgggtcccaggctatggatgggagattctggatacgagtgcaggagtcagtgatggtgccggagggcctgtgcatctctgtgccctgctctttctcctacccccgacaggactggacagggtctaccccagcttatggctactggttcaaagcagtgactgagacaaccaagggtgctcctgtggccacaaaccaccagagtcgagaggtggaaatgagcacccggggccgattccagctcactggggatcccgccaaggggaactgctccttggtgatcagagacgcgcagatgcaggatgagtcacagtacttctttcgggtggagagaggaagctatgtgagatataatttcatgaacgatgggttctttctaaaagtaacaggaaccaaaccaacgacctcccacttctcagtgctcagcttcacgcccagaccccaggaccacaacaccgacctcacctgccatgtggacttctccagaaagggtgtgagcgcacagaggaccgtccgactccgtgtggcctatgcccccagagaccttgttatcagcatttcacgtgacaacacgccagccctggagccccagccccagggaaatgtcccatacctggaagcccaaaaaggccagttcctgcggctcctctgtgctgctgacagccagccccctgccacactgagctgggtcctgcagaacagagtcctctcctcgtcccatccctggggccctagacccctggggctggagctgcccggggtgaaggctggggattcagggcgctacacctgccgagcggagaacaggcttggctcccagcagcgagccctggacctctctgtgcagtatcctccagagaacctgagagtgatggtttcccaagcaaacaggacagtcctggaaaaccttgggaacggcacgtctctcccagtactggagggccaaagcctgtgcctggtctgtgtcacacacagcagccccccagccaggctgagctggacccagaggggacaggttctgagcccctcccagccctcagaccccggggtcctggagctgcctcgggttcaagtggagcacgaaggagagttcacctgccacgctcggcacccactgggctcccagcacgtctctctcagcctctccgtgcactataagaagggactcatctcaacggcattctccaacggagcgtttctgggaatcggcatcacggctcttcttttcctctgcctggccctgatcatcatgaagattctaccgaagagacggactcagacagaaaccccgaggcccaggttctcccggcacagcacgatcctggattacatcaatgtggtcccgacggctggccccctggctcagaagcggaatcagaaagccacaccaaacagtcctcggacccctcttccaccaggtgctccctccccagaatcaaagaagaaccagaaaaagcagtatcagttgcccagtttcccagaacccaaatcatccactcaagccccagaatcccaggagagccaagaggagctccattatgccacgctcaacttcccaggcgtcagacccaggcctgaggcccggatgcccaagggcacccaggcggattatgcagaagtcaagttccaatgagggtctcttaggctttaggactgggacttcggctagggaggaaggtagag

SEQ ID NO: 181328 - DNA, 1841 bp, Homo sapiens
  Payload ID: 15717
  Gene Symbol: SIGLEC10
  Gene Name: sialic acid binding Ig-like lectin 10
  ENST ID: ENST00000525998
  CDS Start-End: 62-1600
actcacagcacgaccagagaacaggcctgtctcaggcaggccctgcgcctcctatgcggagatgctactgccactgctgctgtcctcgctgctgggcgggtcccaggctatggatgggagattctggatacgagtgcaggagtcagtgatggtgccggagggcctgtgcatctctgtgccctgctctttctcctacccccgacaggactggacagggtctaccccagcttatggctactggttcaaagcagtgactgagacaaccaagggtgctcctgtggccacaaaccaccagagtcgagaggtggaaatgagcacccggggccgattccagctcactggggatcccgccaaggggaactgctccttggtgatcagagacgcgcagatgcaggatgagtcacagtacttctttcgggtggagagaggaagctatgtgagatataatttcatgaacgatgggttctttctaaaagtaacagccctgactcagaagcctgatgtctacatccccgagaccctggagcccgggcagccggtgacggtcatctgtgtgtttaactgggcctttgaggaatgtccacccccttctttctcctggacgggggctgccctctcctcccaaggaaccaaaccaacgacctcccacttctcagtgctcagcttcacgcccagaccccaggaccacaacaccgacctcacctgccatgtggacttctccagaaagggtgtgagcgcacagaggaccgtccgactccgtgtggcctatgcccccagagaccttgttatcagcatttcacgtgacaacacgccagatcctccagagaacctgagagtgatggtttcccaagcaaacaggacagtcctggaaaaccttgggaacggcacgtctctcccagtactggagggccaaagcctgtgcctggtctgtgtcacacacagcagccccccagccaggctgagctggacccagaggggacaggttctgagcccctcccagccctcagaccccggggtcctggagctgcctcgggttcaagtggagcacgaaggagagttcacctgccacgctcggcacccactgggctcccagcacgtctctctcagcctctccgtgcactataagaagggactcatctcaacggcattctccaacggagcgtttctgggaatcggcatcacggctcttcttttcctctgcctggccctgatcatcatgaagattctaccgaagagacggactcagacagaaaccccgaggcccaggttctcccggcacagcacgatcctggattacatcaatgtggtcccgacggctggccccctggctcagaagcggaatcagaaagccacaccaaacagtcctcggacccctcttccaccaggtgctccctccccagaatcaaagaagaaccagaaaaagcagtatcagttgcccagtttcccagaacccaaatcatccactcaagccccagaatcccaggagagccaagaggagctccattatgccacgctcaacttcccaggcgtcagacccaggcctgaggcccggatgcccaagggcacccaggcggattatgcagaagtcaagttccaatgagggtctcttaggctttaggactgggacttcggctagggaggaaggtagagtaagaggttgaagataacagagtgcaaagtttccttctctccctctctctctctctttctctctctctctctctttctctctcttttaaaaaaacatctggccagggcacagtggctcacgcctgtaatcccagcactttgggaggttgaggtgggcagatcgcctgaggtcgggagttcgagaccagcct

SEQ ID NO: 181329 - DNA, 561 bp, Homo sapiens
  Payload ID: 15717
  Gene Symbol: SIGLEC10
  Gene Name: sialic acid binding Ig-like lectin 10
  ENST ID: ENST00000530476
  CDS Start-End: 3-561
ctatgcggagatgctactgccactgctgctgtcctcgctgctgggcggactggacagggtctaccccagcttatggctactggttcaaagcagtgactgagacaaccaagggtgctcctgtggccacaaaccaccagagtcgagaggtggaaatgagcacccggggccgattccagctcactggggatcccgccaaggggaactgctccttggtgatcagagacgcgcagatgcaggatgagtcacagtacttctttcgggtggagagaggaagctatgtgagatataatttcatgaacgatgggttctttctaaaagtaacagccctgactcagaagcctgatgtctacatccccgagaccctggagcccgggcagccggtgacggtcatctgtgtgtttaactgggcctttgaggaatgtccacccccttctttctcctggacgggggctgccctctcctcccaaggaaccaaaccaacgacctcccacttctcagtgctcagcttcacgcccagaccccaggaccacaacaccgacctcacctgccatgtggacttct

SEQ ID NO: 181330 - DNA, 596 bp, Homo sapiens
  Payload ID: 15717
  Gene Symbol: SIGLEC10
  Gene Name: sialic acid binding Ig-like lectin 10
  ENST ID: ENST00000529627
  CDS Start-End: 131-596
atttcatgcatcaggccccagggctcagcttccgccttcggcttccccttctgccaagagccctgagccactcacagcacgaccagagaacaggcctgtctcaggcaggccctgcgcctcctatgcggagatgctactgccactgctgctgtcctcgctgctgggcgtgctcagcttcacgcccagaccccaggaccacaacaccgacctcacctgccatgtggacttctccagaaagggtgtgagcgcacagaggaccgtccgactccgtgtggcctatgcccccagagaccttgttatcagcatttcacgtgacaacacgccagccctggagccccagccccagggaaatgtcccatacctggaagcccaaaaaggccagttcctgcggctcctctgtgctgctgacagccagccccctgccacactgagctgggtcctgcagaacagagtcctctcctcgtcccatccctggggccctagacccctggggctggagctgcccggggtgaaggctggggattcagggcgctacacctgccgagcggagaacaggcttggctcccagcagcgagccctggacctctctgtgcagt

SEQ ID NO: 181331 - DNA, 2479 bp, Homo sapiens
  Payload ID: 15718
  Gene Symbol: SIGLEC11
  Gene Name: sialic acid binding Ig-like lectin 11
  Uniprot ID: Q96RL6
  ENST ID: ENST00000426971
  CDS Start-End: 1-1809
atggtcccgggacaggcccagccccagagcccagagatgctgctgctgcccctgctgctgcccgtgctgggggcggggtccctgaacaaggatcccagttacagtcttcaagtgcagaggcaggtgccggtgccggagggcctgtgtgtcatcgtgtcttgcaacctctcctacccccgggatggctgggacgagtctactgctgcttatggctactggttcaaaggacggaccagcccaaagacgggtgctcctgtggccactaacaaccagagtcgagaggtggaaatgagcacccgggaccgattccagctcactggggatcccggcaaagggagctgctccttggtgatcagagacgcgcagagggaggatgaggcatggtacttctttcgggtggagagaggaagccgtgtgagacatagtttcctgagcaatgcgttctttctaaaagtaacagccctgactaagaagcctgatgtctacatccccgagaccctggagcccgggcagccggtgacggtcatctgtgtgtttaactgggctttcaagaaatgtccagccccttctttctcctggacgggggctgccctctcccctagaagaaccagaccaagcacctcccacttctcagtgctcagcttcacgcccagcccccaggaccacgacaccgacctcacctgccatgtggacttctccagaaagggtgtgagcgcacagaggaccgtccgactccgtgtggcctatgcccccaaagaccttattatcagcatttcacatgacaacacgtcagccctggaactccagggaaacgtcatatatctggaagttcagaaaggccagttcctgcggctcctctgtgctgctgacagccagccccctgccacgctgagctgggtcctgcaggacagagtcctctcctcgtcccacccctggggccccagaaccctggggctggagctgcgtggggtaagggccggggattcagggcgctacacctgccgagcggagaacaggcttggctcccagcagcaagccctggacctctctgtgcagtatcctccagagaacctgagagtgatggtttcccaagcaaacaggacagtcctggaaaacctcgggaacggcacatccctcccggtcctggagggccaaagcctgcgcctggtctgtgtcacccacagcagccccccagccaggctgagctggacccggtggggacagaccgtgggcccctcccagccctcagaccccggggtcctggagctgccacccattcaaatggagcacgaaggagagttcacctgccacgctcagcaccctctgggctcccagcacgtctctctcagcctctccgtgcactggaagctggagcatgggggaggacttggcctgggggctgccctgggagctggcgtcgctgccctgctcgctttctgttcctgccttgtcgtcttcagggtgaagatctgcaggaaggaagctcgcaagagggcagcagctgagcaggacgtgccctccaccctgggacccatctcccagggtcaccagcatgaatgctcggcaggcagctcccaagaccacccgcccccaggtgcagccacctacaccccggggaagggggaagagcaggagctccactatgcctccctcagcttccagggcctgaggctctgggagcctgcggaccaggaggcccccagcaccaccgagtactcggagatcaagatccacacaggacagcccctgaggggcccaggctttgggcttcaattggagagggagatgtcagggatggttccaaagtgaagaggtctccatggcaacaggacaccagcaagtgtgtgggagtcgcactggtgtgacggccagaactggactcagatttcagccccatccccaatgaagagcttgagtttgaagattatactttttttgagacagggtctgactctgtcctccaggccagagtccagtggtgcaatctcagctcactgtagcctcaacctgccaggttgaagtgagcctcccatttcagcctcccaagtagctgggactacaattgtgagccaccatgccaggctcattgttatatttttagtagagacagggttttgccatgtttccctggctggtctcagactcctgggctcaagcaatctgcccgcctctgcctcccaaagtgctgggattacagacgtgagccaccacagctggctgaagattatactttcaattcagagcgagtttgaagatgacactttgaggcatcgtgtctatggttcattactacagaagcttctctggatgtgtaaagcacaggaaaccaggcagaggaggcacagggtgctctccagaacgagaagccagctcctggagttgtttgctgcaactgccattccccgttgatgaccatgctcttccttcagaagagggagagtgagaggaccaagtccaagtggttcccatttgaacattt

SEQ ID NO: 181332 - DNA, 825 bp, Homo sapiens
  Payload ID: 15718
  Gene Symbol: SIGLEC11
  Gene Name: sialic acid binding Ig-like lectin 11
  ENST ID: ENST00000426296
  CDS Start-End: 1-181
gctgctggaggggaacagcagtcagggctccttcgaggtcacccccagctcagccgggccctgggccaacagctccctgagcctccatggagggctcagctccggcctcaggctccgctgtaaggcctggaacgtccacggggcccagagtggctctgtcttccagctgctaccagggtgaagatctgcaggaaggaagctcgcaagagggcagcagctgagcaggacgtgccctccaccctgggacccatctcccagggtcaccagcatgaatgctcggcaggcagctcccaagaccacccgcccccaggtgcagccacctacaccccggggaagggggaagagcaggagctccactatgcctccctcagcttccagggcctgaggctctgggagcctgcggaccaggaggcccccagcaccaccgagtactcggagatcaagatccacacaggacagcccctgaggggcccaggctttgggcttcaattggagagggagatgtcagggatggttccaaagtgaagaggtctccatggcaacaggacaccagcaagtgtgtgggagtcgcactggtgtgacggccagaactggactcagatttcagccccatccccaatgaagagcttgagtttgaagattatactttttttgagacagggtctgactctgtcctccaggccagagtccagtggtgcaatctcagctcactgtagcctcaacctgccaggttgaagtgagcctcccatttcagcctcccaagtagctgggactacaattgtgagccaccatgccaggctcattgttatatttttagtagagaca

SEQ ID NO: 181333 - DNA, 3173 bp, Homo sapiens
  Payload ID: 15718
  Gene Symbol: SIGLEC11
  Gene Name: sialic acid binding Ig-like lectin 11
  Uniprot ID: Q96RL6
  ENST ID: ENST00000447370
  CDS Start-End: 92-2188
cgaggctcctcctctgtggatggtcactgcccctccaccaggcttcctgctggaggagtttccttcccagccaggccggcccagaagccagatggtcccgggacaggcccagccccagagcccagagatgctgctgctgcccctgctgctgcccgtgctgggggcggggtccctgaacaaggatcccagttacagtcttcaagtgcagaggcaggtgccggtgccggagggcctgtgtgtcatcgtgtcttgcaacctctcctacccccgggatggctgggacgagtctactgctgcttatggctactggttcaaaggacggaccagcccaaagacgggtgctcctgtggccactaacaaccagagtcgagaggtggaaatgagcacccgggaccgattccagctcactggggatcccggcaaagggagctgctccttggtgatcagagacgcgcagagggaggatgaggcatggtacttctttcgggtggagagaggaagccgtgtgagacatagtttcctgagcaatgcgttctttctaaaagtaacagccctgactaagaagcctgatgtctacatccccgagaccctggagcccgggcagccggtgacggtcatctgtgtgtttaactgggctttcaagaaatgtccagccccttctttctcctggacgggggctgccctctcccctagaagaaccagaccaagcacctcccacttctcagtgctcagcttcacgcccagcccccaggaccacgacaccgacctcacctgccatgtggacttctccagaaagggtgtgagcgcacagaggaccgtccgactccgtgtggcctatgcccccaaagaccttattatcagcatttcacatgacaacacgtcagccctggaactccagggaaacgtcatatatctggaagttcagaaaggccagttcctgcggctcctctgtgctgctgacagccagccccctgccacgctgagctgggtcctgcaggacagagtcctctcctcgtcccacccctggggccccagaaccctggggctggagctgcgtggggtaagggccggggattcagggcgctacacctgccgagcggagaacaggcttggctcccagcagcaagccctggacctctctgtgcagtatcctccagagaacctgagagtgatggtttcccaagcaaacaggacagtcctggaaaacctcgggaacggcacatccctcccggtcctggagggccaaagcctgcgcctggtctgtgtcacccacagcagccccccagccaggctgagctggacccggtggggacagaccgtgggcccctcccagccctcagaccccggggtcctggagctgccacccattcaaatggagcacgaaggagagttcacctgccacgctcagcaccctctgggctcccagcacgtctctctcagcctctccgtgcactaccctccacagctgctgggcccctcctgctcctgggaggctgagggtctgcactgcagctgctcctcccaggccagcccggccccctctctgcgctggtggcttggggaggagctgctggaggggaacagcagtcagggctccttcgaggtcacccccagctcagccgggccctgggccaacagctccctgagcctccatggagggctcagctccggcctcaggctccgctgtaaggcctggaacgtccacggggcccagagtggctctgtcttccagctgctaccagggaagctggagcatgggggaggacttggcctgggggctgccctgggagctggcgtcgctgccctgctcgctttctgttcctgccttgtcgtcttcagggtgaagatctgcaggaaggaagctcgcaagagggcagcagctgagcaggacgtgccctccaccctgggacccatctcccagggtcaccagcatgaatgctcggcaggcagctcccaagaccacccgcccccaggtgcagccacctacaccccggggaagggggaagagcaggagctccactatgcctccctcagcttccagggcctgaggctctgggagcctgcggaccaggaggcccccagcaccaccgagtactcggagatcaagatccacacaggacagcccctgaggggcccaggctttgggcttcaattggagagggagatgtcagggatggttccaaagtgaagaggtctccatggcaacaggacaccagcaagtgtgtgggagtcgcactggtgtgacggccagaactggactcagatttcagccccatccccaatgaagagcttgagtttgaagattatactttttttgagacagggtctgactctgtcctccaggccagagtccagtggtgcaatctcagctcactgtagcctcaacctgccaggttgaagtgagcctcccatttcagcctcccaagtagctgggactacaattgtgagccaccatgccaggctcattgttatatttttagtagagacagggttttgccatgtttccctggctggtctcagactcctgggctcaagcaatctgcccgcctctgcctcccaaagtgctgggattacagacgtgagccaccacagctggctgaagattatactttcaattcagagcgagtttgaagatgacactttgaggcatcgtgtctatggttcattactacagaagcttctctggatgtgtaaagcacaggaaaccaggcagaggaggcacagggtgctctccagaacgagaagccagctcctggagttgtttgctgcaactgccattccccgttgatgaccatgctcttccttcagaagagggagagtgagaggaccaagtccaagtggttcccatttgaacatttaaaaaaaaaaaaaaggctgggcatggtggctcacgcctgtaatctcaacactttgggaggctgaagtgggtggatcacaagtcaggagttcaagaccagcctgggcaagatggtgaaaccccatctctactaaaaatacaaaaattagccgggcatggtggcgggcgcctaaaatcccagctactcgggagactaggcagagaattggttgaacccgggaggtggaggttgcagtgagccgagatcgtcccactgcactccagcctgggcaacagagtgagactctgtttctaaataaataaatgaataaataaa

SEQ ID NO: 181334 - DNA, 2121 bp, Homo sapiens
  Payload ID: 15719
  Gene Symbol: SIGLEC12
  Gene Name: sialic acid binding Ig-like lectin 12 (gene/pseudogene)
  Uniprot ID: Q96PQ1
  ENST ID: ENST00000291707
  CDS Start-End: 57-1844
gaagaaccctgaggaacagacttacctcagcaaccctggcacctccaacccgacacatgctactgctgctgctactgctgccacccctgctctgtgggagagtgggggctaaggaacagaaggattacctgctgacaatgcagaagtccgtgacggtgcaggagggcctgtgtgtctctgtgctttgctccttctcctacccccaaaatggctggactgcctccgatccagttcatggctactggttccgggcaggggaccatgtaagccggaacattccagtggccacaaacaacccagctcgagcagtgcaggaggagactcgggaccgattccacctccttggggacccacagaacaaggattgtaccctgagcatcagagacaccagagagagtgatgcagggacatacgtcttttgtgtagagagaggaaatatgaaatggaattataaatatgaccagctctctgtgaatgtgacagcgtcccaggacctactgtcaagatacaggctggaggtgccagagtcggtgactgtgcaggagggtctgtgtgtctctgtgccctgcagtgtcctttacccccattacaactggactgcctctagccctgtttatggatcctggttcaaggaaggggccgatataccatgggatattccagtggccacaaacaccccaagtggaaaagtgcaagaggatacccacggtcgattcctcctccttggggacccacagaccaacaactgctccctgagcatcagagatgccaggaagggggattcagggaagtactacttccaggtggagagaggaagcaggaaatggaactacatatatgacaagctctctgtgcatgtgacagccctgactcacatgcccaccttctccatcccggggaccctggagtctggccaccccaggaacctgacctgctctgtgccctgggcctgtgaacaggggacgccccccacgatcacctggatgggggcctccgtgtcctccctggaccccactatcactcgctcctcgatgctcagcctcatcccacagccccaggaccatggcaccagcctcacctgtcaggtgaccttgcctggggccggcgtgaccatgaccagggctgtccgactcaacatatcctatcctcctcagaacttgaccatgactgtcttccaaggagatggcacagcatccacaaccttgaggaatggctcggccctttcagtcctggagggccagtccctgcaccttgtctgtgctgtcgacagcaatccccctgccaggctgagctggacctgggggagcctgaccctgagcccctcacagtcctcgaaccttggggtgctggagctgcctcgagtgcatgtgaaggatgaaggggaattcacctgccgagctcagaaccctctaggctcccagcacatttccctgagcctctccctgcaaaacgagtacacaggcaaaatgaggcctatatcaggagtgacgctaggggcattcgggggagctggagccacagccctggtcttcctgtacttctgcatcatcttcgttgtagtgaggtcctgcaggaagaaatcggcaaggccagcagtgggcgtgggggatacaggcatggaggacgcaaacgctgtcaggggctcagcctctcagggacccctgattgaatccccggcagatgacagccccccacaccatgctccgccagccctggccaccccctccccagaggaaggagagatccagtatgcatccctcagcttccacaaagcgaggcctcagtacccacaggaacaggaggccatcggctatgagtactccgagatcaacatccccaagtgagaaactgcagagactcaggcctgtttgagggctcacgacccctgcagcaaagaagcccgagactgattcctttagaattaacagccctccatgctgtgcaacaggacatcagaacttattcctcttgtcaaactgaaaatgcgtgcctgatgaccaaactctccctttctccatccaatcggtccacactccccgcccccggcctctggtacccaccattctcttctctacttctctgaggtcgactattttaggttccaaatatagtgagatcgta

SEQ ID NO: 181335 - DNA, 1791 bp, Homo sapiens
  Payload ID: 15719
  Gene Symbol: SIGLEC12
  Gene Name: sialic acid binding Ig-like lectin 12 (gene/pseudogene)
  ENST ID: ENST00000596742
  CDS Start-End: 40-504
agacttacctcagcaaccctggcacctccaacccgacacatgctactgctgctgctactgctgccacccctgctctgtgggagagtgggggctaaggaacagaaggattacctgctgacaatgcagaagtccgtgacggtgcaggagggcctgtgtgtctctgtgctttgctccttctcctacccccaaaatggctggactgcctccgatccagttcatggctactggttccgggcaggggaccatgtaagccggaacattccagtggccacaaacaacccagctcgagcagtgcaggaggagactcgggaccgattccacctccttggggacccacagaacaaggattgtaccctgagcatcagagacaccagagagagtgatgcagggacatacgtcttttgtgtagagagaggaaatatgaaatggaattataaatatgaccagctctctgtgaatgtgacaggtggagagaggaagcaggaaatggaactacatatatgacaagctctctgtgcatgtgacagccctgactcacatgcccaccttctccatcccggggaccctggagtctggccaccccaggaacctgacctgctctgtgccctgggcctgtgaacaggggacgccccccacgatcacctggatgggggcctccgtgtcctccctggaccccactatcactcgctcctcgatgctcagcctcatcccacagccccaggaccatggcaccagcctcacctgtcaggtgaccttgcctggggccggcgtgaccatgaccagggctgtccgactcaacatatcctatcctcctcagaacttgaccatgactgtcttccaaggagatggcacagcatccacaaccttgaggaatggctcggccctttcagtcctggagggccagtccctgcaccttgtctgtgctgtcgacagcaatccccctgccaggctgagctggacctgggggagcctgaccctgagcccctcacagtcctcgaaccttggggtgctggagctgcctcgagtgcatgtgaaggatgaaggggaattcacctgccgagctcagaaccctctaggctcccagcacatttccctgagcctctccctgcaaaacgagtacacaggcaaaatgaggcctatatcaggagtgacgctaggggcattcgggggagctggagccacagccctggtcttcctgtacttctgcatcatcttcgttgtagtgaggtcctgcaggaagaaatcggcaaggccagcagtgggcgtgggggatacaggcatggaggacgcaaacgctgtcaggggctcagcctctcagggacccctgattgaatccccggcagatgacagccccccacaccatgctccgccagccctggccaccccctccccagaggaaggagagatccagtatgcatccctcagcttccacaaagcgaggcctcagtacccacaggaacaggaggccatcggctatgagtactccgagatcaacatccccaagtgagaaactgcagagactcaggcctgtttgagggctcacgacccctgcagcaaagaagcccgagactgattcctttagaattaacagccctccatgctgtgcaacaggacatcagaacttattcctcttgtcaaactgaaaatgcgtgcctgatgaccaaactctccctttctccatccaatcggtccacactccccgcccccggcctctggtacccaccattctcttctctacttctctgaggtcgactattttaggttccaaatatagtgagatcgtagagtgtt

SEQ ID NO: 181336 - DNA, 1434 bp, Homo sapiens
  Payload ID: 15719
  Gene Symbol: SIGLEC12
  Gene Name: sialic acid binding Ig-like lectin 12 (gene/pseudogene)
  Uniprot ID: Q96PQ1
  ENST ID: ENST00000598614
  CDS Start-End: 1-1434
atgctgctgcccctgctatgggcaaatgaagagagggacagtgggggctgggctgaccctcgtttctccacagcgtcccaggacctactgtcaagatacaggctggaggtgccagagtcggtgactgtgcaggagggtctgtgtgtctctgtgccctgcagtgtcctttacccccattacaactggactgcctctagccctgtttatggatcctggttcaaggaaggggccgatataccatgggatattccagtggccacaaacaccccaagtggaaaagtgcaagaggatacccacggtcgattcctcctccttggggacccacagaccaacaactgctccctgagcatcagagatgccaggaagggggattcagggaagtactacttccaggtggagagaggaagcaggaaatggaactacatatatgacaagctctctgtgcatgtgacagccctgactcacatgcccaccttctccatcccggggaccctggagtctggccaccccaggaacctgacctgctctgtgccctgggcctgtgaacaggggacgccccccacgatcacctggatgggggcctccgtgtcctccctggaccccactatcactcgctcctcgatgctcagcctcatcccacagccccaggaccatggcaccagcctcacctgtcaggtgaccttgcctggggccggcgtgaccatgaccagggctgtccgactcaacatatcctatcctcctcagaacttgaccatgactgtcttccaaggagatggcacagcatccacaaccttgaggaatggctcggccctttcagtcctggagggccagtccctgcaccttgtctgtgctgtcgacagcaatccccctgccaggctgagctggacctgggggagcctgaccctgagcccctcacagtcctcgaaccttggggtgctggagctgcctcgagtgcatgtgaaggatgaaggggaattcacctgccgagctcagaaccctctaggctcccagcacatttccctgagcctctccctgcaaaacgagtacacaggcaaaatgaggcctatatcaggagtgacgctaggggcattcgggggagctggagccacagccctggtcttcctgtacttctgcatcatcttcgttgtagtgaggtcctgcaggaagaaatcggcaaggccagcagtgggcgtgggggatacaggcatggaggacgcaaacgctgtcaggggctcagcctctcagggacccctgattgaatccccggcagatgacagccccccacaccatgctccgccagccctggccaccccctccccagaggaaggagagatccagtatgcatccctcagcttccacaaagcgaggcctcagtacccacaggaacaggaggccatcggctatgagtactccgagatcaacatccccaagtga

SEQ ID NO: 181337 - DNA, 2035 bp, Homo sapiens
  Payload ID: 15720
  Gene Symbol: SIGLEC14
  Gene Name: sialic acid binding Ig-like lectin 14
  Uniprot ID: Q08ET2
  ENST ID: ENST00000360844
  CDS Start-End: 43-1233
agccggacctgggactgggctggggccctggcggatggagacatgctgcccctgctgctgctgcccctgctgtggggggggtccctgcaggagaagccagtgtacgagctgcaagtgcagaagtcggtgacggtgcaggagggcctgtgcgtccttgtgccctgctccttctcttacccctggagatcctggtattcctctcccccactctacgtctactggttccgggacggggagatcccatactacgctgaggttgtggccacaaacaacccagacagaagagtgaagccagagacccagggccgattccgcctccttggggatgtccagaagaagaactgctccctgagcatcggagatgccagaatggaggacacgggaagctatttcttccgcgtggagagaggaagggatgtaaaatatagctaccaacagaataagctgaacttggaggtgacagccctgatagagaaacccgacatccactttctggagcctctggagtccggccgccccacaaggctgagctgcagccttccaggatcctgtgaagcgggaccacctctcacattctcctggacggggaatgccctcagccccctggaccccgagaccacccgctcctcggagctcaccctcacccccaggcccgaggaccatggcaccaacctcacctgtcaggtgaaacgccaaggagctcaggtgaccacggagagaactgtccagctcaatgtctcctatgctccacagaacctcgccatcagcatcttcttcagaaatggcacaggcacagccctgcggatcctgagcaatggcatgtcggtgcccatccaggagggccagtccctgttcctcgcctgcacagttgacagcaacccccctgcctcactgagctggttccgggagggaaaagccctcaatccttcccagacctcaatgtctgggaccctggagctgcctaacataggagctagagagggaggggaattcacctgccgggttcagcatccgctgggctcccagcacctgtccttcatcctttctgtgcagagaagctcctcttcctgcatatgtgtaactgagaaacagcagggctcctggcccctcgtcctcaccctgatcaggggggctctcatgggggctggcttcctcctcacctatggcctcacctggatctactataccaggtgtggaggcccccagcagagcagggctgagaggcctggctgagcccctcccgctcaagacagaactgaggtgtggacacttagccctgtgggacacatgcaggacatcactgtcagcttctttctggaagctcacatcccactgactacccctcttttccttcctgccccataccccttctacttattcccctctgcttgtgagtcttgccccaccacacctgcatccccatctgcaccccatcccctctccacctgcccttctcttccctctccatccaccatctccagccctgtgaagggaatgtactttcggtcttatacccccattacccattacccaaaagttaccttttttttttttttttttttttgagacagagtctcactctgttgcacaggctggagttcagtggcacaatctccgttcactgcaacctccacctctggggttcaagcaattctcctgcctcagcctccctagtagctgggattacaggtgcctgccaccacatccagttaattttttttttttgtatgttagtagagatggggttttaccatgttggccaggtctcgaactcctgacctcaagcaatccactgcattggcctcccaaagtgctggcattacaggtatgagccaccgtgcctggctgccaaaagttaccttcttaacacttgaatttctggtctcctcagcttccctatccatataggcacagagaggcagcatttgttttccagttaaaactctacctcattgtgattattatccaatacaattgttacaaaataagtaaaacttttatgaaacaatacaacataactgattttactctttaa

SEQ ID NO: 181338 - DNA, 1573 bp, Homo sapiens
  Payload ID: 15721
  Gene Symbol: SIGLEC15
  Gene Name: sialic acid binding Ig-like lectin 15
  Uniprot ID: Q6ZMC9
  ENST ID: ENST00000389474
  CDS Start-End: 218-1204
acatgactaaactccacggggcttgaatgatcagacctcaggctgccaggcttcctgtccccagttcctccggctcccgcagagcccacagggacctgcagatctgagtgccctgcccacccccgcccgccttccttcccccaccacgcctgggagggccctcactggggaggtggccgagagcgggtctggcctggggtgttcagatgctcacagcatggaaaagtccatctggctgctggcctgcttggcgtgggttctcccgacaggctcatttgtgagaactaaaatagatactacggagaacttgctcaacacagaggtgcacagctcgccagcgcagcgctggtccatgcaggtgccacccgaggtgagcgcggaggcaggcgacgcggcagtgctgccctgcaccttcacgcacccgcaccgccactacgacgggccgctgacggccatctggcgcgcgggcgagccctatgcgggcccgcaggtgttccgctgcgctgcggcgcggggcagcgagctctgccagacggcgctgagcctgcacggccgcttccggctgctgggcaacccgcgccgcaacgacctctcgctgcgcgtcgagcgcctcgccctggctgacgaccgccgctacttctgccgcgtcgagttcgccggcgacgtccatgaccgctacgagagccgccacggcgtccggctgcacgtgacagccgcgccgcggatcgtcaacatctcggtgctgcccagtccggctcacgccttccgcgcgctctgcactgccgaaggggagccgccgcccgccctcgcctggtccggcccggccctgggcaacagcttggcagccgtgcggagcccgcgtgagggtcacggccacctagtgaccgccgaactgcccgcactgacccatgacggccgctacacgtgtacggccgccaacagcctgggccgctccgaggccagcgtctacctgttccgcttccatggcgccagcggggcctcgacggtcgccctcctgctcggcgctctcggcttcaaggcgctgctgctgctcggggtcctggccgcccgcgctgcccgccgccgcccagagcatctggacaccccggacaccccaccacggtcccaggcccaggagtccaattatgaaaatttgagccagatgaacccccggagcccaccagccaccatgtgctcaccgtgaggagtccctcagccaccaacatccatttcagcactgtaaagaacaaaggccagtgcgaggcttggctggcacagccagtcctggttctcgggcaccttggcagcccccagctgggtggctcctcccctgctcaaggtcaagaccctgctcaaggaggctcatctggcctcctatgtggacaaccatttcggagctccctgatatttttgccagcatttcgtaaatgtgcatacgtctgtgtgtgtgtgtgtgtgtgagagagagagagagagagtacacgcattagcttgagcgtgaaacttccagaaatgttcccttgccctttcttacctagaacacctgctatagtaaagcagacaggaaactgtt

SEQ ID NO: 181339 - DNA, 1054 bp, Homo sapiens
  Payload ID: 15721
  Gene Symbol: SIGLEC15
  Gene Name: sialic acid binding Ig-like lectin 15
  Uniprot ID: Q6ZMC9
  ENST ID: ENST00000546268
  CDS Start-End: 493-1017
aggctacatcgggactctgaagagcagcactctggggtgggcacaggccccacagcagggtcagcctgtggccctgcctctccatcagctcaggctcatttgtgagaactaaaatagatactacggagaacttgctcaacacagaggtgcacagctcgccagcgcagcgctggtccatgcaggtgccacccgaggtgagcgcggaggcaggcgacgcggcagtgctgccctgcaccttcacgcacccgcaccgccactacgacgggccgctgacggccatctggcgcgcgggcgagccctatgcgggcccgcaggtgttccgctgcgctgcggcgcggggcagcgagctctgccagacggcgctgagcctgcacggccgcttccggctgctgggcaacccgcgccgcaacgacctctcgctgcgcgtcgagcgcctcgccctggctgacgaccgccgctacttctgccgcgtcgagttcgccggcgacgtccatgaccgctacgagagccgccacggcgtccggctccgcgccgcggatcgtcaacatctcggtgctgcccagtccggctcacgccttccgcgcgctctgcactgccgaaggggagccgccgcccgccctcgcctggtccggcccggccctgggcaacagcttggcagccgtgcggagcccgcgtgagggtcacggccacctagtgaccgccgaactgcccgcactgacccatgacggccgctacacgtgtacggccgccaacagcctgggccgctccgaggccagcgtctacctgttccgcttccatggcgccagcggggcctcgacggtcgccctcctgctcggcgctctcggcttcaaggcgctgctgctgctcggggtcctggccgcccgcgctgcccgccgccgcccagagcatctggacaccccggacaccccaccacggtcccaggcccaggagtccaattatgaaaatttgagccagatgaacccccggagcccaccagccaccatgtgctcaccgtgaggagtccctcagccaccaacatccatttcagcactgt

SEQ ID NO: 181340 - DNA, 674 bp, Homo sapiens
  Payload ID: 15721
  Gene Symbol: SIGLEC15
  Gene Name: sialic acid binding Ig-like lectin 15
  ENST ID: ENST00000587418
  CDS Start-End: 1-523
cggcgacgtccatgaccgctacgagagccgccacggcgtccggctgcacgtgacagccgcgccgcggatcgtcaacatctcggtgctgcccagtccggctcacgccttccgcgcgctctgcactgccgaaggggagccgccgcccgccctcgcctggtccggcccggccctgggcaacagcttggcagccgtgcggagcccgcgtgagggtcacggccacctagtgaccgccgaactgcccgcactgacccatgacggccgctacacgtgtacggccgccaacagcctgggccgctccgaggccagcgtctacctgttccgcttccatggcgccagcggggcctcgacggtcgccctcctgctcggcgctctcggcttcaaggcgctgctgctgctcggggtcctggccgcccgcgctgcccgccgccgcccagagcatctggacaccccggacaccccaccacgtcccacaacctgtcctgtgtccctgtttgctgatttactgtcgcaccaacgcccctgaatctgaaagccgaccgttgttcagtcatttaacaaatacttattgagtacctactgcataccaggcactggtactaaagacacagcaagatccctgacctcacagaactcatatcctattgtggagaattttaataaatatggaaacacgc

SEQ ID NO: 181341 - DNA, 2384 bp, Homo sapiens
  Payload ID: 15722
  Gene Symbol: SIGLEC5
  Gene Name: sialic acid binding Ig-like lectin 5
  Uniprot ID: O15389
  ENST ID: ENST00000570106
  CDS Start-End: 1-1656
atgctgcccctgctgctgctgcccctgctgtggggggggtccctgcaggagaagccagtgtacgagctgcaagtgcagaagtcggtgacggtgcaggagggcctgtgcgtccttgtgccctgctccttctcttacccctggagatcctggtattcctctcccccactctacgtctactggttccgggacggggagatcccatactacgctgaggttgtggccacaaacaacccagacagaagagtgaagccagagacccagggccgattccgcctccttggggatgtccagaagaagaactgctccctgagcatcggagatgccagaatggaggacacgggaagctatttcttccgcgtggagagaggaagggatgtaaaatatagctaccaacagaataagctgaacttggaggtgacagccctgatagagaaacccgacatccactttctggagcctctggagtccggccgccccacaaggctgagctgcagccttccaggatcctgtgaagcgggaccacctctcacattctcctggacggggaatgccctcagccccctggaccccgagaccacccgctcctcggagctcaccctcacccccaggcccgaggaccatggcaccaacctcacctgtcagatgaaacgccaaggagctcaggtgaccacggagagaactgtccagctcaatgtctcctatgctccacagaccatcaccatcttcaggaacggcatagccctagagatcctgcaaaacacctcataccttccggtcctggagggccaggctctgcggctgctctgtgatgctcccagcaacccccctgcacacctgagctggttccagggctcccctgccctgaacgccacccccatctccaataccgggatcttggagcttcgtcgagtaaggtctgcagaagaaggaggcttcacctgccgcgctcagcacccgctgggcttcctgcaaatttttctgaatctctcagtttactccctcccacagttgctgggcccctcctgctcctgggaggctgagggtctgcactgcagatgctcctttcgagcccggccggccccctccctgtgctggcggcttgaggagaagccgctggaggggaacagcagccagggctcattcaaggtcaactccagctcagctgggccctgggccaacagctccctgatcctccacggggggctcagctccgacctcaaagtcagctgcaaggcctggaacatctatgggtcccagagcggctctgtcctgctgctgcaagggagatcgaacctcgggacaggagtggttcctgcagcccttggtggtgctggtgtcatggccctgctctgtatctgtctgtgcctcatcttctttttaatagtgaaagcccgcaggaagcaagcagctgggagaccagagaaaatggatgatgaagaccccattatgggtaccatcacctcgggttccaggaagaagccctggccagacagccccggagatcaagcatctcctcctggggatgcccctcccttggaagaacaaaaggagctccattatgcctcccttagtttttctgagatgaagtcgagggagcctaaggaccaggaggccccaagcaccacggagtactcggagatcaagacaagcaagtgaggatttgcccagagttcagtcctggctggaggagccacagcctgtctgggggaaaggacaagtcagggaccacttgctgaagcacgaagagcccttgtggcaatgttaacattaactgatgtttaagtgctccaagcagatggaattagagaggtgggctcaaatctaggccctggcactgtcatcaagcaattcactgcatccctctgtgcctcagtttcccattctgtaaatcagagatcatgcatgctacctcaaaggttgttgtgaacattaaagaaatcaacacatggaaatcaaccaacatgggtcctggaacagggcgttgtgctcagtgctttctggtctctcttccttgaatagaaaggtcctgctggcaagttctctcaaggctggggatgaccaggcacaaaaaacagggcagcaatatgttggtgtcactccccttcccaaaactcttcgaagactccctaggaaagaccagcccctcagcctggcacttggttcatgatgtgggatcttatatccttgccagagtcatatctttgcccacttttacctgcaatccttgcatcatattcctttggctccagtccttcatttatgagacccataggaatccttccaacagccaaagagttgagtctaactctttcctgcccaaacccattcacggccccctggccttagacaatatatcacaagcatctcccctgacacataaagtc

SEQ ID NO: 181342 - DNA, 2360 bp, Homo sapiens
  Payload ID: 15722
  Gene Symbol: SIGLEC5
  Gene Name: sialic acid binding Ig-like lectin 5
  Uniprot ID: O15389
  ENST ID: ENST00000534261
  CDS Start-End: 401-2056
atctttctatcccagatgctccacagaacctcgccatcagcatcttcttcagaaatggcacaggcacagccccctgaggatctcactcatgactgaaacatcatttgaggggtgatcacctccagatcctcagctggacaagcctcacatcgtctgggggcctcagtatcttcacctgcggcgtccagtcggggtgggagcagaatggcttcccagcccccgcctcaccccaacagcacgtgatgcccaagttccccttctgtgcgcgtccacagctctcactcaccctccggcttcctgtcggggctttctcagccccaccccacgtttggacatttggagcatttccttccctgacagccggacctgggactgggctggggccctggcggatggagacatgctgcccctgctgctgctgcccctgctgtggggggggtccctgcaggagaagccagtgtacgagctgcaagtgcagaagtcggtgacggtgcaggagggcctgtgcgtccttgtgccctgctccttctcttacccctggagatcctggtattcctctcccccactctacgtctactggttccgggacggggagatcccatactacgctgaggttgtggccacaaacaacccagacagaagagtgaagccagagacccagggccgattccgcctccttggggatgtccagaagaagaactgctccctgagcatcggagatgccagaatggaggacacgggaagctatttcttccgcgtggagagaggaagggatgtaaaatatagctaccaacagaataagctgaacttggaggtgacagccctgatagagaaacccgacatccactttctggagcctctggagtccggccgccccacaaggctgagctgcagccttccaggatcctgtgaagcgggaccacctctcacattctcctggacggggaatgccctcagccccctggaccccgagaccacccgctcctcggagctcaccctcacccccaggcccgaggaccatggcaccaacctcacctgtcagatgaaacgccaaggagctcaggtgaccacggagagaactgtccagctcaatgtctcctatgctccacagaccatcaccatcttcaggaacggcatagccctagagatcctgcaaaacacctcataccttccggtcctggagggccaggctctgcggctgctctgtgatgctcccagcaacccccctgcacacctgagctggttccagggctcccctgccctgaacgccacccccatctccaataccgggatcttggagcttcgtcgagtaaggtctgcagaagaaggaggcttcacctgccgcgctcagcacccgctgggcttcctgcaaatttttctgaatctctcagtttactccctcccacagttgctgggcccctcctgctcctgggaggctgagggtctgcactgcagatgctcctttcgagcccggccggccccctccctgtgctggcggcttgaggagaagccgctggaggggaacagcagccagggctcattcaaggtcaactccagctcagctgggccctgggccaacagctccctgatcctccacggggggctcagctccgacctcaaagtcagctgcaaggcctggaacatctatgggtcccagagcggctctgtcctgctgctgcaagggagatcgaacctcgggacaggagtggttcctgcagcccttggtggtgctggtgtcatggccctgctctgtatctgtctgtgcctcatcttctttttaatagtgaaagcccgcaggaagcaagcagctgggagaccagagaaaatggatgatgaagaccccattatgggtaccatcacctcgggttccaggaagaagccctggccagacagccccggagatcaagcatctcctcctggggatgcccctcccttggaagaacaaaaggagctccattatgcctcccttagtttttctgagatgaagtcgagggagcctaaggaccaggaggccccaagcaccacggagtactcggagatcaagacaagcaagtgaggatttgcccagagttcagtcctggctggaggagccacagcctgtctgggggaaaggacaagtcagggaccacttgctgaagcacgaagagcccttgtggcaatgttaacattaactgatgtttaagtgctccaagcagatggaattagagaggtgggctcaaatctaggccctggcactgtcatcaagcaattcactgcatccctctgtgcctcagtttcccattctgtaaatcagagatcatgcatgctacctcaaaggttgttgtgaacattaaagaaatcaacacatggaaatcaaccaa

SEQ ID NO: 181343 - DNA, 1940 bp, Homo sapiens
  Payload ID: 15723
  Gene Symbol: SIGLEC6
  Gene Name: sialic acid binding Ig-like lectin 6
  Uniprot ID: O43699
  ENST ID: ENST00000346477
  CDS Start-End: 70-1383
cgcgctcctccccagccacccgttcctccccgcagtccttcccctccactcccttccccttctctgctcatgcagggagcccaggaagcctccgcctcagagatgctaccgctgctgctgcccctgctgtgggcaggggccctggctcaggagcggagattccagctggaggggccagagtcactgacggtgcaggagggtctgtgcgtcctcgtaccctgcagattgcccactacccttccagcctcgtactatggttatggctactggttcctggaaggggctgatgttccagtggccacaaacgacccagacgaagaagtgcaggaggagacccggggccgattccacctcctctgggatcccagaaggaagaactgctccctgagcatcagagatgcccggaggagggacaatgctgcatacttctttcggttgaagtccaaatggatgaaatacggttatacatcttccaagctctctgtgcgtgtgatggccctgacccacaggcccaacatctccatcccagggaccctggagtctggccatcccagcaatctgacctgctctgtgccctgggtctgtgagcaggggacgccccccatcttctcctggatgtcagctgcccccacctccctgggccccaggaccacccagtcctcggtgctcacaatcaccccacggccccaggaccacagcaccaacctcacctgtcaggtgacgttccctggagccggtgtgaccatggagagaaccatccagctcaatgtctcctccttcaaaatcctgcaaaacacctcgtccctccctgtcctggagggccaggctctgcggctgctctgtgatgctgacggcaacccccctgcacacctgagctggttccagggcttccccgccctgaacgccacccccatctccaataccggggtcctggagctgcctcaagtagggtctgcagaagaaggagatttcacctgccgtgctcagcatcctctgggctccctgcaaatctctctgagtctctttgtgcattggaaaccagaaggcagggctggtggtgtcctgggagcagtctggggagctagcatcacaaccctggttttcctctgtgtttgcttcatcttcagagtgaagactagaaggaagaaagcagcccagccagtgcaaaacacggatgatgtgaaccccgtcatggtctcaggctccaggggtcatcagcaccagttccagacaggcatagtttcagaccaccctgctgaggctggccccatctcagaagatgagcaggagctccactacgctgtcctacacttccacaaggtgcaacctcaggaaccaaaggtcaccgacactgagtactcagaaatcaagatacacaagtgaggaattgtccaaagccataaccttgattggagagaacatggtacctctcagtgtattggttactagggctgccacagcaatgtaccacaaaccgagtgacataaacacagaactttattttcgtatagtttcagatgttagaggtctgagaacaaggtgttatcagggttggtcccttctaaggcctctcttgttggcttgtagatggctgtctcctccttgtgtcttcacatggtctttcctctgagtgtgtttgtgtcctaatcttctcttcttataaagacactagtcatattggattagggcctccccatgacctaatttaaataaattaactatttaaagaccctccaaatacagtaaccttctgagatattgagatttaggacttccaacatatgaattttagaagggaacaatttagcccataacactgtgtccaattcttttaaaattaatgtttttgttgtaaatggactatataaataccttcgtatatatggcagaccacaggacttctgtccaagagaactgagttcaactccatctatgccagc

SEQ ID NO: 181344 - DNA, 1746 bp, Homo sapiens
  Payload ID: 15723
  Gene Symbol: SIGLEC6
  Gene Name: sialic acid binding Ig-like lectin 6
  Uniprot ID: O43699
  ENST ID: ENST00000343300
  CDS Start-End: 209-1270
gcgggacacagtctcttctcctctgctcttctttgggcaggtctctgggtctcaaagtttccgtctgctctgtgcagagggagtggagctccgagggcttgtggcttcgcagttcctcttctgtgaacagccgagatcacgcgctcctccccagccacccgttcctccccgcagtccttcccctccactcccttccccttctctgctcatgcagggagcccaggaagcctccgcctcagagatgctaccgctgctgctgcccctgctgtgggcaggggccctggctcaggagcggagattccagctggaggggccagagtcactgacggtgcaggagggtctgtgcgtcctcgtaccctgcagattgcccactacccttccagcctcgtactatggttatggctactggttcctggaaggggctgatgttccagtggccacaaacgacccagacgaagaagtgcaggaggagacccggggccgattccacctcctctgggatcccagaaggaagaactgctccctgagcatcagagatgcccggaggagggacaatgctgcatacttctttcggttgaagtccaaatggatgaaatacggttatacatcttccaagctctctgtgcgtgtgatggccctgacccacaggcccaacatctccatcccagggaccctggagtctggccatcccagcaatctgacctgctctgtgccctgggtctgtgagcaggggacgccccccatcttctcctggatgtcagctgcccccacctccctgggccccaggaccacccagtcctcggtgctcacaatcaccccacggccccaggaccacagcaccaacctcacctgtcaggtgacgttccctggagccggtgtgaccatggagagaaccatccagctcaatgtctcctatgctccacagaaagtggccatcagcatcttccaaggaaacagcgcagccttcaaaatcctgcaaaacacctcgtccctccctgtcctggagggccaggctctgcggctgctctgtgatgctgacggcaacccccctgcacacctgagctggttccagggcttccccgccctgaacgccacccccatctccaataccggggtcctggagctgcctcaagtagggtctgcagaagaaggagatttcacctgccgtgctcagcatcctctgggctccctgcaaatctctctgagtctctttgtgcattggtcatcagcaccagttccagacaggcatagtttcagaccaccctgctgaggctggccccatctcagaagatgagcaggagctccactacgctgtcctacacttccacaaggtgcaacctcaggaaccaaaggtcaccgacactgagtactcagaaatcaagatacacaagtgaggaattgtccaaagccataaccttgattggagagaacatggtacctctcagtgtattggttactagggctgccacagcaatgtaccacaaaccgagtgacataaacacagaactttattttcgtatagtttcagatgttagaggtctgagaacaaggtgttatcagggttggtcccttctaaggcctctcttgttggcttgtagatggctgtctcctccttgtgtcttcacatggtctttcctctgagtgtgtttgtgtcctaatcttctcttcttataaagacactagtcatattggattagggcctccccatgacctaatttaaataaattaactatttaaagaccctcc

SEQ ID NO: 181345 - DNA, 1811 bp, Homo sapiens
  Payload ID: 15723
  Gene Symbol: SIGLEC6
  Gene Name: sialic acid binding Ig-like lectin 6
  Uniprot ID: O43699
  ENST ID: ENST00000359982
  CDS Start-End: 147-1316
gtctgctctgtgcagagggagtggagctccgagggcttgtggcttcgcagttcctcttctgtgaacagccgagatcacgcgctcctccccagccacccgttcctccccgcagtccttcccctccactcccttccccttctctgctcatgcagggagcccaggaagcctccgcctcagagatgctaccgctgctgctgcccctgctgtgggcaggggccctggctcaggagcggagattccagctggaggggccagagtcactgacggtgcaggagggtctgtgcgtcctcgtaccctgcagattgcccactacccttccagcctcgtactatggttatggctactggttcctggaaggggctgatgttccagtggccacaaacgacccagacgaagaagtgcaggaggagacccggggccgattccacctcctctgggatcccagaaggaagaactgctccctgagcatcagagatgcccggaggagggacaatgctgcatacttctttcggttgaagtccaaatggatgaaatacggttatacatcttccaagctctctgtgcgtgtgatggccctgacccacaggcccaacatctccatcccagggaccctggagtctggccatcccagcaatctgacctgctctgtgccctgggtctgtgagcaggggacgccccccatcttctcctggatgtcagctgcccccacctccctgggccccaggaccacccagtcctcggtgctcacaatcaccccacggccccaggaccacagcaccaacctcacctgtcaggtgacgttccctggagccggtgtgaccatggagagaaccatccagctcaatgtctcctggatgttgaggcggccacctctttccaccccagatgctccacagaaagtggccatcagcatcttccaaggaaacagcgcagccttcaaaatcctgcaaaacacctcgtccctccctgtcctggagggccaggctctgcggctgctctgtgatgctgacggcaacccccctgcacacctgagctggttccagggcttccccgccctgaacgccacccccatctccaataccggggtcctggagctgcctcaagtagggtctgcagaagaaggagatttcacctgccgtgctcagcatcctctgggctccctgcaaatctctctgagtctctttgtgcattggaaaccagaaggcagggctggtggtgtcctgggagcagtctggggagctagcatcacaaccctggttttcctctgtgtttgcttcatcttcagggtcatcagcaccagttccagacaggcatagtttcagaccaccctgctgaggctggccccatctcagaagatgagcaggagctccactacgctgtcctacacttccacaaggtgcaacctcaggaaccaaaggtcaccgacactgagtactcagaaatcaagatacacaagtgaggaattgtccaaagccataaccttgattggagagaacatggtacctctcagtgtattggttactagggctgccacagcaatgtaccacaaaccgagtgacataaacacagaactttattttcgtatagtttcagatgttagaggtctgagaacaaggtgttatcagggttggtcccttctaaggcctctcttgttggcttgtagatggctgtctcctccttgtgtcttcacatggtctttcctctgagtgtgtttgtgtcctaatcttctcttcttataaagacactagtcatattggattagggcctccccatgacctaatttaaataaattaactatttaaagaccctcc

SEQ ID NO: 181346 - DNA, 1391 bp, Homo sapiens
  Payload ID: 15723
  Gene Symbol: SIGLEC6
  Gene Name: sialic acid binding Ig-like lectin 6
  Uniprot ID: O43699
  ENST ID: ENST00000391797
  CDS Start-End: 156-1184
aaagtttccgtctgctctgtgcagagggagtggagctccgagggcttgtggcttcgcagttcctcttctgtgaacagccgagatcacgcgctcctccccagccacccgttcctccccgcagtccttcccctccactcccttccccttctctgctcatgcagggagcccaggaagcctccgcctcagagatgctaccgctgctgctgcccctgctgtgggcaggggccctggctcaggagcggagattccagctggaggggccagagtcactgacggtgcaggagggtctgtgcgtcctcgtaccctgcagattgcccactacccttccagcctcgtactatggttatggctactggttcctggaaggggctgatgttccagtggccacaaacgacccagacgaagaagtgcaggaggagacccggggccgattccacctcctctgggatcccagaaggaagaactgctccctgagcatcagagatgcccggaggagggacaatgctgcatacttctttcggttgaagtccaaatggatgaaatacggttatacatcttccaagctctctgtgcgtgtgatggggaccctggagtctggccatcccagcaatctgacctgctctgtgccctgggtctgtgagcaggggacgccccccatcttctcctggatgtcagctgcccccacctccctgggccccaggaccacccagtcctcggtgctcacaatcaccccacggccccaggaccacagcaccaacctcacctgtcaggtgacgttccctggagccggtgtgaccatggagagaaccatccagctcaatgtctcctatgctccacagaaagtggccatcagcatcttccaaggaaacagcgcagccttcaaaatcctgcaaaacacctcgtccctccctgtcctggagggccaggctctgcggctgctctgtgatgctgacggcaacccccctgcacacctgagctggttccagggcttccccgccctgaacgccacccccatctccaataccggggtcctggagctgcctcaagtagggtctgcagaagaaggagatttcacctgccgtgctcagcatcctctgggctccctgcaaatctctctgagtctctttgtgcattggtcatcagcaccagttccagacaggcatagtttcagaccaccctgctgaggctggccccatctcagaagatgagcaggagctccactacgctgtcctacacttccacaaggtgcaacctcaggaaccaaaggtcaccgacactgagtactcagaaatcaagatacacaagtgaggaattgtccaaagccataaccttgattggagagaacatggtacctctcagtgtattggttactagggctgccacagcaatgt

SEQ ID NO: 181347 - DNA, 1852 bp, Homo sapiens
  Payload ID: 15723
  Gene Symbol: SIGLEC6
  Gene Name: sialic acid binding Ig-like lectin 6
  Uniprot ID: O43699
  ENST ID: ENST00000425629
  CDS Start-End: 156-1517
aaagtttccgtctgctctgtgcagagggagtggagctccgagggcttgtggcttcgcagttcctcttctgtgaacagccgagatcacgcgctcctccccagccacccgttcctccccgcagtccttcccctccactcccttccccttctctgctcatgcagggagcccaggaagcctccgcctcagagatgctaccgctgctgctgcccctgctgtgggcaggggccctggctcaggagcggagattccagctggaggggccagagtcactgacggtgcaggagggtctgtgcgtcctcgtaccctgcagattgcccactacccttccagcctcgtactatggttatggctactggttcctggaaggggctgatgttccagtggccacaaacgacccagacgaagaagtgcaggaggagacccggggccgattccacctcctctgggatcccagaaggaagaactgctccctgagcatcagagatgcccggaggagggacaatgctgcatacttctttcggttgaagtccaaatggatgaaatacggttatacatcttccaagctctctgtgcgtgtgatggccctgacccacaggcccaacatctccatcccagggaccctggagtctggccatcccagcaatctgacctgctctgtgccctgggtctgtgagcaggggacgccccccatcttctcctggatgtcagctgcccccacctccctgggccccaggaccacccagtcctcggtgctcacaatcaccccacggccccaggaccacagcaccaacctcacctgtcaggtgacgttccctggagccggtgtgaccatggagagaaccatccagctcaatgtctcctatgctccacagaaagtggccatcagcatcttccaaggaaacagcgcagccttcaaaatcctgcaaaacacctcgtccctccctgtcctggagggccaggctctgcggctgctctgtgatgctgacggcaacccccctgcacacctgagctggttccagggcttccccgccctgaacgccacccccatctccaataccggggtcctggagctgcctcaagtagggtctgcagaagaaggagatttcacctgccgtgctcagcatcctctgggctccctgcaaatctctctgagtctctttgtgcattggaaaccagaaggcagggctggtggtgtcctgggagcagtctggggagctagcatcacaaccctggttttcctctgtgtttgcttcatcttcagagtgaagactagaaggaagaaagcagcccagccagtgcaaaacacggatgatgtgaaccccgtcatggtctcaggctccaggggtcatcagcaccagttccagacaggcatagtttcagaccaccctgctgaggctggccccatctcagaagatgagcaggagctccactacgctgtcctacacttccacaaggtgcaacctcaggaaccaaaggtcaccgacactgagtactcagaaatcaagatacacaagtgaggaattgtccaaagccataaccttgattggagagaacatggtacctctcagtgtattggttactagggctgccacagcaatgtaccacaaaccgagtgacataaacacagaactttattttcgtatagtttcagatgttagaggtctgagaacaaggtgttatcagggttggtcccttctaaggcctctcttgttggcttgtagatggctgtctcctccttgtgtcttcacatggtctttcctctgagtgtgtttgtgtcctaatcttctcttcttataaagacactagtcatattggattagggcctccccatgacctaatttaaataaattaa

SEQ ID NO: 181348 - DNA, 1713 bp, Homo sapiens
  Payload ID: 15723
  Gene Symbol: SIGLEC6
  Gene Name: sialic acid binding Ig-like lectin 6
  Uniprot ID: O43699
  ENST ID: ENST00000436458
  CDS Start-End: 156-1361
aaagtttccgtctgctctgtgcagagggagtggagctccgagggcttgtggcttcgcagttcctcttctgtgaacagccgagatcacgcgctcctccccagccacccgttcctccccgcagtccttcccctccactcccttccccttctctgctcatgcagggagcccaggaagcctccgcctcagagatgctaccgctgctgctgcccctgctgtgggcagcctcgtactatggttatggctactggttcctggaaggggctgatgttccagtggccacaaacgacccagacgaagaagtgcaggaggagacccggggccgattccacctcctctgggatcccagaaggaagaactgctccctgagcatcagagatgcccggaggagggacaatgctgcatacttctttcggttgaagtccaaatggatgaaatacggttatacatcttccaagctctctgtgcgtgtgatggccctgacccacaggcccaacatctccatcccagggaccctggagtctggccatcccagcaatctgacctgctctgtgccctgggtctgtgagcaggggacgccccccatcttctcctggatgtcagctgcccccacctccctgggccccaggaccacccagtcctcggtgctcacaatcaccccacggccccaggaccacagcaccaacctcacctgtcaggtgacgttccctggagccggtgtgaccatggagagaaccatccagctcaatgtctcctccttcaaaatcctgcaaaacacctcgtccctccctgtcctggagggccaggctctgcggctgctctgtgatgctgacggcaacccccctgcacacctgagctggttccagggcttccccgccctgaacgccacccccatctccaataccggggtcctggagctgcctcaagtagggtctgcagaagaaggagatttcacctgccgtgctcagcatcctctgggctccctgcaaatctctctgagtctctttgtgcattggaaaccagaaggcagggctggtggtgtcctgggagcagtctggggagctagcatcacaaccctggttttcctctgtgtttgcttcatcttcagagtgaagactagaaggaagaaagcagcccagccagtgcaaaacacggatgatgtgaaccccgtcatggtctcaggctccaggggtcatcagcaccagttccagacaggcatagtttcagaccaccctgctgaggctggccccatctcagaagatgagcaggagctccactacgctgtcctacacttccacaaggtgcaacctcaggaaccaaaggtcaccgacactgagtactcagaaatcaagatacacaagtgaggaattgtccaaagccataaccttgattggagagaacatggtacctctcagtgtattggttactagggctgccacagcaatgtaccacaaaccgagtgacataaacacagaactttattttcgtatagtttcagatgttagaggtctgagaacaaggtgttatcagggttggtcccttctaaggcctctcttgttggcttgtagatggctgtctcctccttgtgtcttcacatggtctttcctctgagtgtgtttgtgtcctaatcttctcttcttataaagacactagtcatattggattagggcctccccatgacctaatttaaataaattaactatttaaagaccctcc

SEQ ID NO: 181349 - DNA, 1469 bp, Homo sapiens
  Payload ID: 15724
  Gene Symbol: SIGLEC7
  Gene Name: sialic acid binding Ig-like lectin 7
  Uniprot ID: Q9Y286
  ENST ID: ENST00000305628
  CDS Start-End: 64-1188
cctgagagaagaaccctgaggaacagacgttccctcgcggccctggcacctccaaccccagatatgctgctgctgctgctgctgcccctgctctgggggagggagagggtggaaggacagaagagtaaccggaaggattactcgctgacgatgcagagttccgtgaccgtgcaagagggcatgtgtgtccatgtgcgctgctccttctcctacccagtggacagccagactgactctgacccagttcatggctactggttccgggcagggaatgatataagctggaaggctccagtggccacaaacaacccagcttgggcagtgcaggaggaaactcgggaccgattccacctccttggggacccacagaccaaaaattgcaccctgagcatcagagatgccagaatgagtgatgcggggagatacttctttcgtatggagaaaggaaatataaaatggaattataaatatgaccagctctctgtgaacgtgacagaccctcctcagaacttgactgtgactgtcttccaaggagaaggcacagcatccacagctctggggaacagctcatctctttcagtcctagagggccagtctctgcgcttggtctgtgctgttgacagcaatccccctgccaggctgagctggacctggaggagtctgaccctgtacccctcacagccctcaaaccctctggtactggagctgcaagtgcacctgggggatgaaggggaattcacctgtcgagctcagaactctctgggttcccagcacgtttccctgaacctctccctgcaacaggagtacacaggcaaaatgaggcctgtatcaggagtgttgctgggggcggtcgggggagctggagccacagccctggtcttcctctccttctgtgtcatcttcattgtagtgaggtcctgcaggaagaaatcggcaaggccagcagcggacgtgggagacataggcatgaaggatgcaaacaccatcaggggctcagcctctcagggtaacctgactgagtcctgggcagatgataacccccgacaccatggcctggctgcccactcctcaggggaggaaagagagatccagtatgcacccctcagctttcataagggggagcctcaggacctatcaggacaagaagccaccaacaatgagtactcagagatcaagatccccaagtaagaaaatgcagaggctcgggcttgtttgagggttcacgacccctccagcaaaggagtctgaggctgattccagtagaattagcagccctcaatgctgtgcaacaagacatcagaacttattcctcttgtctaactgaaaatgcatgcctgatgaccaaactctccctttccccatccaatcggtccacactccccgccctggcctctggtacccaccattctcctctgtacttctctaaggatgactactttagattccgaatatagtgagattgtaacgtg

SEQ ID NO: 181350 - DNA, 1754 bp, Homo sapiens
  Payload ID: 15724
  Gene Symbol: SIGLEC7
  Gene Name: sialic acid binding Ig-like lectin 7
  Uniprot ID: Q9Y286
  ENST ID: ENST00000317643
  CDS Start-End: 70-1473
gcagttcctgagagaagaaccctgaggaacagacgttccctcgcggccctggcacctccaaccccagatatgctgctgctgctgctgctgcccctgctctgggggagggagagggtggaaggacagaagagtaaccggaaggattactcgctgacgatgcagagttccgtgaccgtgcaagagggcatgtgtgtccatgtgcgctgctccttctcctacccagtggacagccagactgactctgacccagttcatggctactggttccgggcagggaatgatataagctggaaggctccagtggccacaaacaacccagcttgggcagtgcaggaggaaactcgggaccgattccacctccttggggacccacagaccaaaaattgcaccctgagcatcagagatgccagaatgagtgatgcggggagatacttctttcgtatggagaaaggaaatataaaatggaattataaatatgaccagctctctgtgaacgtgacagccttgacccacaggcccaacatccttatccccggtaccctggagtctggctgcttccagaatctgacctgctctgtgccctgggcctgtgagcaggggacgccccctatgatctcctggatggggacctctgtgtcccccctgcacccctccaccacccgctcctcagtgctcaccctcatcccacagccccagcaccacggcaccagcctcacctgtcaggtgaccttgcctggggccggcgtgaccacgaacaggaccatccaactcaatgtgtcctaccctcctcagaacttgactgtgactgtcttccaaggagaaggcacagcatccacagctctggggaacagctcatctctttcagtcctagagggccagtctctgcgcttggtctgtgctgttgacagcaatccccctgccaggctgagctggacctggaggagtctgaccctgtacccctcacagccctcaaaccctctggtactggagctgcaagtgcacctgggggatgaaggggaattcacctgtcgagctcagaactctctgggttcccagcacgtttccctgaacctctccctgcaacaggagtacacaggcaaaatgaggcctgtatcaggagtgttgctgggggcggtcgggggagctggagccacagccctggtcttcctctccttctgtgtcatcttcattgtagtgaggtcctgcaggaagaaatcggcaaggccagcagcggacgtgggagacataggcatgaaggatgcaaacaccatcaggggctcagcctctcagggtaacctgactgagtcctgggcagatgataacccccgacaccatggcctggctgcccactcctcaggggaggaaagagagatccagtatgcacccctcagctttcataagggggagcctcaggacctatcaggacaagaagccaccaacaatgagtactcagagatcaagatccccaagtaagaaaatgcagaggctcgggcttgtttgagggttcacgacccctccagcaaaggagtctgaggctgattccagtagaattagcagccctcaatgctgtgcaacaagacatcagaacttattcctcttgtctaactgaaaatgcatgcctgatgaccaaactctccctttccccatccaatcggtccacactccccgccctggcctctggtacccaccattctcctctgtacttctctaaggatgactactttagattccgaatatagtgagattgtaacgtg

SEQ ID NO: 181351 - DNA, 713 bp, Homo sapiens
  Payload ID: 15724
  Gene Symbol: SIGLEC7
  Gene Name: sialic acid binding Ig-like lectin 7
  Uniprot ID: Q9Y286
  ENST ID: ENST00000536156
  CDS Start-End: 1-438
atgctgctgctgctgctgctgcccctgctctgggggagggagagggtggaaggacagaagagtaaccggaaggattactcgctgacgatgcagagttccgtgaccgtgcaagagggcatgtgtgtccatgtgcgctgctccttctcctacccagtggacagccagactgactctgacccagttcatggctactggttccgggcagggaatgatataagctggaaggctccagtggccacaaacaacccagcttgggcagtgcaggaggaaactcgggaccgattccacctccttggggacccacagaccaaaaattgcaccctgagcatcagagatgccagaatgagtgatgcggggagatacttctttcgtatggagaaaggaaatataaaatggaattataaatatgaccagctctctgtgaacgtgacagagtgaggtcctgcaggaagaaatcggcaaggccagcagcggacgtgggagacataggcatgaaggatgcaaacaccatcaggggctcagcctctcagggtaacctgactgagtcctgggcagatgataacccccgacaccatggcctggctgcccactcctcaggggaggaaagagagatccagtatgcacccctcagctttcataagggggagcctcaggacctatcaggacaagaagccaccaacaatgagtactcagagatcaagatccccaagtaa

SEQ ID NO: 181352 - DNA, 627 bp, Homo sapiens
  Payload ID: 15724
  Gene Symbol: SIGLEC7
  Gene Name: sialic acid binding Ig-like lectin 7
  ENST ID: ENST00000601682
  CDS Start-End: 72-627
ccgcagttcctgagagaagaaccctgaggaacagacgttccctcgcggccctggcacctccaaccccagatatgctgctgctgctgctgctgcccctgctctgggggagggagagggtggaaggacagaagagtaaccggaaggattactcgctgacgatgcagagttccgtgaccgtgcaagagggcatgtgtgtccatgtgcgctgctccttctcctacccagtggacagccagactgactctgacccagttcatggctactggttccgggcagggaatgatataagctggaaggctccagtggccacaaacaacccagcttgggcagtgcaggaggaaactcgggaccgattccacctccttggggacccacagaccaaaaattgcaccctgagcatcagagatgccagaatgagtgatgcggggagatacttctttcgtatggagaaaggaaatataaaatggaattataaatatgaccagctctctgtgaacgtgacagccccagcaccacggcaccagcctcacctgtcaggtgaccttgcctggggccggcgtgaccacgaacaggaccatccaactcaatgtgtcctgtctccatgtctttctgtcccagaccctcctc

SEQ ID NO: 181353 - DNA, 616 bp, Homo sapiens
  Payload ID: 15724
  Gene Symbol: SIGLEC7
  Gene Name: sialic acid binding Ig-like lectin 7
  Uniprot ID: Q9Y286
  ENST ID: ENST00000600577
  CDS Start-End: 1-438
atgctgctgctgctgctgctgcccctgctctgggggagggagagggtggaaggacagaagagtaaccggaaggattactcgctgacgatgcagagttccgtgaccgtgcaagagggcatgtgtgtccatgtgcgctgctccttctcctacccagtggacagccagactgactctgacccagttcatggctactggttccgggcagggaatgatataagctggaaggctccagtggccacaaacaacccagcttgggcagtgcaggaggaaactcgggaccgattccacctccttggggacccacagaccaaaaattgcaccctgagcatcagagatgccagaatgagtgatgcggggagatacttctttcgtatggagaaaggaaatataaaatggaattataaatatgaccagctctctgtgaacgtgacagggtaacctgactgagtcctgggcagatgataacccccgacaccatggcctggctgcccactcctcaggggaggaaagagagatccagtatgcacccctcagctttcataagggggagcctcaggacctatcaggacaagaagccaccaacaatgagtactcagagatcaagatccccaagtaa

SEQ ID NO: 181354 - DNA, 2949 bp, Homo sapiens
  Payload ID: 15725
  Gene Symbol: SIGLEC8
  Gene Name: sialic acid binding Ig-like lectin 8
  Uniprot ID: Q9NYZ4
  ENST ID: ENST00000321424
  CDS Start-End: 68-1567
agtttctgagagaagaaccctgaggaacagacgttccctggcggccctggcgccttcaaacccagacatgctgctgctgctgctgctgctgcccctgctctgggggacaaaggggatggagggagacagacaatatggggatggttacttgctgcaagtgcaggagctggtgacggtgcaggagggcctgtgtgtccatgtgccctgctccttctcctacccccaggatggctggactgactctgacccagttcatggctactggttccgggcaggagacagaccataccaagacgctccagtggccacaaacaacccagacagagaagtgcaggcagagacccagggccgattccaactccttggggacatttggagcaacgactgctccctgagcatcagagacgccaggaagagggataaggggtcatatttctttcggctagagagaggaagcatgaaatggagttacaaatcacagttgaattacaaaactaagcagctgtctgtgtttgtgacagccctgacccataggcctgacatcctcatcctagggaccctagagtctggccactccaggaacctgacctgctctgtgccctgggcctgtaagcaggggacaccccccatgatctcctggattggggcctccgtgtcctccccgggccccactactgcccgctcctcagtgctcacccttaccccaaagccccaggaccacggcaccagcctcacctgtcaggtgaccttgcctgggacaggtgtgaccacgaccagtaccgtccgcctcgatgtgtcctaccctccttggaacttgaccatgactgtcttccaaggagatgccacagcatccacagccctgggaaatggctcatctctttcagtccttgagggccagtctctgcgcctggtctgtgctgtcaacagcaatccccctgccaggctgagctggacccgggggagcctgaccctgtgcccctcacggtcctcaaaccctgggctgctggagctgcctcgagtgcacgtgagggatgaaggggaattcacctgccgagctcagaacgctcagggctcccagcacatttccctgagcctctccctgcagaatgagggcacaggcacctcaagacctgtatcacaagtgacactggcagcagtcgggggagctggagccacagccctggccttcctgtccttctgcatcatcttcatcatagtgaggtcctgcaggaagaaatcggcaaggccagcagcgggcgtgggggatacaggcatggaagatgcaaaggccatcaggggctcggcctctcagggacccctgactgaatcctggaaagatggcaaccccctgaagaagcctcccccagctgttgccccctcgtcaggggaggaaggagagctccattatgcaaccctcagcttccataaagtgaagcctcaggacccgcagggacaggaggccactgacagtgaatactcggagatcaagatccacaagcgagaaactgcagagactcaggcctgtttgaggaatcacaacccctccagcaaagaagtcagaggctgattctcatagaacaagaaccctctagagccccatgctatgcagtaggtcaccagggctccctcctcctgtctaaccaaaacttggaccaatgtctcccctttccccggctaccagggacccatccctgcctctagcttctactacccaccattctcctctcgacctctctgaggttgactattttagattccacatagagatgaggtcatgtggtacttgcctctctgtgtgtggctcattttacacaaaaaaatatcccctaggttcatccatgttctctcaaatgacagaatcaagcactgaatatttttttttctttgagagatggagtttcgctctgttgcccaggctggagtgcagtggttcaatctctgctcactgcaacctccacctcctgggttcaaacgattctcctgcctcagcttcccaagtagctggtactacaggcgtgtgtcaccacgcccagctaatttttgtattttttagtagagacggggtttcactataagtgggccaggctagtctcaaactcctgacctcaagtgatctgcctgccttggcctcccaaagtgctgggatttcaggcatgagccaccgcacccagcttgcattgaatattttcaaggagctaaaagaagattttaaatggtctcacaaaaacagataaatatttgcacagatgggtgtgctaatcattgtgccttgatggttccacgatgtatccgggtgtggaaatctcactgggtctctctcaaggccactcggctactcaggacagggctggaatttaaagcctgtccgattctgaggtctcttctctcatctagcactgagtcaagcaatcagcaggctgggcaccccttagccataagttttcaggaaataaattccttgagggcattgacttttacaaaagagggagcagcaatggcctagagtctcaggaacaagacaggtgcactgaggagatgaaggccgggaccccctgcccaacctgtatggcgggtctgtacttattttgtttacccccaatttaaaacgtttttttttattgcaggttgtttgtttgatatggtttggctgtgtccccacccaaatcttatctagaattgtaatcagaattataatccccatgtgttgggggagggacctggtgggaggtgataggatcatgggggtggttcccccatgctgttctgatagtgagtgagttatcacgagatctgatggttttgtaagtggtggtttcccctgctcttctctcttgcctgccaccatgtaagatgtgcctggttccccttccgccatgattgtaagtttcctgaggcctcccccgccatgtggaactgtgagtcaattacacctctttcatttataaatta

SEQ ID NO: 181355 - DNA, 1293 bp, Homo sapiens
  Payload ID: 15725
  Gene Symbol: SIGLEC8
  Gene Name: sialic acid binding Ig-like lectin 8
  Uniprot ID: Q9NYZ4
  ENST ID: ENST00000340550
  CDS Start-End: 70-1290
tcagtttctgagagaagaaccctgaggaacagacgttccctggcggccctggcgccttcaaacccagacatgctgctgctgctgctgctgctgcccctgctctgggggacaaaggggatggagggagacagacaatatggggatggttacttgctgcaagtgcaggagctggtgacggtgcaggagggcctgtgtgtccatgtgccctgctccttctcctacccccaggatggctggactgactctgacccagttcatggctactggttccgggcaggagacagaccataccaagacgctccagtggccacaaacaacccagacagagaagtgcaggcagagacccagggccgattccaactccttggggacatttggagcaacgactgctccctgagcatcagagacgccaggaagagggataaggggtcatatttctttcggctagagagaggaagcatgaaatggagttacaaatcacagttgaattacaaaactaagcagctgtctgtgtttgtgacagaccctccttggaacttgaccatgactgtcttccaaggagatgccacagcatccacagccctgggaaatggctcatctctttcagtccttgagggccagtctctgcgcctggtctgtgctgtcaacagcaatccccctgccaggctgagctggacccgggggagcctgaccctgtgcccctcacggtcctcaaaccctgggctgctggagctgcctcgagtgcacgtgagggatgaaggggaattcacctgccgagctcagaacgctcagggctcccagcacatttccctgagcctctccctgcagaatgagggcacaggcacctcaagacctgtatcacaagtgacactggcagcagtcgggggagctggagccacagccctggccttcctgtccttctgcatcatcttcatcatagtgaggtcctgcaggaagaaatcggcaaggccagcagcgggcgtgggggatacaggcatggaagatgcaaaggccatcaggggctcggcctctcagggacccctgactgaatcctggaaagatggcaaccccctgaagaagcctcccccagctgttgccccctcgtcaggggaggaaggagagctccattatgcaaccctcagcttccataaagtgaagcctcaggacccgcagggacaggaggccactgacagtgaatactcggagatcaagatccacaagcgagaaactgcagagactcaggcctgtttgaggaatcacaacccctccagcaaagaagtcagaggctgattc

SEQ ID NO: 181356 - DNA, 1528 bp, Homo sapiens
  Payload ID: 15725
  Gene Symbol: SIGLEC8
  Gene Name: sialic acid binding Ig-like lectin 8
  ENST ID: ENST00000430817
  CDS Start-End: 66-1238
tttctgagagaagaaccctgaggaacagacgttccctggcggccctggcgccttcaaacccagacatgctgctgctgctgctgctgctgcccctgctctgggggacaaaggggatggagggagacagacaatatggggatggttacttgctgcaagtgcaggagctggtgacggtgcaggagggcctgtgtgtccatgtgccctgctccttctcctacccccaggatggctggactgactctgacccagttcatggctactggttccgggcaggagacagaccataccaagacgctccagtggccacaaacaacccagacagagaagtgcaggcagagacccagggccgattccaactccttggggacatttggagcaacgactgctccctgagcatcagagacgccaggaagagggataaggggtcatatttctttcggctagagagaggaagcatgaaatggagttacaaatcacagttgaattacaaaactaagcagctgtctgtgtttgtgacagcatccacagccctgggaaatggctcatctctttcagtccttgagggccagtctctgcgcctggtctgtgctgtcaacagcaatccccctgccaggctgagctggacccgggggagcctgaccctgtgcccctcacggtcctcaaaccctgggctgctggagctgcctcgagtgcacgtgagggatgaaggggaattcacctgccgagctcagaacgctcagggctcccagcacatttccctgagcctctccctgcagaatgagggcacaggcacctcaagacctgtatcacaagtgacactggcagcagtcgggggagctggagccacagccctggccttcctgtccttctgcatcatcttcatcatagtgaggtcctgcaggaagaaatcggcaaggccagcagcgggcgtgggggatacaggcatggaagatgcaaaggccatcaggggctcggcctctcagggacccctgactgaatcctggaaagatggcaaccccctgaagaagcctcccccagctgttgccccctcgtcaggggaggaaggagagctccattatgcaaccctcagcttccataaagtgaagcctcaggacccgcagggacaggaggccactgacagtgaatactcggagatcaagatccacaagcgagaaactgcagagactcaggcctgtttgaggaatcacaacccctccagcaaagaagtcagaggctgattctcatagaacaagaaccctctagagccccatgctatgcaatgtgcctggttccccttccgccatgattgtaagtttcctgaggcctcccccgccatgtggaactgtgagtcaattacacctctttcatttataaattactcagtctcaggtatttcttaatagcagtgtgaaaacaggctaacacattgttctttgaaatttaaaaatagcgttagcttttcagttgaatcacgcagctcttacatgtgccatgccatgagtgttgccaaacatgcacccctgtgtaa

SEQ ID NO: 181357 - DNA, 1690 bp, Homo sapiens
  Payload ID: 15726
  Gene Symbol: SIGLEC9
  Gene Name: sialic acid binding Ig-like lectin 9
  Uniprot ID: Q9Y336
  ENST ID: ENST00000250360
  CDS Start-End: 68-1459
agttcctgagagaagaaccctgaggaacagacgttccctcgcggccctggcacctctaaccccagacatgctgctgctgctgctgcccctgctctgggggagggagagggcggaaggacagacaagtaaactgctgacgatgcagagttccgtgacggtgcaggaaggcctgtgtgtccatgtgccctgctccttctcctacccctcgcatggctggatttaccctggcccagtagttcatggctactggttccgggaaggggccaatacagaccaggatgctccagtggccacaaacaacccagctcgggcagtgtgggaggagactcgggaccgattccacctccttggggacccacataccaagaattgcaccctgagcatcagagatgccagaagaagtgatgcggggagatacttctttcgtatggagaaaggaagtataaaatggaattataaacatcaccggctctctgtgaatgtgacagccttgacccacaggcccaacatcctcatcccaggcaccctggagtccggctgcccccagaatctgacctgctctgtgccctgggcctgtgagcaggggacaccccctatgatctcctggatagggacctccgtgtcccccctggacccctccaccacccgctcctcggtgctcaccctcatcccacagccccaggaccatggcaccagcctcacctgtcaggtgaccttccctggggccagcgtgaccacgaacaagaccgtccatctcaacgtgtcctacccgcctcagaacttgaccatgactgtcttccaaggagacggcacagtatccacagtcttgggaaatggctcatctctgtcactcccagagggccagtctctgcgcctggtctgtgcagttgatgcagttgacagcaatccccctgccaggctgagcctgagctggagaggcctgaccctgtgcccctcacagccctcaaacccgggggtgctggagctgccttgggtgcacctgagggatgcagctgaattcacctgcagagctcagaaccctctcggctctcagcaggtctacctgaacgtctccctgcagagcaaagccacatcaggagtgactcagggggtggtcgggggagctggagccacagccctggtcttcctgtccttctgcgtcatcttcgttgtagtgaggtcctgcaggaagaaatcggcaaggccagcagcgggcgtgggagatacgggcatagaggatgcaaacgctgtcaggggttcagcctctcaggggcccctgactgaaccttgggcagaagacagtcccccagaccagcctcccccagcttctgcccgctcctcagtgggggaaggagagctccagtatgcatccctcagcttccagatggtgaagccttgggactcgcggggacaggaggccactgacaccgagtactcggagatcaagatccacagatgagaaactgcagagactcaccctgattgagggatcacagcccctccaggcaagggagaagtcagaggctgattcttgtagaattaacagccctcaacgtgatgagctatgataacactatgaattatgtgcagagtgaaaagcacacaggctttagagtcaaagtatctcaaacctgaatccacactgtgccctcccttttatttttttaactaaaagacagacaaattccta

SEQ ID NO: 181358 - DNA, 1960 bp, Homo sapiens
  Payload ID: 15726
  Gene Symbol: SIGLEC9
  Gene Name: sialic acid binding Ig-like lectin 9
  Uniprot ID: Q9Y336
  ENST ID: ENST00000440804
  CDS Start-End: 68-1507
agttcctgagagaagaaccctgaggaacagacgttccctcgcggccctggcacctctaaccccagacatgctgctgctgctgctgcccctgctctgggggagggagagggcggaaggacagacaagtaaactgctgacgatgcagagttccgtgacggtgcaggaaggcctgtgtgtccatgtgccctgctccttctcctacccctcgcatggctggatttaccctggcccagtagttcatggctactggttccgggaaggggccaatacagaccaggatgctccagtggccacaaacaacccagctcgggcagtgtgggaggagactcgggaccgattccacctccttggggacccacataccaagaattgcaccctgagcatcagagatgccagaagaagtgatgcggggagatacttctttcgtatggagaaaggaagtataaaatggaattataaacatcaccggctctctgtgaatgtgacagccttgacccacaggcccaacatcctcatcccaggcaccctggagtccggctgcccccagaatctgacctgctctgtgccctgggcctgtgagcaggggacaccccctatgatctcctggatagggacctccgtgtcccccctggacccctccaccacccgctcctcggtgctcaccctcatcccacagccccaggaccatggcaccagcctcacctgtcaggtgaccttccctggggccagcgtgaccacgaacaagaccgtccatctcaacgtgtcctacccgcctcagaacttgaccatgactgtcttccaaggagacggcacagtatccacagtcttgggaaatggctcatctctgtcactcccagagggccagtctctgcgcctggtctgtgcagttgatgcagttgacagcaatccccctgccaggctgagcctgagctggagaggcctgaccctgtgcccctcacagccctcaaacccgggggtgctggagctgccttgggtgcacctgagggatgcagctgaattcacctgcagagctcagaaccctctcggctctcagcaggtctacctgaacgtctccctgcagagcaaagccacatcaggagtgactcagggggtggtcgggggagctggagccacagccctggtcttcctgtccttctgcgtcatcttcgttgtagtgaggtcctgcaggaagaaatcggcaaggccagcagcgggcgtgggagatacgggcatagaggatgcaaacgctgtcaggggttcagcctctcagatcttgaatcattttattggatttcctacattccttggactgggtttcgagtttctcctgaatctccgtgatctttgttgccatccagattctgaattctatgtctatcatttcagtcatttcagactcattaagaacattgctggggagatagtgtggtcacttgaaggtaaaatactctggcttttggatgtgtcagatttctttcactggttcttcctcatctgtgtgggctgatgttcctttaatctttgaagttgctgttctttggatagggctctttgcttttatattctctgatgcccttgagggtttcacagtggtataacttgggcttagacaactgcatttgtttctggatgatttcaaggggcccaggctcaactcagcactcctgagctgcatgctctaactacagggacctgggacctggcccatggcttttttttttttttttcctggcccttcaaggttaagcacctcctatgctggaatggccaaggtgttccgggtccactggcaacaacgctccaataggggttgctgacaaagcattttggcagggtggccatgggtgatgggagttcctgcacgtggtgtgcatcagctgcagggtggccgtgggtcttgcaaatctgcttgctaatgttatgcctaagatcacgttataaaagactaacttgtgcctca

SEQ ID NO: 181359 - DNA, 614 bp, Homo sapiens
  Payload ID: 15726
  Gene Symbol: SIGLEC9
  Gene Name: sialic acid binding Ig-like lectin 9
  ENST ID: ENST00000599948
  CDS Start-End: 1-614
tatccacagtcttgggaaatggctcatctctgtcactcccagagggccagtctctgcgcctggtctgtgcagttgatgcagttgacagcaatccccctgccaggctgagcctgagctggagaggcctgaccctgtgcccctcacagccctcaaacccgggggtgctggagctgccttgggtgcacctgagggatgcagctgaattcacctgcagagctcagaaccctctcggctctcagcaggtctacctgaacgtctccctgcagagcaaagccacatcaggagtgactcagggggtggtcgggggagctggagccacagccctggtcttcctgtccttctgcgtcatcttcgttgtagtgaggtcctgcaggaagaaatcggcaaggccagcagcgggcgtgggagatacgggcatagaggatgcaaacgctgtcaggggttcagcctctcagaagacatcatcgtccagttcctctgcatttgaacagctgttcccccacccctcaataccgtttagagcagaagccagcaaatactatctgtcagggacagatagaaactattttcggcttcatgggccacacagtctcattgcagctcctcaaatctgc

SEQ ID NO: 181360 - DNA, 2045 bp, Homo sapiens
  Payload ID: 15727
  Gene Symbol: NEU1
  Gene Name: sialidase 1 (lysosomal sialidase)
  Uniprot ID: Q99519
  ENST ID: ENST00000229725
  CDS Start-End: 131-1378
cgggaagcgcggcggggcctccagaccggggcgggcttaagggtgacatctgcgctttaaagggtccgggtcagctgactcccgactctgtggagtctagctgccagggtcgcggcagctgcggggagagatgactggggagcgacccagcacggcgctcccggacagacgctgggggccgcggattctgggcttctggggaggctgtagggtttgggtgtttgccgcgatcttcctgctgctgtctctggcagcctcctggtccaaggctgagaacgacttcggtctggtgcagccgctggtgaccatggagcaactgctgtgggtgagcgggagacagatcggctcagtggacaccttccgcatcccgctcatcacagccactccgcggggcactcttctcgcctttgctgaggcgaggaaaatgtcctcatccgatgagggggccaagttcatcgccctgcggaggtccatggaccagggcagcacatggtctcctacagcgttcattgtcaatgatggggatgtccccgatgggctgaaccttggggcagtagtgagcgatgttgagacaggagtagtatttcttttctactccctttgtgctcacaaggccggctgccaggtggcctctaccatgttggtatggagcaaggatgatggtgtttcctggagcacaccccggaatctctccctggatattggcactgaagtgtttgcccctggaccgggctctggtattcagaaacagcgggagccacggaagggccgcctcatcgtgtgtggccatgggacgctggagcgggacggagtcttctgtctcctcagcgatgatcatggtgcctcctggcgctacggaagtggggtcagcggcatcccctacggtcagcccaagcaggaaaatgatttcaatcctgatgaatgccagccctatgagctcccagatggctcagtcgtcatcaatgcccgaaaccagaacaactaccactgccactgccgaattgtcctccgcagctatgatgcctgtgatacactaaggccccgtgatgtgaccttcgaccctgagctcgtggaccctgtggtagctgcaggagctgtagtcaccagctccggcattgtcttcttctccaacccagcacatccagagttccgagtgaacctgaccctgcgatggagcttcagcaatggtacctcatggcggaaagagacagtccagctatggccaggccccagtggctattcatccctggcaaccctggagggcagcatggatggagaggagcaggccccccagctctacgtcctgtatgagaaaggccggaaccactacacagagagcatctccgtggccaaaatcagtgtctatgggacactctgagctgtgccactgccacaggggtattctgccttcaggactctgccttcaggaacacgggtctgtagagggtctgctggagacgcctgaaagacagttccatcttcctttagactccagccttggcaaaatcaccttccctttaccagggaaatcacttcctttaggactgaaagctaggcgtcctctcccacaaaaaagtcctgccctcatctgagaatactgtctttccatatggctaagtgtggccccaccaccctctctgccctcccgggacattgattggtcctgtcttgggcaggtctagtgagctgtagaattgaatcaatgtgaactcagggaactggggaaggctgagcctcctctttggtgttgcggtaagataaccgacagggctggtgaaagtccccagatggcaggatatttggtttcagagtaaggactaggtgcaccaccatgactgactatcaatcaaaatgtttgtaacttaaaatttttaatgaaggataatgaatatttgtagagtctctatggttctgtcaatgcacatcttcgtgtctgttttcctcatgtatccttgtgagcctgggtgagttctggggagagacctgatgtgcgtactgcctgtgaaaatctgactttggcaaatcaaatcctcttttccttttga

SEQ ID NO: 181361 - DNA, 2045 bp, Homo sapiens; identical to SEQ ID NO: 181360
  Payload ID: 15727
  Gene Symbol: NEU1
  Gene Name: sialidase 1 (lysosomal sialidase)
  Uniprot ID: Q99519
  ENST ID: ENST00000375631
  CDS Start-End: 131-1378

SEQ ID NO: 181362 - DNA, 2071 bp, Homo sapiens
  Payload ID: 15727
  Gene Symbol: NEU1
  Gene Name: sialidase 1 (lysosomal sialidase)
  Uniprot ID: Q99519
  ENST ID: ENST00000411774
  CDS Start-End: 157-1404
gagctacttgaagaccaattagagtccgggaagcgcggcggggcctccagaccggggcgggcttaagggtgacatctgcgctttaaagggtccgggtcagctgactcccgactctgtggagtctagctgccagggtcgcggcagctgcggggagagatgactggggagcgacccagcacggcgctcccggacagacgctgggggccgcggattctgggcttctggggaggctgtagggtttgggtgtttgccgcgatcttcctgctgctgtctctggcagcctcctggtccaaggctgagaacgacttcggtctggtgcagccgctggtgaccatggagcaactgctgtgggtgagcgggagacagatcggctcagtggacaccttccgcatcccgctcatcacagccactccgcggggcactcttctcgcctttgctgaggcgaggaaaatgtcctcatccgatgagggggccaagttcatcgccctgcggaggtccatggaccagggcagcacatggtctcctacagcgttcattgtcaatgatggggatgtccccgatgggctgaaccttggggcagtagtgagcgatgttgagacaggagtagtatttcttttctactccctttgtgctcacaaggccggctgccaggtggcctctaccatgttggtatggagcaaggatgatggtgtttcctggagcacaccccggaatctctccctggatattggcactgaagtgtttgcccctggaccgggctctggtattcagaaacagcgggagccacggaagggccgcctcatcgtgtgtggccatgggacgctggagcgggacggagtcttctgtctcctcagcgatgatcatggtgcctcctggcgctacggaagtggggtcagcggcatcccctacggtcagcccaagcaggaaaatgatttcaatcctgatgaatgccagccctatgagctcccagatggctcagtcgtcatcaatgcccgaaaccagaacaactaccactgccactgccgaattgtcctccgcagctatgatgcctgtgatacactaaggccccgtgatgtgaccttcgaccctgagctcgtggaccctgtggtagctgcaggagctgtagtcaccagctccggcattgtcttcttctccaacccagcacatccagagttccgagtgaacctgaccctgcgatggagcttcagcaatggtacctcatggcggaaagagacagtccagctatggccaggccccagtggctattcatccctggcaaccctggagggcagcatggatggagaggagcaggccccccagctctacgtcctgtatgagaaaggccggaaccactacacagagagcatctccgtggccaaaatcagtgtctatgggacactctgagctgtgccactgccacaggggtattctgccttcaggactctgccttcaggaacacgggtctgtagagggtctgctggagacgcctgaaagacagttccatcttcctttagactccagccttggcaaaatcaccttccctttaccagggaaatcacttcctttaggactgaaagctaggcgtcctctcccacaaaaaagtcctgccctcatctgagaatactgtctttccatatggctaagtgtggccccaccaccctctctgccctcccgggacattgattggtcctgtcttgggcaggtctagtgagctgtagaattgaatcaatgtgaactcagggaactggggaaggctgagcctcctctttggtgttgcggtaagataaccgacagggctggtgaaagtccccagatggcaggatatttggtttcagagtaaggactaggtgcaccaccatgactgactatcaatcaaaatgtttgtaacttaaaatttttaatgaaggataatgaatatttgtagagtctctatggttctgtcaatgcacatcttcgtgtctgttttcctcatgtatccttgtgagcctgggtgagttctggggagagacctgatgtgcgtactgcctgtgaaaatctgactttggcaaatcaaatcctcttttccttttga

SEQ ID NO: 181363 - DNA, 2045 bp, Homo sapiens; identical to SEQ ID NO: 181360
  Payload ID: 15727
  Gene Symbol: NEU1
  Gene Name: sialidase 1 (lysosomal sialidase)
  Uniprot ID: Q99519
  ENST ID: ENST00000423382
  CDS Start-End: 131-1378

SEQ ID NO: 181364 - DNA, 2045 bp, Homo sapiens; identical to SEQ ID NO: 181360
  Payload ID: 15727
  Gene Symbol: NEU1
  Gene Name: sialidase 1 (lysosomal sialidase)
  Uniprot ID: Q99519
  ENST ID: ENST00000437432
  CDS Start-End: 131-1378

SEQ ID NO: 181365 - DNA, 2045 bp, Homo sapiens
  Payload ID: 15727
  Gene Symbol: NEU1
  Gene Name: sialidase 1 (lysosomal sialidase)
  Uniprot ID: Q99519
  ENST ID: ENST00000439648
  CDS Start-End: 131-1378
cgggaagcgcggcggggcctccagaccggggcgggcttaagggtgacatctgcgctttaaagggtccgggtcagctgactcccgactctgtggagtctagctgccagggtcgcggcagctgcggggagagatgactggggagcgacccagcacggcgctcccggacagacgctgggggccgcggattctgggcttctggggaggctgtagggtttgggtgtttgccgcgatcttcctgctgctgtctctggcagcctcctggtccaaggctgagaacgacttcggtctggtgcagccgctggtgaccatggagcaactgctgtgggtgagcgggagacagatcggctcagtggacaccttccgcatcccgctcatcacagccactccgcggggcactcttctcgcctttgctgaggcgaggaaaatgtcctcatccgatgagggggccaagttcatcgccctgcggaggtccatggaccagggcagcacatggtctcctacagcgttcattgtcaatgatggggatgtccccgatgggctgaaccttggggcagtagtgagcgatgttgagacaggagtagtatttcttttctactccctttgtgctcacaaggccggctgccaggtggcctctaccatgttggtatggagcaaggatgatggtgtttcctggagcacaccccggaatctctccctggatattggcactgaagtgtttgcccctggaccgggctctggtattcagaaacagcgggagccacggaagggccgcctcatcgtgtgtggccatgggacgctggagcgggacggagtcttctgtctcctcagcgatgatcatggtgcctcctggcgctacggaagtggggtcagcggcatcccctacggtcagcccaagcaggaaaatgatttcaatcctgatgaatgccagccctatgagctcccagatggctcagtcgtcatcaatgcccgaaaccagaacaactaccactgccactgccgaattgtcctccgcagctatgatgcctgtgatacactaaggccccgtgatgtgaccttcgaccctgagctcgtggaccctgtggtagctgcaggagctgtagtcaccagctccggcattgtcttcttctccaacccagcacatccagagttccgagtgaacctgaccctgcgatggagcttcagcaatggtacctcatggcggaaagagacagtccagctatggccaggccccagtggctattcatccctggcaaccctggagggcagcatggatggagaggagcaggccccccagctctacgtcctgtatgagaaaggccggaaccactacacagagagcatctccgtggccaaaatcagtgtctatgggacactctgagctgtgccactgccacaggggtattctgccttcaggactctgccttcaggaacacaggtctgtagagggtctgctggagacgcctgaaagacagttccatcttcctttagactccagccttggcaaaatcaccttccctttaccagggaaatcacttcctttaggactgaaagctaggcgtcctctcccacaaaaaagtcctgccctcatctgagaatactgtctttccatatggctaagtgtggccccaccaccctctctgccctcccgggacattgattggtcctgtcttgggcaggtctagtgagctgtagaattgaatcaatgtgaactcagggaactggggaaggctgagcctcctctttggtgttgcggtaagataaccgacagggctggtgaaagtccccagatggcaggatatttggtttcagagtaaggactaggtgcaccaccatgactgactatcaatcaaaatgtttgtaacttaaaatttttaatgaaggataatgaatatttgtagagtctctatggttctgtcaatgcacatcttcgtgtctgttttcctcatgtatccttgtgagcctgggtgagttctggggagagacctgatgtgcgtactgcctgtgaaaatctgactttggcaaatcaaatcctcttttccttttga

SEQ ID NO: 181366 - DNA, 2045 bp, Homo sapiens; identical to SEQ ID NO: 181360
  Payload ID: 15727
  Gene Symbol: NEU1
  Gene Name: sialidase 1 (lysosomal sialidase)
  Uniprot ID: Q99519
  ENST ID: ENST00000422978
  CDS Start-End: 131-1378

SEQ ID NO: 181367 - DNA, 2045 bp, Homo sapiens; identical to SEQ ID NO: 181360
  Payload ID: 15727
  Gene Symbol: NEU1
  Gene Name: sialidase 1 (lysosomal sialidase)
  Uniprot ID: Q99519
  ENST ID: ENST00000434496
  CDS Start-End: 131-1378

SEQ ID NO: 181368 - DNA, 1875 bp, Homo sapiens
  Payload ID: 15727
  Gene Symbol: NEU1
  Gene Name: sialidase 1 (lysosomal sialidase)
  ENST ID: ENST00000475767
  CDS Start-End: 47-850
actctgtggagtctagctgccagggtcgcggcagctgcggggagagatgactggggagcgacccagcacggcgctcccggacagacgctgggggccgcggattctgggcttctggggaggctgtagggtttgggtgtttgccgcgatcttcctgctgctgtctctggcagcctcctggtccaaggctgagaacgacttcggtctggtgcagccgctggtgaccatggagcaactgctgtgggtgagcgggagacagatcggctcagtggacaccttccgcatcccgctcatcacagccactccgcggggcactcttctcgcctttgctgaggcgaggaaaatgtcctcatccgatgagggggccaagttcatcgccctgcggaggtccatggaccagggcagcacatggtctcctacagcgttcattgtcaatgatggggatgtccccgatgggctgaaccttggggcagtagtgagcgatgttgagacaggagtagtatttcttttctactccctttgtgctcacaaggccggctgccaggtggcctctaccatgttggtatggagcaaggatgatggtgtttcctggagcacaccccggaatctctccctggatattggcactgaagtgtttgcccctggaccgggctctggtattcagaaacagcgggagccacggaagggccgcctcatcgtgtgtggccatgggacgctggagcgggacggagtcttctgtctcctcagcgatgatcatggtgcctcctggcgctacggaagtggggtcagcggcatcccctacggtcagcccaagcaggaaaatgatttcaatcctgatgaatgccagctatgatgcctgtgatacactaaggccccgtgatgtgaccttcgaccctgagctcgtggaccctgtggtagctgcaggagctgtagtcaccagctccggcattgtcttcttctccaacccagcacatccagagttccgagtgaacctgaccctgcgatggagcttcagcaatggtacctcatggcggaaagagacagtccagctatggccaggccccagtggctattcatccctggcaaccctggagggcagcatggatggagaggagcaggccccccagctctacgtcctgtatgagaaaggccggaaccactacacagagagcatctccgtggccaaaatcagtgtctatgggacactctgagctgtgccactgccacaggggtattctgccttcaggactctgccttcaggaacacgggtctgtagagggtctgctggagacgcctgaaagacagttccatcttcctttagactccagccttggcaaaatcaccttccctttaccagggaaatcacttcctttaggactgaaagctaggcgtcctctcccacaaaaaagtcctgccctcatctgagaatactgtctttccatatggctaagtgtggccccaccaccctctctgccctcccgggacattgattggtcctgtcttgggcaggtctagtgagctgtagaattgaatcaatgtgaactcagggaactggggaaggctgagcctcctctttggtgttgcggtaagataaccgacagggctggtgaaagtccccagatggcaggatatttggtttcagagtaaggactaggtgcaccaccatgactgactatcaatcaaaatgtttgtaacttaaaatttttaatgaaggataatgaatatttgtagagtctctatggttctgtcaatgcacatcttcgtgtctgttttcctcatgtatccttgtgagcctgggtgagttctggggagagacctgatgtgcgtactgcctgtgaaaatctgactttggcaaatcaaatcctcttttccttttga

SEQ ID NO: 181369 - DNA, 1875 bp, Homo sapiens; identical to SEQ ID NO: 181368
  Payload ID: 15727
  Gene Symbol: NEU1
  Gene Name: sialidase 1 (lysosomal sialidase)
  ENST ID: ENST00000486127
  CDS Start-End: 47-850

SEQ ID NO: 181370 - DNA, 1875 bp, Homo sapiens; identical to SEQ ID NO: 181368
  Payload ID: 15727
  Gene Symbol: NEU1
  Gene Name: sialidase 1 (lysosomal sialidase)
  ENST ID: ENST00000495464
  CDS Start-End: 47-850

SEQ ID NO: 181371 - DNA, 1579 bp, Homo sapiens
  Payload ID: 15727
  Gene Symbol: NEU1
  Gene Name: sialidase 1 (lysosomal sialidase)
  ENST ID: ENST00000477637
  CDS Start-End: 41-259
tggagtctagctgccagggtcgcggcagctgcggggagagatgactggggagcgacccagcacggcgctcccggacagacgctgggggccgcggattctgggcttctggggaggctgtagggtttgggtgtttgccgcgatcttcctgctgctgtctctggcagcctcctggtccaaggctgagaacgacttcggtctggcagcacatggtctcctacagcgttcattgtcaatgatggggatgtccccgatgggctgaaccttggggcagtagtgagcgatgttgagacaggagtagtatttcttttctactccctttgtgctcacaaggccggctgccaggtggcctctaccatgttggtatggagcaaggatgatggtgtttcctggagcacaccccggaatctctccctggatattggcactgaagtgtttgcccctggaccgggctctggtattcagaaacagcgggagccacggaagggccgcctcatcgtgtgtggccatgggacgctggagcgggacggagtcttctgtctcctcagcgatgatcatggtgcctcctggcgctacggaagtggggtcagcggcatcccctacggtcagcccaagcaggaaaatgatttcaatcctgatgaatgccagccctatgagctcccagatggctcagtcgtcatcaatgcccgaaaccagaacaactaccactgccactgccgaattgtcctccgcagctatgatgcctgtgatacactaaggccccgtgatgtgaccttcgaccctgagctcgtggaccctgtggtagctgcaggagctgtagtcaccagctccggcattgtcttcttctccaacccagcacatccagagttccgagtgaacctgaccctgcgatggagcttcagcaatggtacctcatggcggaaagagacagtccagctatggccaggccccagtggctattcatccctggcaaccctggagggcagcatggatggagaggagcaggccccccagctctacgtcctgtatgagaaaggccggaaccactacacagagagcatctccgtggccaaaatcagtgtctatgggacactctgagctgtgccactgccacaggggtattctgccttcaggactctgccttcaggaacacaggtctgtagagggtctgctggagacgcctgaaagacagttccatcttcctttagactccagccttggcaaaatcaccttccctttaccagggaaatcacttcctttaggactgaaagctaggcgtcctctcccacaaaaaagtcctgccctcatctgagaatactgtctttccatatggctaagtgtggccccaccaccctctctgccctcccgggacattgattggtcctgtcttgggcaggtctagtgagctgtagaattgaatcaatgtgaactcagggaactggggaaggctgagcctcctctttggtgttgcggtaagataaccgacagggctggtgaaagtccccagatggcaggatatttggtttcagagtaaggactaggtgcaccaccatgactgactatcaatcaaaatgtttgtaac

SEQ ID NO: 181372 - DNA, 1875 bp, Homo sapiens
  Payload ID: 15727
  Gene Symbol: NEU1
  Gene Name: sialidase 1 (lysosomal sialidase)
  ENST ID: ENST00000473972
  CDS Start-End: 47-850
actctgtggagtctagctgccagggtcgcggcagctgcggggagagatgactggggagcgacccagcacggcgctcccggacagacgctgggggccgcggattctgggcttctggggaggctgtagggtttgggtgtttgccgcgatcttcctgctgctgtctctggcagcctcctggtccaaggctgagaacgacttcggtctggtgcagccgctggtgaccatggagcaactgctgtgggtgagcgggagacagatcggctcagtggacaccttccgcatcccgctcatcacagccactccgcggggcactcttctcgcctttgctgaggcgaggaaaatgtcctcatccgatgagggggccaagttcatcgccctgcggaggtccatggaccagggcagcacatggtctcctacagcgttcattgtcaatgatggggatgtccccgatgggctgaaccttggggcagtagtgagcgatgttgagacaggagtagtatttcttttctactccctttgtgctcacaaggccggctgccaggtggcctctaccatgttggtatggagcaaggatgatggtgtttcctggagcacaccccggaatctctccctggatattggcactgaagtgtttgcccctggaccgggctctggtattcagaaacagcgggagccacggaagggccgcctcatcgtgtgtggccatgggacgctggagcgggacggagtcttctgtctcctcagcgatgatcatggtgcctcctggcgctacggaagtggggtcagcggcatcccctacggtcagcccaagcaggaaaatgatttcaatcctgatgaatgccagctatgatgcctgtgatacactaaggccccgtgatgtgaccttcgaccctgagctcgtggaccctgtggtagctgcaggagctgtagtcaccagctccggcattgtcttcttctccaacccagcacatccagagttccgagtgaacctgaccctgcgatggagcttcagcaatggtacctcatggcggaaagagacagtccagctatggccaggccccagtggctattcatccctggcaaccctggagggcagcatggatggagaggagcaggccccccagctctacgtcctgtatgagaaaggccggaaccactacacagagagcatctccgtggccaaaatcagtgtctatgggacactctgagctgtgccactgccacaggggtattctgccttcaggactctgccttcaggaacacaggtctgtagagggtctgctggagacgcctgaaagacagttccatcttcctttagactccagccttggcaaaatcaccttccctttaccagggaaatcacttcctttaggactgaaagctaggcgtcctctcccacaaaaaagtcctgccctcatctgagaatactgtctttccatatggctaagtgtggccccaccaccctctctgccctcccgggacattgattggtcctgtcttgggcaggtctagtgagctgtagaattgaatcaatgtgaactcagggaactggggaaggctgagcctcctctttggtgttgcggtaagataaccgacagggctggtgaaagtccccagatggcaggatatttggtttcagagtaaggactaggtgcaccaccatgactgactatcaatcaaaatgtttgtaacttaaaatttttaatgaaggataatgaatatttgtagagtctctatggttctgtcaatgcacatcttcgtgtctgttttcctcatgtatccttgtgagcctgggtgagttctggggagagacctgatgtgcgtactgcctgtgaaaatctgactttggcaaatcaaatcctcttttccttttga

SEQ ID NO: 181373 - DNA, 1762 bp, Homo sapiens
  Payload ID: 15727
  Gene Symbol: NEU1
  Gene Name: sialidase 1 (lysosomal sialidase)
  ENST ID: ENST00000487340
  CDS Start-End: 41-259
tggagtctagctgccagggtcgcggcagctgcggggagagatgactggggagcgacccagcacggcgctcccggacagacgctgggggccgcggattctgggcttctggggaggctgtagggtttgggtgtttgccgcgatcttcctgctgctgtctctggcagcctcctggtccaaggctgagaacgacttcggtctggcagcacatggtctcctacagcgttcattgtcaatgatggggatgtccccgatgggctgaaccttggggcagtagtgagcgatgttgagacaggagtagtatttcttttctactccctttgtgctcacaaggccggctgccaggtggcctctaccatgttggtatggagcaaggatgatggtgtttcctggagcacaccccggaatctctccctggatattggcactgaagtgtttgcccctggaccgggctctggtattcagaaacagcgggagccacggaagggccgcctcatcgtgtgtggccatgggacgctggagcgggacggagtcttctgtctcctcagcgatgatcatggtgcctcctggcgctacggaagtggggtcagcggcatcccctacggtcagcccaagcaggaaaatgatttcaatcctgatgaatgccagccctatgagctcccagatggctcagtcgtcatcaatgcccgaaaccagaacaactaccactgccactgccgaattgtcctccgcagctatgatgcctgtgatacactaaggccccgtgatgtgaccttcgaccctgagctcgtggaccctgtggtagctgcaggagctgtagtcaccagctccggcattgtcttcttctccaacccagcacatccagagttccgagtgaacctgaccctgcgatggagcttcagcaatggtacctcatggcggaaagagacagtccagctatggccaggccccagtggctattcatccctggcaaccctggagggcagcatggatggagaggagcaggccccccagctctacgtcctgtatgagaaaggccggaaccactacacagagagcatctccgtggccaaaatcagtgtctatgggacactctgagctgtgccactgccacaggggtattctgccttcaggactctgccttcaggaacacgggtctgtagagggtctgctggagacgcctgaaagacagttccatcttcctttagactccagccttggcaaaatcaccttccctttaccagggaaatcacttcctttaggactgaaagctaggcgtcctctcccacaaaaaagtcctgccctcatctgagaatactgtctttccatatggctaagtgtggccccaccaccctctctgccctcccgggacattgattggtcctgtcttgggcaggtctagtgagctgtagaattgaatcaatgtgaactcagggaactggggaaggctgagcctcctctttggtgttgcggtaagataaccgacagggctggtgaaagtccccagatggcaggatatttggtttcagagtaaggactaggtgcaccaccatgactgactatcaatcaaaatgtttgtaacttaaaatttttaatgaaggataatgaatatttgtagagtctctatggttctgtcaatgcacatcttcgtgtctgttttcctcatgtatccttgtgagcctgggtgagttctggggagagacctgatgtgcgtactgcctgtgaaaatctgactttggcaaatcaaatcctcttttccttttga

SEQ ID NO: 181374 - DNA, 1762 bp, Homo sapiens; identical to SEQ ID NO: 181373
  Payload ID: 15727
  Gene Symbol: NEU1
  Gene Name: sialidase 1 (lysosomal sialidase)
  ENST ID: ENST00000473255
  CDS Start-End: 41-259

SEQ ID NO: 181375 - DNA, 1875 bp, Homo sapiens; identical to SEQ ID NO: 181368
  Payload ID: 15727
  Gene Symbol: NEU1
  Gene Name: sialidase 1 (lysosomal sialidase)
  ENST ID: ENST00000491768
  CDS Start-End: 47-850

SEQ ID NO: 181376 - DNA, 1875 bp, Homo sapiens; identical to SEQ ID NO: 181368
  Payload ID: 15727
  Gene Symbol: NEU1
  Gene Name: sialidase 1 (lysosomal sialidase)
  ENST ID: ENST00000465246
  CDS Start-End: 47-850

SEQ ID NO: 181377 - DNA, 1875 bp, Homo sapiens; identical to SEQ ID NO: 181368
  Payload ID: 15727
  Gene Symbol: NEU1
  Gene Name: sialidase 1 (lysosomal sialidase)
  ENST ID: ENST00000460245
  CDS Start-End: 47-850

SEQ ID NO: 181378 - DNA, 1762 bp, Homo sapiens; identical to SEQ ID NO: 181373
  Payload ID: 15727
  Gene Symbol: NEU1
  Gene Name: sialidase 1 (lysosomal sialidase)
  ENST ID: ENST00000473226
  CDS Start-End: 41-259

SEQ ID NO: 181379 - DNA, 1762 bp, Homo sapiens; identical to SEQ ID NO: 181373
  Payload ID: 15727
  Gene Symbol: NEU1
  Gene Name: sialidase 1 (lysosomal sialidase)
  ENST ID: ENST00000495201
  CDS Start-End: 41-259

SEQ ID NO: 181380 - DNA, 1762 bp, Homo sapiens; identical to SEQ ID NO: 181373
  Payload ID: 15727
  Gene Symbol: NEU1
  Gene Name: sialidase 1 (lysosomal sialidase)
  ENST ID: ENST00000460116
  CDS Start-End: 41-259

SEQ ID NO: 181381 - DNA, 1762 bp, Homo sapiens; identical to SEQ ID NO: 181373
  Payload ID: 15727
  Gene Symbol: NEU1
  Gene Name: sialidase 1 (lysosomal sialidase)
  ENST ID: ENST00000465061
  CDS Start-End: 41-259

SEQ ID NO: 181382 - DNA, 1875 bp, Homo sapiens; identical to SEQ ID NO: 181368
  Payload ID: 15727
  Gene Symbol: NEU1
  Gene Name: sialidase 1 (lysosomal sialidase)
  ENST ID: ENST00000464056
  CDS Start-End: 47-850

SEQ ID NO: 181383 - DNA, 1143 bp, Homo sapiens
  Payload ID: 15728
  Gene Symbol: NEU2
  Gene Name: sialidase 2 (cytosolic sialidase)
  Uniprot ID: Q9Y3R4
  ENST ID: ENST00000233840
  CDS Start-End: 1-1143
atggcgtcccttcctgtcctgcagaaggagagcgtgttccagtcgggagcccatgcctacagaatccctgccctgctctacctgcctgggcagcagtccctgctggccttcgcggaacagcgggcaagcaagaaggatgagcacgcagagctgattgtcctgcgcagaggagactacgacgcacccacccaccaggttcagtggcaagctcaggaggtggtggcccaggcccggctggatggccaccggtccatgaacccatgccccttgtatgacgcgcagacggggaccctcttcctcttcttcattgccatccctgggcaagtcacggagcaacagcagctgcagaccagggccaatgtgacgcggctgtgccaagtcaccagcactgaccacgggaggacctggagctcccccagagacctcactgatgcggccatcggcccagcctaccgggagtggtccacctttgcagtgggcccggggcattgtttgcagcttcacgacagggcccggagcctggtggtgcccgcctacgcctaccggaaacttcaccccatccaaaggccgatcccctctgccttctgcttcctcagccatgaccatgggcgcacgtgggcgcgagggcactttgtggcccaggacaccctggagtgccaggtggccgaagtcgagactggggagcagagggtggtgaccctcaacgcgagaagccacctccgagccagggtccaggcccagagcaccaatgacgggcttgatttccaggagtctcagctggtgaagaagctggtggagccgccgccccagggctgccaggggagcgtcatcagcttccccagcccccgctcggggcctggctccccagcccagtggctgctctacactcaccccacacactcctggcagagggccgacctgggtgcctacctcaacccgcgacctccagcccctgaggcctggtcagagccggtactgctggccaagggcagctgtgcctactcagacctccagagcatgggcaccggccctgatgggtcccccttgtttgggtgtctgtacgaagccaatgattacgaggagattgtctttctcatgttcaccctgaagcaagccttcccagctgagtacctgcctcagtga

SEQ ID NO: 181384 - DNA, 6728 bp, Homo sapiens
  Payload ID: 15729
  Gene Symbol: NEU3
  Gene Name: sialidase 3 (membrane sialidase)
  Uniprot ID: Q9UQ49
  ENST ID: ENST00000294064
  CDS Start-End: 928-2313
tttccttttattggcgtttgtaaaatttcttctttttaaaattgttatattttagagacagggtctcgctctgtcacccaggctggagtgcagtggtgcaatcacagctcaccacagcctccaactcctgggctcaaggcatcctcccacgtaggccttccaaagcgctgagattgtaggcataagccaccaggcccagcctattacctttacgttgtacttagtcccagataaaaaatgaccttagatcagtcctttcctctttggctggggagaggggggcttaaattccggtactgtgaaacagaagaatggactcagtgctatgtgacaaatctatgtatgtaaatgtgtgtatatacacacacataaattatatatatgaatatattttcattttcatattttgcaaggagagtagccaatgctctggacctctggtcctttttgtagggtaccctctgaggccgggaacctttgctcaactctcaggctgtccagggaagctttaggcggtgataccgagctacagaccaatataagagctcggggctgtggcactgaagagaggaggcggccgttgggaactgaggtgggcccagggcttgagctgagttggcgagggtggaggtggtgccggtcccacgccgtggtggggaccgagctgcgggctggagggaggggcagcgccgagggggcgggacggggagggctcgcggagtaggccaacggttggccccaaccgccactgactacagcctgcgcccgcctcttttcgttgccgttacctgtttccggcagtcgacacgctcttcgcttctcggggcttgtctccgtgtcctccgtctcagttgtttctccctctctatcctcctctgtctcagtctccccagccttggggccggtgcctcttccgggcttcggcgaatgagacctgcggacctgcccccgcgccccatggaagaatccccggcgtccagctctgccccgacagagacggaggagccggggtccagtgcagaggtcatggaagaagtgacaacatgctccttcaacagccctctgttccggcaggaagatgacagagggattacctaccggatcccagccctgctctacataccccccacccacaccttcctggcctttgcagagaagcgttctacgaggagagatgaggatgctctccacctggtgctgaggcgagggttgaggattgggcagttggtacagtgggggcccctgaagccactgatggaagccacactaccggggcatcggaccatgaacccctgtcctgtatgggagcagaagagtggttgtgtgttcctgttcttcatctgtgtgcggggccatgtcacagagcgtcaacagattgtgtcaggcaggaatgctgcccgcctttgcttcatctacagtcaggatgctggatgttcatggagtgaggtgagggacttgactgaggaggtcattggctcagagctgaagcactgggccacatttgctgtgggcccaggtcatggcatccagctgcagtcagggagactggtcatccctgcgtatacctactacatcccttcctggttcttttgcttccagctaccatgtaaaaccaggcctcattctctgatgatctacagtgatgacctaggggtcacatggcaccatggtagactcattaggcccatggttacagtagaatgtgaagtggcagaggtgactgggagggctggccaccctgtgctatattgcagtgcccggacaccaaacaggtgccgggcagaggcgctcagcactgaccatggtgaaggctttcagagactggccctgagtcgacagctctgtgagcccccacatggttgccaagggagtgtggtaagtttccggcccctggagatcccacataggtgccaggactctagcagcaaagatgcacccaccattcagcagagctctccaggcagttcactgaggctggaggaggaagctggaacaccgtcagaatcatggctcttgtactcacacccaaccagtaggaaacagagggttgacctaggtatctatctcaaccagacccccttggaggctgcctgctggtcccgcccctggatcttgcactgtgggccctgtggctactctgatctggctgctctggaggaggagggcttgtttgggtgtttgtttgaatgtgggaccaagcaagagtgtgagcagattgccttccgcctgtttacacaccgggagatcctgagtcacctgcagggggactgcaccagccctggtaggaacccaagccaattcaaaagcaattaattggcttaggacccaatttccatagatgcaaatggcagttacagacaggttaacagaagctactgaagtctacagataatcaaaaaacttaatattctgttccctaccttttttcacttttcctcctccaaagagcaaaatgaaaattttgccttagctactgcagtggaaagagcactgaactaggagttggaagacaaggatgtggtcctggctctgccactggcttgcttttggaccttggatgtgtcacctgaactctctggacctcaggtttccatctgtaaaatgagagtattggttctaagatttctcatcttctcatccctaggacaagcatagtgcctgcatgcttcatgatcagtaagtcctggctgcataaaggactctgatgtcaaaatggaaaccaggggacttaccttttcacatgacttacccctcatccgagtgtgaggttacaagcaggtgtcatggcaggaaggaagaccagatctgtatgatttgttccatttttaataacaaaaatatccacacccttttaataatgctcagttctgtaggctctctatcctagaggaattgagcaaaacagaagaatcatgaagtctcctaccttctacagccttgtagttctgcttaccttctcttcctcatccagaaagcatcattttctagggagaacaatgagaatctcaatgccagtagtactggataatagtgcgtattgcttctggtggcattaccctgatgatgggctgaagttcatttattagggtggttcctgatgggaaaaggacatggattaggactttaaaacactggacagaatttcccacagtctttgccctcaaggagttcaccagtttatggggctagaagagcgagaaaattcaagaaaataaatgtagctggtgggagactttgtagatgttgggctatatgttggggtgatggtagctcctgatgtaattttcttagttgcatcttcaatatgcctggagtcgtctgtccaaggcttgtccaggcttctgggtttctctcaagtttgtttttctcaggatattgtcctggcccagctactcctttacctgtgagaagatcttcaccattaggaagatctctagacccccagatctcagaatcaggcctatttgtgtaggcccatggaaatcactacttgtgaagtagagatgcctttttgtctaatggttttcgtgctgaacttagttcatgctgagtctctcagatgataccacgttggttgttcctatcttagattgtttctcccatagcctgttattgcaacagaaattctatcatgagagatttatttttttgtccctattttaggagtctaatgcttaaactggtatcaactaaatatatttggtgttgtacaatgaccacagagaacaagtcttagtcatgaaatatagcctaggagactaggggttacagttgcactagttgggtagagagagtcctacaggataaaagtggagattaactttacctactttagcagattgcttaagccatggcttagagtggcttttaaaaatccccttagcctctcctacatttgccaaggtaatcttcccaatacacaattattcactcatgtatacatttatctaaatatttcttgagtgcctaatacaaggtactttctactgccattccttggctctaaatcatttgtggttctccattgcctattataatgtaaagatgtttacatttagcctggcatgtaggaccttccagctgttgggtgaaataatgcacactttcctctacttccttatatgaggcccactgtcagggaaaacctctgtcaagttggcaggtggagggtggtggaggtctagggatgggcaggattggtgcagggaggaattggggaaggggagaggattaaaagggcagccccctcctgagtggtagaaactccttgtttagcaaagctttcctgaacactgtactgcaagtggataggaatagggaggatggccaagtcgtacaaccagggctaaaggatgaaaagaatgagaatatcaacttctttttttttttttttgagacagaatctcactctgtcgcccaggctggagtacagtggcacaatctcagctcactgcagtctccgcctcctgggttcaagcaattctcctgcctcagcctcccaagtagctgggattacaggtgcctgccactacgcccagctaattttttgtatttttagtagagacggggtttcaccatgttggccaggcttgtctcgaactcctagccttgtgattcgcctgcctcggcctcccaaagtgctgggaatacaggcatgagctactgcgcccagccgagaatatcaacttctttaggactactcaagaagggagtcaaggcagggaccttggtctgtgccactgtgacgcagagatgtataataccagtactcataagaggtccatctctaaattgccctcctcttacttcttccccctgcctcatgttttttctctttaatgactagcatcgaaactctttaaatggggcaggcctgtgttcttatctcaggaatagtaagaaaagggggttgggaacaggggaaatccagaataaagacttgagaaaggaacagagtgggtgatggcagctatgaagaaaaaacagatcagaagaagagtcctggcaccttaggaagagaaagtgtcacagacacgaggcctaggctagagagatggtgtaggtggtagctgctgtgaagaagaaatgacaacaggctggagctgttccctgaaacctgtgggaaggaagagagacctgcacaggccggcacttagcttgtggagaaggtcctaactcaacactgcaactttaagctggcttaacttgtccaagttccagatgaccaacaaagacagctatagacactctaactctgtgccaattacccaaggccttcagggccctgggacctattccatgatagtggtaccctaactgaacccatttcagccactcagattgataggatggaaaagacagggcaggtggtagcagctgtgaagaaaagaggaaagcagaagggtggcctataatctacaggcatgtagagaggactacataggcctctgttctttgccctcaggagcccccttcctgtcccttggactcagaatggatccttccagcacacatggcccaacactgagagtgcaggaagcatgggtaggggcctcctgctgctggtatgtacccaggccagcctcctgccgacacagcctactggctgggttcatgttcttactattcacctcaggccattgtctgggtgcttaatttgacttgtttcccctggtcaccagtctcccctccgatattcacaggacatcaagcagcttcagccacgggtaagaggcttttcaccctgcctgttgggtagcccagaggacccacaaaggtcaacctgagtctccacagcctcctccccagggcagtaggaattgatatctcacttttgccagattaggcttctcactcttcttgagtaggccataatccacctcttcagtaggccatgcatcttgtctctgcagtgccagaattcacagtctgggcctccctttggtccttaccataggctgccatgtattattgtctatgttgtgccctgtaggcctctgctaggctgtgaactccttgactgactcctcactgtgtcctttttaccttgaatcacagtggcttatctaaaaatataagcttttttctgtcatattctgaattccctgaaggtaaggactatgtctgattcctctctttgtcctctgcacccagcgtagggcctgaaacagagtagctagcagtaaagatacactgaatgaatgaatgagtcaaccatccttggcctctggagctaattgagaaggctagggggagttccgctgtagggagaaggatgttgcatccctttgtagattgtgtagcattcaaaacctgctgaacactcaccctcaatgtatattctctgttctggcctgcttcaaggtcagttacactacttcctgggatgggcctttctctggcttaagcttggttgtccctggctttcccaaggatcacagcccaaaaggcacagtggggaaaatttatggcctattccagaagagtgagcagcctaatcaagccaagccttgatttggggttctcacttcactggtattttccctctgtccctaattgggttttctatagttactagttttccaggcctccaagggagattctgaggcttgatgtgttctgactgtgtcttggctttgtgatgctgagtgccagaaatactctgtactataaaaactaccatcgttctttgaaacaacaaagaggaataaagaacttaattctggtga

SEQ ID NO: 181385 - DNA, 2468 bp, Homo sapiens
  Payload ID: 15729
  Gene Symbol: NEU3
  Gene Name: sialidase 3 (membrane sialidase)
  Uniprot ID: Q9UQ49
  ENST ID: ENST00000531509
  CDS Start-End: 491-1876
cccacgtaggccttccaaagcgctgagattgtaggcataagccaccaggcccagcctattacctttacgttgtacttagtcccagataaaaaatgaccttagatcagtcctttcctctttggctggggagaggggggcttaaattccggtactgtgaaacagaagaatggactcagtgctatgtgacaaatctatgtatgtaaatgtgtgtatatacacacacataaattatatatatgaatatattttcattttcatattttgcaaggagagtagccaatgctctggacctctggtcctttttgtagggtaccctctgaggccgggaacctttgctcaactctcaggctgtccagggaagctttaggcggtgataccgagctacagaccaatataagagctcggggctgtggcactgaagagaggaggcggccgttgggaactgagtctccccagccttggggccggtgcctcttccgggcttcggcgaatgagacctgcggacctgcccccgcgccccatggaagaatccccggcgtccagctctgccccgacagagacggaggagccggggtccagtgcagaggtcatggaagaagtgacaacatgctccttcaacagccctctgttccggcaggaagatgacagagggattacctaccggatcccagccctgctctacataccccccacccacaccttcctggcctttgcagagaagcgttctacgaggagagatgaggatgctctccacctggtgctgaggcgagggttgaggattgggcagttggtacagtgggggcccctgaagccactgatggaagccacactaccggggcatcggaccatgaacccctgtcctgtatgggagcagaagagtggttgtgtgttcctgttcttcatctgtgtgcggggccatgtcacagagcgtcaacagattgtgtcaggcaggaatgctgcccgcctttgcttcatctacagtcaggatgctggatgttcatggagtgaggtgagggacttgactgaggaggtcattggctcagagctgaagcactgggccacatttgctgtgggcccaggtcatggcatccagctgcagtcagggagactggtcatccctgcgtatacctactacatcccttcctggttcttttgcttccagctaccatgtaaaaccaggcctcattctctgatgatctacagtgatgacctaggggtcacatggcaccatggtagactcattaggcccatggttacagtagaatgtgaagtggcagaggtgactgggagggctggccaccctgtgctatattgcagtgcccggacaccaaacaggtgccgggcagaggcgctcagcactgaccatggtgaaggctttcagagactggccctgagtcgacagctctgtgagcccccacatggttgccaagggagtgtggtaagtttccggcccctggagatcccacataggtgccaggactctagcagcaaagatgcacccaccattcagcagagctctccaggcagttcactgaggctggaggaggaagctggaacaccgtcagaatcatggctcttgtactcacacccaaccagtaggaaacagagggttgacctaggtatctatctcaaccagacccccttggaggctgcctgctggtcccgcccctggatcttgcactgtgggccctgtggctactctgatctggctgctctggaggaggagggcttgtttgggtgtttgtttgaatgtgggaccaagcaagagtgtgagcagattgccttccgcctgtttacacaccgggagatcctgagtcacctgcagggggactgcaccagccctggtaggaacccaagccaattcaaaagcaattaattggcttaggacccaatttccatagatgcaaatggcagttacagacaggttaacagaagctactgaagtctacagataatcaaaaaacttaatattctgttccctaccttttttcacttttcctcctccaaagagcaaaatgaaaattttgccttagctactgcagtggaaagagcactgaactaggagttggaagacaaggatgtggtcctggctctgccactggcttgcttttggaccttggatgtgtcacctgaactctctggacctcaggtttccatctgtaaaatgagagtattggttctaagatttctcatcttctcatccctaggacaagcatagtgcctgcatgcttcatgatcagtaagtcctggctgcataaaggactctgatgtcaaaatggaaaccaggggacttaccttttcacatgacttacccctcatccgagtgtgaggttacaagcaggtgtcatggcaggaaggaagaccagatctgtatgatttgttccatttttaataacaaaaatatccacacccttttaataatgctcagttctgtaggctctctatcctagaggaattgagcaaaacag

SEQ ID NO: 181386 - DNA, 581 bp, Homo sapiens
  Payload ID: 15729
  Gene Symbol: NEU3
  Gene Name: sialidase 3 (membrane sialidase)
  ENST ID: ENST00000529024
  CDS Start-End: 72-377
agagaggaggcggccgttgggaactgagtctccccagccttggggccggtgcctcttccgggcttcggcgaatgagacctgcggacctgcccccgcgccccatggaagaatccccggcgtccagctctgccccgacagagacggaggagccggggtccagtgcagtgggggcccctgaagccactgatggaagccacactaccggggcatcggaccatgaacccctgtcctgtatgggagcagaagagtggttgtgtgttcctgttcttcatctgtgtgcggggccatgtcacagagcgtcaacagattgtgtcaggcaggaatgctgcccgcctttgcttcatctacagtcaggatgctggatgttcatggagtgagagaaccctgactaatacagtaaattggtaccagtagagtggggcattgccgaaaagatacccaaaaatgtggaaactactttggaacttggtaacaggcagaagttggaacagtttggagggctcagaagaagagagaaaaatgtggaaaagtttggaactccctagagacttgttgaatggctttgacaaaaatgctgataa

SEQ ID NO: 181387 - DNA, 746 bp, Homo sapiens
  Payload ID: 15729
  Gene Symbol: NEU3
  Gene Name: sialidase 3 (membrane sialidase)
  ENST ID: ENST00000534628
  CDS Start-End: 118-630
tcttcgcttctcggggcttgtctccgtgtcctccgtctcagttgtttctccctctctatcctcctctgtctcagtctccccagccttggggccggtgcctcttccgggcttcggcgaatgagacctgcggacctgcccccgcgccccatggaagaatccccggcgtccagctctgccccgacagagacggaggagccggggtccagtgcagaggtcatggaagaagtgacaacatgctccttcaacagccctctgttccggcaggaagatgacagagggattacctaccggatcccagccctgctctacataccccccacccacaccttcctggcctttgcagagaagcgttctacgaggagagatgaggatgctctccacctggtgctgaggcgagggttgaggattgggcagttggtacaggtgactcttcatcccagatctgagtctgggcctcagtttctcttcacaaagctcagagctcttcaggatctgtgccttttctcatcagtacaggaaagccctgtgtggggagcagaggcagaaaaaacagcaaaaacaatggctctcactgagtgcttattgtgtgccaggggcacattgggtcctcacagccattctgtgtcgtaggtactgttttcagtcatattttacagacaaggaaactgagactcagagaggttgccatttgctcaaggttatacagctataataaagcagtagaagctggtttcaaactcagtcgc

SEQ ID NO: 181388 - DNA, 1643 bp, Homo sapiens
  Payload ID: 15729
  Gene Symbol: NEU3
  Gene Name: sialidase 3 (membrane sialidase)
  ENST ID: ENST00000532963
  CDS Start-End: 128-433
gtcgacacgctcttcgcttctcggggcttgtctccgtgtcctccgtctcagttgtttctccctctctatcctcctctgtctcagtctccccagccttggggccggtgcctcttccgggcttcggcgaatgagacctgcggacctgcccccgcgccccatggaagaatccccggcgtccagctctgccccgacagagacggaggagccggggtccagtgcagtgggggcccctgaagccactgatggaagccacactaccggggcatcggaccatgaacccctgtcctgtatgggagcagaagagtggttgtgtgttcctgttcttcatctgtgtgcggggccatgtcacagagcgtcaacagattgtgtcaggcaggaatgctgcccgcctttgcttcatctacagtcaggatgctggatgttcatggagtgaggtgagggacttgactgaggaggtcattggctcagagctgaagcactgggccacatttgctgtgggcccaggtcatggcatccagctgcagtcagggagactggtcatccctgcgtatacctactacatcccttcctggttcttttgcttccagctaccatgtaaaaccaggcctcattctctgatgatctacagtgatgacctaggggtcacatggcaccatggtagactcattaggcccatggttacagtagaatgtgaagtggcagaggtgactgggagggctggccaccctgtgctatattgcagtgcccggacaccaaacaggtgccgggcagaggcgctcagcactgaccatggtgaaggctttcagagactggccctgagtcgacagctctgtgagcccccacatggttgccaagggagtgtggtaagtttccggcccctggagatcccacataggtgccaggactctagcagcaaagatgcacccaccattcagcagagctctccaggcagttcactgaggctggaggaggaagctggaacaccgtcagaatcatggctcttgtactcacacccaaccagtaggaaacagagggttgacctaggtatctatctcaaccagacccccttggaggctgcctgctggtcccgcccctggatcttgcactgtgggccctgtggctactctgatctggctgctctggaggaggagggcttgtttgggtgtttgtttgaatgtgggaccaagcaagagtgtgagcagattgccttccgcctgtttacacaccgggagatcctgagtcacctgcagggggactgcaccagccctggtaggaacccaagccaattcaaaagcaattaattggcttaggacccaatttccatagatgcaaatggcagttacagacaggttaacagaagctactgaagtctacagataatcaaaaaacttaatattctgttccctaccttttttcacttttcctcctccaaagagcaaaatgaaaattttgccttagctactgcagtggaaagagcactgaactaggagttggaagacaaggatgtggtcctggctctgccactggcttgcttttggaccttggatgtgtcacctgaactctctggacctcaggtttccatctgtaaaatgagagtattggttctaagatttctcatcttctcatccctaggacaagcatag

SEQ ID NO: 181389 - DNA, 582 bp, Homo sapiens
  Payload ID: 15729
  Gene Symbol: NEU3
  Gene Name: sialidase 3 (membrane sialidase)
  ENST ID: ENST00000531619
  CDS Start-End: 119-538
ctcttcgcttctcggggcttgtctccgtgtcctccgtctcagttgtttctccctctctatcctcctctgtctcagtctccccagccttggggccggtgcctcttccgggcttcggcgaatgagacctgcggacctgcccccgcgccccatggaagaatccccggcgtccagctctgccccgacagagacggaggagccggggtccagtgcagaggtcatggaagaagtgacaacatgctccttcaacagccctctgttccggcaggaagatgacagagggattacctaccggatcccagccctgctctacataccccccacccacaccttcctggcctttgcagagaagcgttctacgaggagagatgaggatgctctccacctggtgctgaggcgagggttgaggattgggcagttggtacagagatggggttttgccatgttgcccagactggtctcaaactcctggactcaagctattctaaagtgctgggattacagcatgagccactgtgcctggccatttgggggcccctgaagccactgatggaagccacactaccggggcatcggaccatgaac

SEQ ID NO: 181390 - DNA, 431 bp, Homo sapiens
  Payload ID: 15729
  Gene Symbol: NEU3
  Gene Name: sialidase 3 (membrane sialidase)
  ENST ID: ENST00000526068
  CDS Start-End: 137-313
tttccggcagtcgacacgctcttcgcttctcggggcttgtctccgtgtcctccgtctcagttgtttctccctctctatcctcctctgtctcagtctccccagccttggggccggtgcctcttccgggcttcggcgaatgagacctgcggacctgcccccgcgccccatggaagaatccccggcgtccagctctgccccgacagagacggaggagccggggtccagtgcagcacctgatttgtgtgaaacgttttgggtggcaatgccagaatcaccatctatattacttctgtcatcaacacgatcagcataattacaaaaattaatggctctaattgttatagtgataataaagcataaatgaaattgtgaggacatcaaaatttataattaaagacacctattaaaacagcagtttaaaatttataaaa

SEQ ID NO: 181391 - DNA, 2288 bp, Homo sapiens
  Payload ID: 15730
  Gene Symbol: NEU4
  Gene Name: sialidase 4
  Uniprot ID: Q8WWR8
  ENST ID: ENST00000325935
  CDS Start-End: 430-1923
gaggggctgtgctgtgccaggggaggccccgcacccgggaagcccagaggagagtgtgcactcacggagccctcctggcagggccgcgtctctggagcagcagacccgtgtccctctgggaggtcaactgcggcctcacagctgggcctgtcccagcacagcccttgttggagggcgcacccccgtgtcctcagcaccccagtgttgagtgccttgacctgcagaggggagcctgtgctggtcccgggcgtctgtgtggctcctgggtgcccatctgcacccctggccctgctctgggcttcagtggagccgtgccaccgtgggagtgtccagggtcctgacgtagccctgagacgtggccagctccctggcctgctgcccgcacagtgggcccttgtctctgctctgggtcaggcgaggcagccacccatgatgagctctgcagccttcccaaggtggctgcagagcatgggggtccctcgtaccccttcacggacagtgctcttcgagcgggagaggacgggcctgacctaccgcgtgccctcgctgctccccgtgccccccgggcccaccctgctggcctttgtggagcagcggctcagccctgacgactcccacgcccaccgcctggtgctgaggaggggcacgctggccgggggctccgtgcggtggggtgccctgcacgtgctggggacagcagccctggcggagcaccggtccatgaacccctgccctgtgcacgatgctggcacgggcaccgtcttcctcttcttcatcgcggtgctgggccacacgcctgaggccgtgcagatcgccacgggaaggaacgccgcgcgcctctgctgtgtggccagccgtgacgccggcctctcgtggggcagcgcccgggacctcaccgaggaggccatcggtggtgccgtgcaggactgggccacattcgctgtgggtcccggccacggtgtgcagctgccctcaggccgcctgctggtacccgcctacacctaccgcgtggaccgccgagagtgttttggcaagatctgccggaccagccctcactccttcgccttctacagcgatgaccacggccgcacctggcgctgtggaggcctcgtgcccaacctgcgctcaggcgagtgccagctggcagcggtggacggtgggcaggccggcagcttcctctactgcaatgcccggagcccactgggcagccgtgtgcaggcgctcagcactgacgagggcacctccttcctgcccgcagagcgcgtggcttccctgcccgagactgcctggggctgccagggcagcatcgtgggcttcccagcccccgcccccaacaggccacgggatgacagttggtcagtgggccccgggagtcccctccagcctccactcctcggtcctggagtccacgaacccccagaggaggctgctgtagacccccgtggaggccaggtgcctggtgggcccttcagccgtctgcagcctcggggggatggccccaggcagcctggccccaggcctggggtcagtggggatgtggggtcctggaccctggcactccccatgccctttgctgccccgccccagagccccacgtggctgctgtactcccacccagtggggcgcagggctcggctacacatgggtatccgcctgagccagtccccgctggacccgcgcagctggacagagccctgggtgatctacgagggccccagcggctactccgacctggcgtccatcgggccggcccctgaggggggcctggtttttgcctgcctgtacgagagcggggccaggacctcctatgatgagatttccttttgtacattctccctgcgtgaggtcctggagaacgtgcccgccagccccaaaccgcccaaccttggggacaagcctcgggggtgctgctggccctcctgacaggccttctggccgtgcccatgccccttgggtgcctggggcagaggggtggaatacgttggggtgccccacgatagctgtggggggggctcttagtgcaggatcctgtggattagaaacaagttgctcctcagagctctcaagcagggactgctctttaggaaggggagcagcggctgggagtgagcagggcagggtgggggcagggtgggggcacgaagtgggccctgggtgacccccacagctcccttccgaggctgcagggccaggcgcgggaccgcaggtagcccagggtgttgtgggtggcagcacttgtttactggctgctttctggctcgaaataaaggaatcgtgcttgtgtcggg

SEQ ID NO: 181392 - DNA, 2526 bp, Homo sapiens
  Payload ID: 15730
  Gene Symbol: NEU4
  Gene Name: sialidase 4
  Uniprot ID: Q8WWR8
  ENST ID: ENST00000391969
  CDS Start-End: 712-2166
gcgatggggtgctggcctgccaggagcacagatacagagctagagcccagtgaggcctgtgctgtgaggggctgtgctgtgccaggggaggccccgcacccgggaagcccagaggagagtgtgcactcacggagccctcctggcagggccgcgtctctggagcagcagacccgtgtccctctgggaggtcaactgcggcctcacagctgggcctgtcccagcacagcccttgttggagggcgcacccccgtgtcctcagcaccccagtgttgagtgccttgacctgcagaggggagcctgtgctggtcccgggcgtctgtgtggctcctgggtgcccatctgcacccctggccctgctctgggcttcagtggagccgtgccaccgtgggagtgtccagggtcctgacgtagccctgagacgtggccagctccctggcctgctgcccgcacagtgggcccttgtctctgctctgggtcaggcgaggcagccacccatgatgagctctgcagccttcccaaggtggctgccccgcatccaggtgccccgtgtgcccggcctgggcggctggccgtggatctgaccgctcctgcatggtggaggaccagcgttcccactgtctgcagctgtgccacctccctgtgccgggctgtgcgtgctcacgctcggctccgtctgcctttgtgcgatcagactgagagaccccccagagcatgggggtccctcgtaccccttcacggacagtgctcttcgagcgggagaggacgggcctgacctaccgcgtgccctcgctgctccccgtgccccccgggcccaccctgctggcctttgtggagcagcggctcagccctgacgactcccacgcccaccgcctggtgctgaggaggggcacgctggccgggggctccgtgcggtggggtgccctgcacgtgctggggacagcagccctggcggagcaccggtccatgaacccctgccctgtgcacgatgctggcacgggcaccgtcttcctcttcttcatcgcggtgctgggccacacgcctgaggccgtgcagatcgccacgggaaggaacgccgcgcgcctctgctgtgtggccagccgtgacgccggcctctcgtggggcagcgcccgggacctcaccgaggaggccatcggtggtgccgtgcaggactgggccacattcgctgtgggtcccggccacggtgtgcagctgccctcaggccgcctgctggtacccgcctacacctaccgcgtggaccgccgagagtgttttggcaagatctgccggaccagccctcactccttcgccttctacagcgatgaccacggccgcacctggcgctgtggaggcctcgtgcccaacctgcgctcaggcgagtgccagctggcagcggtggacggtgggcaggccggcagcttcctctactgcaatgcccggagcccactgggcagccgtgtgcaggcgctcagcactgacgagggcacctccttcctgcccgcagagcgcgtggcttccctgcccgagactgcctggggctgccagggcagcatcgtgggcttcccagcccccgcccccaacaggccacgggatgacagttggtcagtgggccccgggagtcccctccagcctccactcctcggtcctggagtccacgaacccccagaggaggctgctgtagacccccgtggaggccaggtgcctggtgggcccttcagccgtctgcagcctcggggggatggccccaggcagcctggccccaggcctggggtcagtggggatgtggggtcctggaccctggcactccccatgccctttgctgccccgccccagagccccacgtggctgctgtactcccacccagtggggcgcagggctcggctacacatgggtatccgcctgagccagtccccgctggacccgcgcagctggacagagccctgggtgatctacgagggccccagcggctactccgacctggcgtccatcgggccggcccctgaggggggcctggtttttgcctgcctgtacgagagcggggccaggacctcctatgatgagatttccttttgtacattctccctgcgtgaggtcctggagaacgtgcccgccagccccaaaccgcccaaccttggggacaagcctcgggggtgctgctggccctcctgacaggccttctggccgtgcccatgccccttgggtgcctggggcagaggggtggaatacgttggggtgccccacgatagctgtggggggggctcttagtgcaggatcctgtggattagaaacaagttgctcctcagagctctcaagcagggactgctctttaggaaggggagcagcggctgggagtgagcagggcagggtgggggcagggtgggggcacgaagtgggccctgggtgacccccacagctcccttccgaggctgcagggccaggcgcgggaccgcaggtagcccagggtgttgtgggtggcagcacttgtttactggctgctttctggctcgaaataaaggaatcgtgcttgtg

SEQ ID NO: 181393 - DNA, 1907 bp, Homo sapiens
  Payload ID: 15730
  Gene Symbol: NEU4
  Gene Name: sialidase 4
  Uniprot ID: Q8WWR8
  ENST ID: ENST00000405370
  CDS Start-End: 95-1549
agcttcacagtcaccgaagaaatgaagttacaggaggggcacaccgtccttttgtctctgcctttgaggttggcgggaactgaaactgcagagcatgggggtccctcgtaccccttcacggacagtgctcttcgagcgggagaggacgggcctgacctaccgcgtgccctcgctgctccccgtgccccccgggcccaccctgctggcctttgtggagcagcggctcagccctgacgactcccacgcccaccgcctggtgctgaggaggggcacgctggccgggggctccgtgcggtggggtgccctgcacgtgctggggacagcagccctggcggagcaccggtccatgaacccctgccctgtgcacgatgctggcacgggcaccgtcttcctcttcttcatcgcggtgctgggccacacgcctgaggccgtgcagatcgccacgggaaggaacgccgcgcgcctctgctgtgtggccagccgtgacgccggcctctcgtggggcagcgcccgggacctcaccgaggaggccatcggtggtgccgtgcaggactgggccacattcgctgtgggtcccggccacggtgtgcagctgccctcaggccgcctgctggtacccgcctacacctaccgcgtggaccgccgagagtgttttggcaagatctgccggaccagccctcactccttcgccttctacagcgatgaccacggccgcacctggcgctgtggaggcctcgtgcccaacctgcgctcaggcgagtgccagctggcagcggtggacggtgggcaggccggcagcttcctctactgcaatgcccggagcccactgggcagccgtgtgcaggcgctcagcactgacgagggcacctccttcctgcccgcagagcgcgtggcttccctgcccgagactgcctggggctgccagggcagcatcgtgggcttcccagcccccgcccccaacaggccacgggatgacagttggtcagtgggccccgggagtcccctccagcctccactcctcggtcctggagtccacgaacccccagaggaggctgctgtagacccccgtggaggccaggtgcctggtgggcccttcagccgtctgcagcctcggggggatggccccaggcagcctggccccaggcctggggtcagtggggatgtggggtcctggaccctggcactccccatgccctttgctgccccgccccagagccccacgtggctgctgtactcccacccagtggggcgcagggctcggctacacatgggtatccgcctgagccagtccccgctggacccgcgcagctggacagagccctgggtgatctacgagggccccagcggctactccgacctggcgtccatcgggccggcccctgaggggggcctggtttttgcctgcctgtacgagagcggggccaggacctcctatgatgagatttccttttgtacattctccctgcgtgaggtcctggagaacgtgcccgccagccccaaaccgcccaaccttggggacaagcctcgggggtgctgctggccctcctgacaggccttctggccgtgcccatgccccttgggtgcctggggcagaggggtggaatacgttggggtgccccacgatagctgtggggggggctcttagtgcaggatcctgtggattagaaacaagttgctcctcagagctctcaagcagggactgctctttaggaaggggagcagcggctgggagtgagcagggcagggtgggggcagggtgggggcacgaagtgggccctgggtgacccccacagctcccttccgaggctgcagggccaggcgcgggaccgcaggtagcccagggtgttgtgggtggcagcacttgtttactggctgctttctggctcgaaataaaggaatcgtgcttg

SEQ ID NO: 181394 - DNA, 2352 bp, Homo sapiens
  Payload ID: 15730
  Gene Symbol: NEU4
  Gene Name: sialidase 4
  Uniprot ID: Q8WWR8
  ENST ID: ENST00000404257
  CDS Start-End: 498-1988
attgcgatggggtgctggcctgccaggagcacagatacagagctagagcccagtgaggcctgtgctgtgaggggctgtgctgtgccaggggaggccccgcacccgggaagcccagaggagagtgtgcactcacggagccctcctggcagggccgcgtctctggagcagcagacccgtgtccctctgggaggtcaactgcggcctcacagctgggcctgtcccagcacagcccttgttggagggcgcacccccgtgtcctcagcaccccagtgttgagtgccttgacctgcagaggggagcctgtgctggtcccgggcgtctgtgtggctcctgggtgcccatctgcacccctggccctgctctgggcttcagtggagccgtgccaccgtgggagtgtccagggtcctgacgtagccctgagacgtggccagctccctggcctgctgcccgcacagtgggcccttgtctctgctctgggtcaggcgaggcagccacccatgatgagctctgcagccttcccaaggtggctgagcatgggggtccctcgtaccccttcacggacagtgctcttcgagcgggagaggacgggcctgacctaccgcgtgccctcgctgctccccgtgccccccgggcccaccctgctggcctttgtggagcagcggctcagccctgacgactcccacgcccaccgcctggtgctgaggaggggcacgctggccgggggctccgtgcggtggggtgccctgcacgtgctggggacagcagccctggcggagcaccggtccatgaacccctgccctgtgcacgatgctggcacgggcaccgtcttcctcttcttcatcgcggtgctgggccacacgcctgaggccgtgcagatcgccacgggaaggaacgccgcgcgcctctgctgtgtggccagccgtgacgccggcctctcgtggggcagcgcccgggacctcaccgaggaggccatcggtggtgccgtgcaggactgggccacattcgctgtgggtcccggccacggtgtgcagctgccctcaggccgcctgctggtacccgcctacacctaccgcgtggaccgccgagagtgttttggcaagatctgccggaccagccctcactccttcgccttctacagcgatgaccacggccgcacctggcgctgtggaggcctcgtgcccaacctgcgctcaggcgagtgccagctggcagcggtggacggtgggcaggccggcagcttcctctactgcaatgcccggagcccactgggcagccgtgtgcaggcgctcagcactgacgagggcacctccttcctgcccgcagagcgcgtggcttccctgcccgagactgcctggggctgccagggcagcatcgtgggcttcccagcccccgcccccaacaggccacgggatgacagttggtcagtgggccccgggagtcccctccagcctccactcctcggtcctggagtccacgaacccccagaggaggctgctgtagacccccgtggaggccaggtgcctggtgggcccttcagccgtctgcagcctcggggggatggccccaggcagcctggccccaggcctggggtcagtggggatgtggggtcctggaccctggcactccccatgccctttgctgccccgccccagagccccacgtggctgctgtactcccacccagtggggcgcagggctcggctacacatgggtatccgcctgagccagtccccgctggacccgcgcagctggacagagccctgggtgatctacgagggccccagcggctactccgacctggcgtccatcgggccggcccctgaggggggcctggtttttgcctgcctgtacgagagcggggccaggacctcctatgatgagatttccttttgtacattctccctgcgtgaggtcctggagaacgtgcccgccagccccaaaccgcccaaccttggggacaagcctcgggggtgctgctggccctcctgacaggccttctggccgtgcccatgccccttgggtgcctggggcagaggggtggaatacgttggggtgccccacgatagctgtggggggggctcttagtgcaggatcctgtggattagaaacaagttgctcctcagagctctcaagcagggactgctctttaggaaggggagcagcggctgggagtgagcagggcagggtgggggcagggtgggggcacgaagtgggccctgggtgacccccacagctcccttccgaggctgcagggccaggcgcgggaccgcaggtagcccagggtgttgtgggtggcagcacttgtttactggctgctttctggctcgaaataaaggaatcgtgcttgtgtcgg

SEQ ID NO: 181395 - DNA, 2273 bp, Homo sapiens
  Payload ID: 15730
  Gene Symbol: NEU4
  Gene Name: sialidase 4
  Uniprot ID: Q8WWR8
  ENST ID: ENST00000407683
  CDS Start-End: 454-1908
gttgtcgcggaggcctgcgtgagtgaggcctggcgtgccctggaaacattcccctgagttgaagaaagactcacagttttcagcatccagttaccctctgagcatcaggcagaacccgccggccccaaaaccaggcccccttggcacatgtgggcccgagtgagtccagcatgaggaggtgccgcttctgagcagagctcaggttgtctctgggaggaggagcgagcgttgggtgcggtggccgctgcgttggcagccctgtccctgagcggaacgcaggtcgtctctgggaggaggagcgagggttggacgcagtggccgctgcggtggcagccctgtccccaggcgtggactctgccctcagcttcacagtcaccgaagaaatgaagttacaggaggggcacaccgtccttttgtctctgcctttgaggttggcgggaactgaaactgagcatgggggtccctcgtaccccttcacggacagtgctcttcgagcgggagaggacgggcctgacctaccgcgtgccctcgctgctccccgtgccccccgggcccaccctgctggcctttgtggagcagcggctcagccctgacgactcccacgcccaccgcctggtgctgaggaggggcacgctggccgggggctccgtgcggtggggtgccctgcacgtgctggggacagcagccctggcggagcaccggtccatgaacccctgccctgtgcacgatgctggcacgggcaccgtcttcctcttcttcatcgcggtgctgggccacacgcctgaggccgtgcagatcgccacgggaaggaacgccgcgcgcctctgctgtgtggccagccgtgacgccggcctctcgtggggcagcgcccgggacctcaccgaggaggccatcggtggtgccgtgcaggactgggccacattcgctgtgggtcccggccacggtgtgcagctgccctcaggccgcctgctggtacccgcctacacctaccgcgtggaccgccgagagtgttttggcaagatctgccggaccagccctcactccttcgccttctacagcgatgaccacggccgcacctggcgctgtggaggcctcgtgcccaacctgcgctcaggcgagtgccagctggcagcggtggacggtgggcaggccggcagcttcctctactgcaatgcccggagcccactgggcagccgtgtgcaggcgctcagcactgacgagggcacctccttcctgcccgcagagcgcgtggcttccctgcccgagactgcctggggctgccagggcagcatcgtgggcttcccagcccccgcccccaacaggccacgggatgacagttggtcagtgggccccgggagtcccctccagcctccactcctcggtcctggagtccacgaacccccagaggaggctgctgtagacccccgtggaggccaggtgcctggtgggcccttcagccgtctgcagcctcggggggatggccccaggcagcctggccccaggcctggggtcagtggggatgtggggtcctggaccctggcactccccatgccctttgctgccccgccccagagccccacgtggctgctgtactcccacccagtggggcgcagggctcggctacacatgggtatccgcctgagccagtccccgctggacccgcgcagctggacagagccctgggtgatctacgagggccccagcggctactccgacctggcgtccatcgggccggcccctgaggggggcctggtttttgcctgcctgtacgagagcggggccaggacctcctatgatgagatttccttttgtacattctccctgcgtgaggtcctggagaacgtgcccgccagccccaaaccgcccaaccttggggacaagcctcgggggtgctgctggccctcctgacaggccttctggccgtgcccatgccccttgggtgcctggggcagaggggtggaatacgttggggtgccccacgatagctgtggggggggctcttagtgcaggatcctgtggattagaaacaagttgctcctcagagctctcaagcagggactgctctttaggaaggggagcagcggctgggagtgagcagggcagggtgggggcagggtgggggcacgaagtgggccctgggtgacccccacagctcccttccgaggctgcagggccaggcgcgggaccgcaggtagcccagggtgttgtgggtggcagcacttgtttactggctgctttctggctcgaaataaaggaatcgtgcttgtgtcggg

SEQ ID NO: 181396 - DNA, 845 bp, Homo sapiens
  Payload ID: 15730
  Gene Symbol: NEU4
  Gene Name: sialidase 4
  ENST ID: ENST00000420288
  CDS Start-End: 65-845
tctctgctctgggtcaggcgaggcagccacccatgatgagctctgcagccttcccaagcagagcatgggggtccctcgtaccccttcacggacagtgctcttcgagcgggagaggacgggcctgacctaccgcgtgccctcgctgctccccgtgccccccgggcccaccctgctggcctttgtggagcagcggctcagccctgacgactcccacgcccaccgcctggtgctgaggaggggcacgctggccgggggctccgtgcggtggggtgccctgcacgtgctggggacagcagccctggcggagcaccggtccatgaacccctgccctgtgcacgatgctggcacgggcaccgtcttcctcttcttcatcgcggtgctgggccacacgcctgaggccgtgcagatcgccacgggaaggaacgccgcgcgcctctgctgtgtggccagccgtgacgccggcctctcgtggggcagcgcccgggacctcaccgaggaggccatcggtggtgccgtgcaggactgggccacattcgctgtgggtcccggccacggtgtgcagctgccctcaggccgcctgctggtacccgcctacacctaccgcgtggaccgccgagagtgttttggcaagatctgccggaccagccctcactccttcgccttctacagcgatgaccacggccgcacctggcgctgtggaggcctcgtgcccaacctgcgctcaggcgagtgccagctggcagcggtggacggtgggcaggccggcagcttcctctactgcaatgcccggagcccactgggcagccgtgtgcaggcgctcagcactgacgagggcacctccttcc

SEQ ID NO: 181397 - DNA, 2281 bp, Homo sapiens
  Payload ID: 15730
  Gene Symbol: NEU4
  Gene Name: sialidase 4
  ENST ID: ENST00000435855
  CDS Start-End: 86-562
acagtcaccgaagaaatgaagttacaggaggggcacaccgtccttttgtctctgcctttgaggttggcgggaactgaaactgagcatgggggtccctcgtaccccttcacggacagtgctcttcgagcgggagaggacgggcctgacctaccgcgtgccctcgctgctccccgtgccccccgggcccaccctgctggcctttgtggagcagcggctcagccctgacgactcccacgcccaccgcctggtgctgaggaggggcacgctggccgggggctccgtgcggtggggtgccctgcacgtgctggggacagcagccctggcggagcaccggtccatgaacccctgccctgtgcacgatgctggcacgggcaccgtcttcctcttcttcatcgcggtgctgggccacacgcctgaggccgtgcagatcgccacgggaaggaacgccgcgcgcctctgctgtgtggccagccgtgacgccggcctctcgtggggcagcgcccgggacctcaccgaggaggccatcggtggtgccgtgcaggaggagaaggctggacgctgaggtgtctctcagctcccaaaccaacagccaccccgccccaccccttcctcttattctttactcccttctcaccctgcccagggcctggccaggcctcacccacaactttccctccaccccatcctctgtggccacctgaccccggcccgtgggagctacagcagggagtgcagcagacacatggccaacccagggaccccactgcagggcctcatgccccccgcctgccctccgctctctctgtgtgggcagcgctcaccagcctccctgggtgccgtccacctgggctcggctgctaagggctgtgagaggcttgttcagcctgggaggactcagggcggctgggatgagtcgtgtggaagggcggtcagagtgcgatggtcctaacccgaggcaccagcccctccttccccgtccccctgtgccttcctccagccccccgacctcggggacccagcagcccctcccacctctgccctcctccctgcagactgggccacattcgctgtgggtcccggccacggtgtgcagctgccctcaggccgcctgctggtacccgcctacacctaccgcgtggaccgccgagagtgttttggcaagatctgccggaccagccctcactccttcgccttctacagcgatgaccacggccgcacctggcgctgtggaggcctcgtgcccaacctgcgctcagagcgcgtggcttccctgcccgagactgcctggggctgccagggcagcatcgtgggcttcccagcccccgcccccaacaggccacgggatgacagttggtcagtgggccccgggagtcccctccagcctccactcctcggtcctggagtccacgaacccccagaggaggctgctgtagacccccgtggaggccaggtgcctggtgggcccttcagccgtctgcagcctcggggggatggccccaggcagcctggccccaggcctggggtcagtggggatgtggggtcctggaccctggcactccccatgccctttgctgccccgccccagagccccacgtggctgctgtactcccacccagtggggcgcagggctcggctacacatgggtatccgcctgagccagtccccgctggacccgcgcagctggacagagccctgggtgatctacgagggccccagcggctactccgacctggcgtccatcgggccggcccctgaggggggcctggtttttgcctgcctgtacgagagcggggccaggacctcctatgatgagatttccttttgtacattctccctgcgtgaggtcctggagaacgtgcccgccagccccaaaccgcccaaccttggggacaagcctcgggggtgctgctggccctcctgacaggccttctggccgtgcccatgccccttgggtgcctggggcagaggggtggaatacgttggggtgccccacgatagctgtggggggggctcttagtgcaggatcctgtggattagaaacaagttgctcctcagagctctcaagcagggactgctctttaggaaggggagcagcggctgggagtgagcagggcagggtgggggcagggtgggggcacgaagtgggccctgggtgacccccacagctcccttccgaggctgcagggccaggcgcgggaccgcaggtagcccagggtgttgtgggtggcagcacttgtttactggctgctttctggctcgaaataaaggaatcgtgcttgtg

SEQ ID NO: 181398 - DNA, 505 bp, Homo sapiens
  Payload ID: 15730
  Gene Symbol: NEU4
  Gene Name: sialidase 4
  ENST ID: ENST00000428592
  CDS Start-End: 73-505
acggtgctgtggcctctattctggggacactgagctcctccttgctcgaggttttgggtcctcattgtccacatgacctcctgctgggcgaattctgggatgaccctgtgtcctgggcacatggctggcagggtcccgggggctctctggccagcctcccctgcaccctggcaccaaccagcctggccgaggagcatgggggtccctcgtaccccttcacggacagtgctcttcgagcgggagaggacgggcctgacctaccgcgtgccctcgctgctccccgtgccccccgggcccaccctgctggcctttgtggagcagcggctcagccctgacgactcccacgcccaccgcctggtgctgaggaggggcacgctggccgggggctccgtgcggtggggtgccctgcacgtgctggggacagcagccctggcggagcaccggtccatgaacccctgccctgtgcacgatgctggcacgggcaccgtcttcctcttcttcatcg

SEQ ID NO: 181399 - DNA, 860 bp, Homo sapiens
  Payload ID: 15730
  Gene Symbol: NEU4
  Gene Name: sialidase 4
  ENST ID: ENST00000415936
  CDS Start-End: 217-860
gccgctgcgttggcagccctgtccctgagcggaacgcaggtcgtctctgggaggaggagcgagggttggacgcagtggccgctgcggtggcagccctgtccccaggcgtggactctgccctcagcttcacagtcaccgaagaaatgaagttacaggaggggcacaccgtccttttgtctctgcctttgaggttggcgggaactgaaactgcagagcatgggggtccctcgtaccccttcacggacagtgctcttcgagcgggagaggacgggcctgacctaccgcgtgccctcgctgctccccgtgccccccgggcccaccctgctggcctttgtggagcagcggctcagccctgacgactcccacgcccaccgcctggtgctgaggaggggcacgctggccgggggctccgtgcggactgggccacattcgctgtgggtcccggccacggtgtgcagctgccctcaggccgcctgctggtacccgcctacacctaccgcgtggaccgccgagagtgttttggcaagatctgccggaccagccctcactccttcgccttctacagcgatgaccacggccgcacctggcgctgtggaggcctcgtgcccaacctgcgctcaggcgagtgccagctggcagcggtggacggtgggcaggccggcagcttcctctactgcaatgcccggagcccactgggcagccgtgtgcaggcgctcagcactgacgagggcacctccttcctgcccgcagagcgcgtggcttccctgcccgagactgcctggggctgccagggcagcatcgtgggcttcccagcccccgcccccaacaggccacgggatgacagttggtcagtgggcccc

SEQ ID NO: 181400 - DNA, 753 bp, Homo sapiens
  Payload ID: 15730
  Gene Symbol: NEU4
  Gene Name: sialidase 4
  ENST ID: ENST00000423583
  CDS Start-End: 188-753
cttttgtctctgcctttgaggttggcgggaactgaaactgattgaaaacagtgggcttgaaaagcctggagcagagggagtgaggcctgccccccaccccagctctgcgggcacaccctggccagacagccctgctccagacccggcctgtgtctcagggtggcccaggaggggactttgcaagagcatgggggtccctcgtaccccttcacggacagtgctcttcgagcgggagaggacgggcctgacctaccgcgtgccctcgctgctccccgtgccccccgggcccaccctgctggcctttgtggagcagcggctcagccctgacgactcccacgcccaccgcctggtgctgaggaggggcacgctggccgggggctccgtgcggtggggtgccctgcacgtgctggggacagcagccctggcggagcaccggtccatgaacccctgccctgtgcacgatgctggcacgggcaccgtcttcctcttcttcatcgcggtgctgggccacacgcctgaggccgtgcagatcgccacgggaaggaacgccgcgcgcctctgctgtgtggccagccgtgacgccggcctctcgtggggcagcgcccgggacctcaccgaggaggccatcggtggtgccgtgcaggactgggccacattcgctgtgggtcccggccacggtgtgcagctgccctcaggccgcctgctggtacccgcctacacctaccgcgtggaccgccgagagtgttttggcaa

SEQ ID NO: 181401 - DNA, 484 bp, Homo sapiens
  Payload ID: 15730
  Gene Symbol: NEU4
  Gene Name: sialidase 4
  ENST ID: ENST00000435894
  CDS Start-End: 254-484
gtctctgctctgggtcaggcgaggcagccacccatgatgagctctgcagccttcccaaggtggctgccccgcatccaggtgccccgtgtgcccggcctgggcggctggccgtggatctgaccgctcctgcatggtggaggaccagcgttcccactgtctgcagctgtgccacctccctgtgccgggctgtgcgtgctcacgctcggctccgtctgcctttgtgcgatcagactgagagaccccccagcagagcatgggggtccctcgtaccccttcacggacagtgctcttcgagcgggagaggacgggcctgacctaccgcgtgccctcgctgctccccgtgccccccgggcccaccctgctggcctttgtggagcagcggctcagccctgacgactcccacgcccaccgcctggtgctgaggaggggcacgctggccgggggctccgtgcggtggggtgccctgcacgtgctggggacagca

SEQ ID NO: 181402 - DNA, 676 bp, Homo sapiens
  Payload ID: 15730
  Gene Symbol: NEU4
  Gene Name: sialidase 4
  ENST ID: ENST00000426032
  CDS Start-End: 34-676
gtctctgctctgggtcaggcgaggcagccacccatgatgagctctgcagccttcccaaggtggctgagcatgggggtccctcgtaccccttcacggacagtgctcttcgagcgggagaggacgggcctgacctaccgcgtgccctcgctgctccccgtgccccccgggcccaccctgctggcctttgtggagcagcggctcagccctgacgactcccacgcccaccgcctggtgctgaggaggggcacgctggccgggggctccgtgcggactgggccacattcgctgtgggtcccggccacggtgtgcagctgccctcaggccgcctgctggtacccgcctacacctaccgcgtggaccgccgagagtgttttggcaagatctgccggaccagccctcactccttcgccttctacagcgatgaccacggccgcacctggcgctgtggaggcctcgtgcccaacctgcgctcaggcgagtgccagctggcagcggtggacggtgggcaggccggcagcttcctctactgcaatgcccggagcccactgggcagccgtgtgcaggcgctcagcactgacgagggcacctccttcctgcccgcagagcgcgtggcttccctgcccgagactgcctggggctgccagggcagcatcgtgggcttcccagcccccgcccc

SEQ ID NO: 181403 - DNA, 451 bp, Homo sapiens
  Payload ID: 15730
  Gene Symbol: NEU4
  Gene Name: sialidase 4
  ENST ID: ENST00000435934
  CDS Start-End: 296-451
gcccttgtctctgctctgggtcaggcgaggcagccacccatgatgagctctgcagccttcccaaggtggctgccccgcatccaggtgccccgtgtgcccggcctgggcggctggccgtggatctgaccgctcctgcatggtggaggaccagcgttcccactgtctgcagctgtgccacctccctgtgccgggctgtgcgtgctcacgctcggctccgtctgcctttgtgcgatcagactgagagaccccccaggcaggtcccgcctgcaacaagcagaccccatgcgtgccccaaatgccccctcacccgggccctgccctggtgggtgttgcctgggagcaaactcccagaatggccgccgggccccactcggctttggagcttctgattcctgtgggcgcttctcagagcatgggggtccctcgtaccccttcacggacagtgctcttc

SEQ ID NO: 181404 - DNA, 1907 bp, Homo sapiens; identical to SEQ ID NO: 181393
  Payload ID: 15730
  Gene Symbol: NEU4
  Gene Name: sialidase 4
  Uniprot ID: Q8WWR8
  ENST ID: ENST00000621851
  CDS Start-End: 95-1549

SEQ ID NO: 181405 - DNA, 2352 bp, Homo sapiens; identical to SEQ ID NO: 181394
  Payload ID: 15730
  Gene Symbol: NEU4
  Gene Name: sialidase 4
  Uniprot ID: Q8WWR8
  ENST ID: ENST00000616490
  CDS Start-End: 498-1988

SEQ ID NO: 181406 - DNA, 2526 bp, Homo sapiens; identical to SEQ ID NO: 181392
  Payload ID: 15730
  Gene Symbol: NEU4
  Gene Name: sialidase 4
  Uniprot ID: Q8WWR8
  ENST ID: ENST00000618866
  CDS Start-End: 712-2166

SEQ ID NO: 181407 - DNA, 2288 bp, Homo sapiens; identical to SEQ ID NO: 181391
  Payload ID: 15730
  Gene Symbol: NEU4
  Gene Name: sialidase 4
  Uniprot ID: Q8WWR8
  ENST ID: ENST00000626600
  CDS Start-End: 430-1923

SEQ ID NO: 181408 - DNA, 753 bp, Homo sapiens; identical to SEQ ID NO: 181400
  Payload ID: 15730
  Gene Symbol: NEU4
  Gene Name: sialidase 4
  ENST ID: ENST00000625452
  CDS Start-End: 188-753

SEQ ID NO: 181409 - DNA, 676 bp, Homo sapiens; identical to SEQ ID NO: 181402
  Payload ID: 15730
  Gene Symbol: NEU4
  Gene Name: sialidase 4
  ENST ID: ENST00000627724
  CDS Start-End: 34-676

SEQ ID NO: 181410 - DNA, 505 bp, Homo sapiens; identical to SEQ ID NO: 181398
  Payload ID: 15730
  Gene Symbol: NEU4
  Gene Name: sialidase 4
  ENST ID: ENST00000625706
  CDS Start-End: 73-505

SEQ ID NO: 181411 - DNA, 451 bp, Homo sapiens; identical to SEQ ID NO: 181403
  Payload ID: 15730
  Gene Symbol: NEU4
  Gene Name: sialidase 4
  ENST ID: ENST00000627618
  CDS Start-End: 296-451

SEQ ID NO: 181412 - DNA, 860 bp, Homo sapiens; identical to SEQ ID NO: 181399
  Payload ID: 15730
  Gene Symbol: NEU4
  Gene Name: sialidase 4
  ENST ID: ENST00000626222
  CDS Start-End: 217-860

SEQ ID NO: 181413 - DNA, 2273 bp, Homo sapiens; identical to SEQ ID NO: 181395
  Payload ID: 15730
  Gene Symbol: NEU4
  Gene Name: sialidase 4
  Uniprot ID: Q8WWR8
  ENST ID: ENST00000630923
  CDS Start-End: 454-1908

SEQ ID NO: 181414 - DNA, 845 bp, Homo sapiens; identical to SEQ ID NO: 181396
  Payload ID: 15730
  Gene Symbol: NEU4
  Gene Name: sialidase 4
  ENST ID: ENST00000626195
  CDS Start-End: 65-845

SEQ ID NO: 181415 - DNA, 2281 bp, Homo sapiens; identical to SEQ ID NO: 181397
  Payload ID: 15730
  Gene Symbol: NEU4
  Gene Name: sialidase 4
  ENST ID: ENST00000629521
  CDS Start-End: 86-562

SEQ ID NO: 181416 - DNA, 484 bp, Homo sapiens; identical to SEQ ID NO: 181401
  Payload ID: 15730
  Gene Symbol: NEU4
  Gene Name: sialidase 4
  ENST ID: ENST00000629646
  CDS Start-End: 254-484

SEQ ID NO: 181417 - DNA, 6894 bp, Homo sapiens
  Payload ID: 15731
  Gene Symbol: SPN
  Gene Name: sialophorin
  Uniprot ID: P16150
  ENST ID: ENST00000360121
  CDS Start-End: 133-1335
cctttccccttggggccctgtccttcccagtcttgccccagcctcgggaggtggtggagtgacctggccccagtgctgcgtccttatcagccgagccggtcccagctcttgctcctgcctgtttgcctggaaatggccacgcttctccttctccttggggtgctggtggtaagcccagacgctctggggagcacaacagcagtgcagacacccacctccggagagcctttggtctctactagcgagcccctgagctcaaagatgtacaccacttcaataacaagtgaccctaaggccgacagcactggggaccagacctcagccctacctccctcaacttccatcaatgagggatcccctctttggacttccattggtgccagcactggttcccctttacctgagccaacaacctaccaggaagtttccatcaagatgtcatcagtgccccaggaaacccctcatgcaaccagtcatcctgctgttcccataacagcaaactctctaggatcccacaccgtgacaggtggaaccataacaacgaactctccagaaacctccagtaggaccagtggagcccctgttaccacggcagctagctctctggagacctccagaggcacctctggaccccctcttaccatggcaactgtctctctggagacttccaaaggcacctctggaccccctgttaccatggcaactgactctctggagacctccactgggaccactggaccccctgttaccatgacaactggctctctggagccctccagcggggccagtggaccccaggtctctagcgtaaaactatctacaatgatgtctccaacgacctccaccaacgcaagcactgtgcccttccggaacccagatgagaactcacgaggcatgctgccagtggctgtgcttgtggccctgctggcggtcatagtcctcgtggctctgctcctgctgtggcgccggcggcagaagcggcggactggggccctcgtgctgagcagaggcggcaagcgtaacggggtggtggacgcctgggctgggccagcccaggtccctgaggagggggccgtgacagtgaccgtgggagggtccgggggcgacaagggctctgggttccccgatggggaggggtctagccgtcggcccacgctcaccactttctttggcagacggaagtctcgccagggctccctggcgatggaggagctgaagtctgggtcaggccccagcctcaaaggggaggaggagccactggtggccagtgaggatggggctgtggacgccccagctcctgatgagcccgaagggggagacggggctgccccttaagtgtcggtgaatagtgaggctggaggccggaatctcagccagcctccagcaccttccctctcaccatcccactgccccctcgctcccatgtttccacccggcaccctgatcctcacccgaatctcctttttttttttcttttgagacagagtttcgctttgtcgcccaggctggagtgcaatgcacgatctcagttcactgcaacctctgcctcctaagttcaggcgattctcctgcctcagcttcccgagtaactgagattacaggcacccaccaccatgcccagctgcttttttgtatttttggtagagatggggtttcaccatgttggctaggctggtctcaaactcctgacctcaggtgatctacctgcctcagcctcccaaagtgctgagattacagacatgagcctccgcgccttgcctcctcacccacctcttcactctgaatcctcatgaggcttctcagccctggatttcctgctgccatcctcacccagcacccacaactagcgcctgggcagggcagggctggcacctctcaacgtctgtggactgaatgaataaaccctcctcatccacccctatttatctccatcaccatttccccctctttcttgttcctggaaacggctgctgagtctccatcggccaaacttatctgccctgtgatttctttgacaattctccttttcccccagaacccaccctgggttgaccagagtctgggaagaaggacaagagaacccggcaaactccctcctaggattaactttgtaaagcacccttgccctgtagctgcaagggctgtggaacctgggcagcccgcaaccacctttagctctgggccccccaggccagcctggagcatggctgggtggggccaccagcccatgctctcaggcgggcctgtgatctttcccagggcacatggactgtaggctggccctggcccacaccaccacactctccccagccatggacagaggcagccagaggcctcacggtttctcctccgagtttctggctgggtgtagttctcagaaaccccagtgcctgcgtgtgtccactcgtgggtgtggtttgtgtgcaagagctgaggatttggcgatgcttgggaggggtagttgtgggtacagacggtgtgggggtgggaagtggtgcagagactgaagagggtcaacctgggcatgggggacacagggactgctgagaacgtgcgtgtcatctttgctctgatggggtggacatagcagaaaatctaactctgtctgtagccccatacagaatgccagggtgagcacagtggctggtgcctttaatcccagcactttggaaagttgaggcaggaggatcgcttgagcccaggagttcgagtctgaagtgagctgtgattgcaccactgcacttcagcctgggcaacagagtgagcccctgtctcaaaaaagaaaagaaaaagaaagccaggcttcatggaaagatcgtatgtgtgacccaaatatgagttcttcagctcagccatggtaatcccttccttgaagtctccatttctgcagtacacatgcatgtgcgctctctctctctctctctctctcacacacacacacacacacacacacacacgcgcgcgcgcgcgcgctctcctgcgaacagaggcagggggagaggggtttgccctggtctcggggactggtctggctggcgcttccccactgcacgtttccaggtttagtttgtctgtgtctcctcttccatcccaggggctgagccccttccatcctccaagaggaaccagtgagagtgagtgaaggaggggcctggagccagggacttcccctgtggggcctgggtggagaggggagaactcaatggtgctgcctttgagaccagcccaggctacagcccaggagcacacatgggccagggcagttggtatttcccgaggacaaagaggaaattttcaaagaggaagttgttgagttagagcttgcggtggctgagagcagacaggttgacctgcaaaaaaagacaggggaggcatgtgagtgtgacagccctgctctgtggcctgggcaggagatgggggaaagggtcaggtgggggatgggctcgtgcagtgggagaggagacggagggagggagcgggaaggggcttgcttagtgggtgggaagagctgagctcggatggaaccagcttctaccagccaggctgggcacccactgggctgcatctggtggccttttctgattgctatttggactcactgcagctgcagaatgacagaggccatgtccaaaatcccttagagacactgttgtcttagagttgttaaaataagagcccccatatcaggtttagaaaatactgtcaccgaacgaacgtcgctgtcctcagctccacctccctttcctttgacagatatggttgttttctaagccaggactggttttagtcaggtcctgggcgaatcctgaaaaaaagaggtagtacgggtaaggaaggcacccaacagggctttcacaatccagaaaatatcaaaatataagtgttaaaagagaggcacaggccgggtgcggtggctcacgcctgtaatctcagcactttgggaggccaaggtgggcagatcatgaggtcaggagtttgagaccagcctggccaatatgatgaaaccccgtttctactaaaaatacaaaagttagccaggcatggtggtgtgctcctgtaatcccagctacttaggaggctgaggccagagaattgcttgaaccctggagtcagaggttgcagtgagccgggatcatgccactgtactccaggctgggtgacaaagtgagactgtctcaaaaaataaaaataaataaaataaataaaagagaggcacaaacagtgttatgaatgcaccaaggaaaatggtgcattcataactctcaggtgaagcctaccaagccatgcgtgtgtgcacatatgtgtgtacgtgtgcatgtgcgtgcgtgcatgtgcgtgcgtgcatgtgcctgtgtgtgtatgtgtgcacatgtgtgtgcgcatgtgtgtgtgtgcgcgcatgtgtgtgtgcatgcatgttctcccatgcatgtgtactgtggcaagggagactttgaggaagagattccagtggctgagcagaagggctcgcattgccctggcgaaaggttggaaggcttcacctgagagtgtgtcgtggcctttgtcatatccactgcttgattcctttctttaaaaattatttttattgttttctacatatgagaaccaccacacctggctaatttttgtattttttgtagagatggggtttcaccatgttgtcccggctggtctcaaactcccgggcacaagagatccacctgcctcagcctcccaaaatgctgggactataggcatgagccactgcacccagccactgcttcattcctggtggctgctgtgcctggcatgttgcagatcctccatgaatatgcatttgaatgaatgaatgaatgaatgaatgaatgaatggagatgacgcctcagagattctttcttttgagatgaggtctcattctgtcacccagactagagggcagtggtgcaatcacagctcaccacagcctcaacctcctgggcctcccaagtagctgcgatcacaggtgtgcaccaacatgcccagctaatttttttttttaatttttaatttgtacagacagggtcttgctgtgttgcccaggctggtctcaaactcctgggctcaagtggtcctcccacctaagcttccccaaatactgggattataggtgtgagccactgtgcccaggcttgcctcagatatttgaaggctgggaaggattttgcaaagctgggaaaaggaaaaggcattcccagcagaggggatagcaggtggaaatacataattaaaaaaaaaaaacgtggagcagatccagcgcagtggctcatgcctgtaatcccagcactttgggaggcagagcagggaggattgcttgagtctaggagttcaagaccagcctgggtaacatagaaagaccctgtctctacaaaaacacaaaaaattagccaggcgtggtggtgcatgcctgtagtaccagctacttgagaagctgaggcaggaggactgcttgaagccaggagtttgagaccagcctgggcaacatagtgagaccccgtgtctacaaaaagtaaacatttatatatatattttttaaagtggagcagttcaatatagagtcttttttgaacaaacgtgaaatagatgtcttttttttttttttgagatggagttttcactcttgttacccaggctggagtgcaatggcgtgatcttggctcaccagaacctccgcctcctgggttcaaacaattctcctgcctcagcctcccaggtagctgggattacaggcatgcaccaccaaacccggataattttgtatttttagtagagatggggtttcaccatgttggtcaagctggtcttgaactcccgacctctgctgatccgtatgcctcggcctcccaaagtgctgggattacatgcgtgagccaccgtgcccgacaatagatgtcttttaattttctggaggaaaaagcaaagcaaaagaagcagtggatattttaagactaaaaaggaaaacaaaaaaaggagatagagcaggccagacgtggtggctcaacgtctgtaatcccagcactttgggaggccgaggcaggtggatcacctgaggtcaggagttcaagaccagcctgaccaacatggtgaaaccctgtttcaaaatacaaaaaattagctgggcgtggtggcgggcacctgtaatcccagctacttgggaggctgaggcaggagaatcccttgaacccaggaggtggaggttgcagtgagccgagatcacgccattgcactccagcctgggcgacaagtaaaaaactccatctcaaaaaaaaaaaaggagatagagcaaggaacagtaagaaaatagttgggtgcagtggctatgcggtggcactataggaggctgaggcgggcagatcacctgaggtcaggagttggagaccagcctgggcaacatagacccctatctctacaaaaaatttgaaatatgaaaaattagccaggtgtagtggtgtgcgcctgtggtaccagctactcaagaggcgaaggcagggaagattgcttgagcccaggagtttgaggctatagtgagctgtgatcatgccactgcactccagcctgggcaatagtgtgagactctgtctcaaaagaaagaacatggccaggcgtggtggctcacacctgtaatcccagcactttgggaggccgaggcagtcagatcatgaggccagtttgaaaccagcctggccaacatggtgaaaccctgtctctactaaaaatacaaaaattagccaggcgtggtggcatgcccccgtaatcccagctacttgggggtctgaggcagaagaattgcttgaaaccgggaggcagaggttgcagtgagccgagatcgtgtcattgcactctagtctgggcgacagagcaagactccgtcttgg

SEQ ID NO: 181418 - DNA, 1935 bp, Homo sapiens
  Payload ID: 15731
  Gene Symbol: SPN
  Gene Name: sialophorin
  Uniprot ID: P16150
  ENST ID: ENST00000395389
  CDS Start-End: 137-1339
cctctgagcccagccctccctagcatcaccacttccatcccattcctcagccaagagccaggaatcctgattccagatcccacgcttccctgcctccctcaggtcccagctcttgctcctgcctgtttgcctggaaatggccacgcttctccttctccttggggtgctggtggtaagcccagacgctctggggagcacaacagcagtgcagacacccacctccggagagcctttggtctctactagcgagcccctgagctcaaagatgtacaccacttcaataacaagtgaccctaaggccgacagcactggggaccagacctcagccctacctccctcaacttccatcaatgagggatcccctctttggacttccattggtgccagcactggttcccctttacctgagccaacaacctaccaggaagtttccatcaagatgtcatcagtgccccaggaaacccctcatgcaaccagtcatcctgctgttcccataacagcaaactctctaggatcccacaccgtgacaggtggaaccataacaacgaactctccagaaacctccagtaggaccagtggagcccctgttaccacggcagctagctctctggagacctccagaggcacctctggaccccctcttaccatggcaactgtctctctggagacttccaaaggcacctctggaccccctgttaccatggcaactgactctctggagacctccactgggaccactggaccccctgttaccatgacaactggctctctggagccctccagcggggccagtggaccccaggtctctagcgtaaaactatctacaatgatgtctccaacgacctccaccaacgcaagcactgtgcccttccggaacccagatgagaactcacgaggcatgctgccagtggctgtgcttgtggccctgctggcggtcatagtcctcgtggctctgctcctgctgtggcgccggcggcagaagcggcggactggggccctcgtgctgagcagaggcggcaagcgtaacggggtggtggacgcctgggctgggccagcccaggtccctgaggagggggccgtgacagtgaccgtgggagggtccgggggcgacaagggctctgggttccccgatggggaggggtctagccgtcggcccacgctcaccactttctttggcagacggaagtctcgccagggctccctggcgatggaggagctgaagtctgggtcaggccccagcctcaaaggggaggaggagccactggtggccagtgaggatggggctgtggacgccccagctcctgatgagcccgaagggggagacggggctgccccttaagtgtcggtgaatagtgaggctggaggccggaatctcagccagcctccagcaccttccctctcaccatcccactgccccctcgctcccatgtttccacccggcaccctgatcctcacccgaatctcctttttttttttcttttgagacagagtttcgctttgtcgcccaggctggagtgcaatgcacgatctcagttcactgcaacctctgcctcctaagttcaggcgattctcctgcctcagcttcccgagtaactgagattacaggcacccaccaccatgcccagctgcttttttgtatttttggtagagatggggtttcaccatgttggctaggctggtctcaaactcctgacctcaggtgatctacctgcctcagcctcccaaagtgctgagattacagacatgagcctccgcgccttgcctcctcacccacctcttcactctgaatcctcatgaggcttctcagccctggatttcctgctgccatcctcacccagcacccacaactagcgcctgggcagggcagggctggcacctctcaacgtctgtggactgaatgaataaaccctcctcatccacccctatttatctcca

SEQ ID NO: 181419 - DNA, 1197 bp, Homo sapiens
  Payload ID: 15731
  Gene Symbol: SPN
  Gene Name: sialophorin
  ENST ID: ENST00000436527
  CDS Start-End: 133-1197
cctttccccttggggccctgtccttcccagtcttgccccagcctcgggaggtggtggagtgacctggccccagtgctgcgtccttatcagccgagccggtcccagctcttgctcctgcctgtttgcctggaaatggccacgcttctccttctccttggggtgctggtggtaagcccagacgctctggggagcacaacagcagtgcagacacccacctccggagagcctttggtctctactagcgagcccctgagctcaaagatgtacaccacttcaataacaagtgaccctaaggccgacagcactggggaccagacctcagccctacctccctcaacttccatcaatgagggatcccctctttggacttccattggtgccagcactggttcccctttacctgagccaacaacctaccaggaagtttccatcaagatgtcatcagtgccccaggaaacccctcatgcaaccagtcatcctgctgttcccataacagcaaactctctaggatcccacaccgtgacaggtggaaccataacaacgaactctccagaaacctccagtaggaccagtggagcccctgttaccacggcagctagctctctggagacctccagaggcacctctggaccccctcttaccatggcaactgtctctctggagacttccaaaggcacctctggaccccctgttaccatggcaactgactctctggagacctccactgggaccactggaccccctgttaccatgacaactggctctctggagccctccagcggggccagtggaccccaggtctctagcgtaaaactatctacaatgatgtctccaacgacctccaccaacgcaagcactgtgcccttccggaacccagatgagaactcacgaggcatgctgccagtggctgtgcttgtggccctgctggcggtcatagtcctcgtggctctgctcctgctgtggcgccggcggcagaagcggcggactggggccctcgtgctgagcagaggcggcaagcgtaacggggtggtggacgcctgggctgggccagcccaggtccctgaggagggggccgtgacagtgaccgtgggagggtccgggggcgacaagggctctgggttccccgatggggaggggtctagccgtcggcccacgctcaccactttctttggcagacggaagtctcgccagggctcc

SEQ ID NO: 181420 - DNA, 1853 bp, Homo sapiens
  Payload ID: 15731
  Gene Symbol: SPN
  Gene Name: sialophorin
  Uniprot ID: P16150
  ENST ID: ENST00000563039
  CDS Start-End: 97-1299
cccagcctcgggaggtggtggagtgacctggccccagtgctgcgtccttatcagccgagccggtcccagctcttgctcctgcctgtttgcctggaaatggccacgcttctccttctccttggggtgctggtggtaagcccagacgctctggggagcacaacagcagtgcagacacccacctccggagagcctttggtctctactagcgagcccctgagctcaaagatgtacaccacttcaataacaagtgaccctaaggccgacagcactggggaccagacctcagccctacctccctcaacttccatcaatgagggatcccctctttggacttccattggtgccagcactggttcccctttacctgagccaacaacctaccaggaagtttccatcaagatgtcatcagtgccccaggaaacccctcatgcaaccagtcatcctgctgttcccataacagcaaactctctaggatcccacaccgtgacaggtggaaccataacaacgaactctccagaaacctccagtaggaccagtggagcccctgttaccacggcagctagctctctggagacctccagaggcacctctggaccccctcttaccatggcaactgtctctctggagacttccaaaggcacctctggaccccctgttaccatggcaactgactctctggagacctccactgggaccactggaccccctgttaccatgacaactggctctctggagccctccagcggggccagtggaccccaggtctctagcgtaaaactatctacaatgatgtctccaacgacctccaccaacgcaagcactgtgcccttccggaacccagatgagaactcacgaggcatgctgccagtggctgtgcttgtggccctgctggcggtcatagtcctcgtggctctgctcctgctgtggcgccggcggcagaagcggcggactggggccctcgtgctgagcagaggcggcaagcgtaacggggtggtggacgcctgggctgggccagcccaggtccctgaggagggggccgtgacagtgaccgtgggagggtccgggggcgacaagggctctgggttccccgatggggaggggtctagccgtcggcccacgctcaccactttctttggcagacggaagtctcgccagggctccctggcgatggaggagctgaagtctgggtcaggccccagcctcaaaggggaggaggagccactggtggccagtgaggatggggctgtggacgccccagctcctgatgagcccgaagggggagacggggctgccccttaagtgtcggtgaatagtgaggctggaggccggaatctcagccagcctccagcaccttccctctcaccatcccactgccccctcgctcccatgtttccacccggcaccctgatcctcacccgaatctcctttttttttttcttttgagacagaagcaagactccgtcttggaaaaaaatttaaaaaaagaaaatataaaatatggtataagattaaatatattagttatgaaaataattgtaaatggcttattgaacttatagtcagtaaaaatcatgtttttgaaaattatgtaatgactttggaaaataccagcaatataatgttaagtggggaaaaaagcaagttactcctctgtaatacatatgattttagttttgtaataaaaattcccaaccatatatgcacttatagggaaacaaaggacccatcgcaaatgttttccatgctgatctccaaagtggtgagtttatgtgtgatttttattttgtttatgctcttctgtattttccgaatttcatacaataaatatctgttacttttacaatatgaaaaaa

SEQ ID NO: 181421 - DNA, 5080 bp, Homo sapiens
  Payload ID: 15732
  Gene Symbol: SIDT1
  Gene Name: SID1 transmembrane family, member 1
  Uniprot ID: Q9NXL6
  ENST ID: ENST00000264852
  CDS Start-End: 727-3210
acatatttacatacatacacatatggtgagggagagaacgtgatgacgtgagactctccatggagagtaggaggtaataaagaaataaaacaggtgtctgaggagaggttctattagagaggggagaatagagagtaattatcgttcagacaggcaagagttctctgcaggtagcagcctgggaaagcgaactcgcgcaccctcttgggggacgggctcttttgctttctatttcttctcctgcagccagggtgcacacgtatttgaaacagaccgaatttcctcctcgatgtggcgtcaggttgacttttcgagactagcgggtatttctttttaatgactccaatgcctttttattattgctgttattgaggttgagggagaagagatcggtctaaattctggctgggtaagtggggggattctcggcgatgagaaacgggggacttagaagccggaggaaaatcagcagccccacatctccacttctccagtccgccctactctccacccgtgacctccagtggagaccccaggcggcagcatcagtatttgatcggcccttcgtcagcacgctgccagccctggccggctgggttcgccaggcatcacccgctcggctctgaagcggacgcctggccctgcaccgggctttggaaggaccctctctgcgctcgccccctccccagggtggctccgctttcgagcccgggcgcggtgcccaccatgcgcggctgcctgcggctcgcgctgctctgcgcgctgccctggctcctgctggcggcgtcgcccgggcacccggcgaaatcccccaggcagcccccggcaccgcgccgcgaccccttcgacgctgccaggggcgccgatttcgatcatgtctacagcggggtggtgaacctcagcaccgagaacatctactctttcaactacaccagccagcccgaccaggtgacagccgtgagggtgtatgtgaacagttcctctgagaatctcaactacccggtccttgttgtggttcgccagcagaaagaggtgctgtcctggcaggttcctctgctcttccaaggactataccagaggagctacaactatcaagaagtgagccgcaccttatgtccctcagaagcaaccaatgagacgggacccttgcagcaactgatatttgtagatgtcgcatccatggcacccctgggtgctcagtacaaactgctagttaccaagctgaagcacttccagctccggacaaatgttgcctttcactttactgccagcccctctcaacctcagtattttctatacaagtttcccaaagacgtggactcagttatcattaaagtggtgtctgaaatggcttatccatgttctgttgtctcagtccagaatatcatgtgcccggtgtatgatctcgaccacaatgtggaatttaatggtgtctatcagtccatgaccaagaaagctgccatcacgctacagaagaaggattttccaggcgagcagttcttcgtggtatttgtgataaagcctgaagattatgcctgtggaggatctttcttcatccaggaaaaggaaaaccagacctggaatctacagcgaaaaaagaaccttgaagtgaccattgtcccttccattaaagaatctgtttatgtgaaatccagtcttttcagtgtcttcatcttcctgtccttctacttgggatgccttcttgttgggtttgttcattatctgaggtttcagagaaaatccattgatggaagctttgggtccaatgatggctctggaaatatggtggcatctcatcccattgctgccagcacacccgaagggagcaattatgggacaatagatgagtcaagctccagtcctggaaggcagatgtcctcctccgatggtgggccaccgggccagtcagacacagacagctccgtggaggagagcgacttcgacaccatgccagacattgagagtgataaaaacatcatccggaccaagatgttcctttacctgtcagatttgtccaggaaggaccggagaattgtcagcaaaaaatataaaatttatttttggaacatcatcaccattgctgtgttttacgcgctgcccgtgatccagctggtcattacctatcagacagtggtaaatgtcactggcaaccaggacatctgttactacaacttcctctgtgctcaccccttgggcgtcctgagtgccttcaacaacattctcagcaatctgggccacgtgcttctgggcttcctcttcctgctgatagtcttgcgccgcgacatcctccatcggagagccctggaagccaaggacatctttgctgtggagtacgggattcccaaacactttggtctcttctacgctatgggcattgcattgatgatggaaggggtgctcagtgcttgctaccatgtctgccctaattattccaacttccaattcgacacctccttcatgtacatgatcgctggcctgtgcatgctgaagctctatcagacccgccacccagacatcaatgccagcgcctactctgcctatgcctcctttgctgtggtcatcatggtcaccgtccttggagtggtgtttggaaaaaatgacgtatggttctgggtcatcttctctgcaatccacgttctggcctcgctagccctcagcacccagatatattatatgggtcgtttcaagatagatttgggaattttccggcgggctgccatggtgttctacacagactgtatccagcagtgtagccgacctctatatatggatagaatggtgttgctggttgtggggaatctggttaactggtccttcgccctctttggattgatataccgccccagggactttgcttcctacatgctgggcatcttcatctgtaaccttttgctgtacctggccttttacatcatcatgaagctccgcagctctgaaaaggtcctcccagtcccgctcttctgcatcgtggccaccgctgtgatgtgggctgccgccctatattttttcttccagaatctcagcagctgggagggaactccggccgaatcccgggagaagaaccgcgagtgcattctgctggatttcttcgatgaccatgacatctggcacttcctctctgctactgctctgtttttctcattcttggttttgttaactttggatgatgaccttgatgtggttcggagagaccagatccctgtcttctgaacctccaacattaagagaggggagggagcgatcaatcttggtgctgtttcacaaaaattacagtgaccacagcaaagtaaccactgccagatgctccactcaccctctgtagagccaactctgcattcacacaggaaggagaggggctgcgggagatttaaacctgcaagaaaggaggcagaaggggagccatgttttgaggacagacgcaaacctgaggagctgagaaacacttgctccttccatctgcagctttgggagtgcaacagggataggcactgcatccaagtcaactcaccatcttggggtccctcccaccctcacggagacttgccagcaatggcagaatgctgctgcacacttccctccagttgtcaccctgcccagaaaggccagcagcttggacttcctgcccagaaactgtgttggcccccttcacacctctgcaacacctgctgctccagcaagaggatgtgattctttagaatatggcggggaggtgaccccaggccctgccctactgggatagatgttttaatggcaccagctagtcacctcccagaagaaactctgtatatttcccccaggtttctgatgccatcagaagggctcaggagtggggtttgtcacacattcctcttaacaagtaactgtcactgggaccgagtcctgggtgcttacatattccttcgtgtcttcatctcactgacctgtgtggacctcatcactctgactctgccttcttggaaaggccctgtcactccacagatgtctggccagcttcaaggcagaaggaaaaacaggaaaagctcttttaacagcagcaggaacaagagaaatgactaaccatactaaaagactggtaacagcagcagcagccagacaggcctcaccttaaggacttgggctgccagagcaaattcagcagagcttatttggcctcccattcacacagctcagttctgtgcccacatcacctttggggaagaaatcagcattctaatcagggacactacttcaggagtcctccacagcgagtccgtcatctgtcactttatgtagatcagggttctagacttcttccctgaggttctcagaagcagctctcaggatgaacgtattgtcctcttcccctcttcttgcaaagtgcacagctaatctaatgttgtctctcggttgcacctgacattctctccccagtaaggtgttggcaagctcagcatctgggttccactctcacactgtctggcagctctgtgtctgagaagttctacattgaccaggcccccttgttgcctggagtatgacgtaatcagaaaatagacgtataaatgtgcacatgcgtatgtatttgcttgtgaaattaaagtcacctcttgcctctgctttcctgatcattcgttagagaaatggatcaggcatttttttaaattattattctttctctaaactatttgcattgtgttcaaaaacccattttagaagtttgaacagcaagcttttcctgattttaaaaacacaaagttgctttcaatgaaatattttgtgatttttttaaagtccccaaatgtgtacttagccttctgttattccttattctttaagcagtgttggcttccattgaccatatgaaggccaccaattaaatggttgtgttaatccaacatgtaaaaaactttttggcagggcacagtggctcacgcctgtaatcccaacactttgggaggctgaggcaggaggatcacttgagcccaggagattgacgccgcagtgaactatgattgtgcccctgcactccagcctggatgacagagtgagaccccatctcttaaaaaataaaaaaaaataaaaatttgaacctgtttcacta

SEQ ID NO: 181422 - DNA, 2572 bp, Homo sapiens
  Payload ID: 15732
  Gene Symbol: SIDT1
  Gene Name: SID1 transmembrane family, member 1
  Uniprot ID: Q9NXL6
  ENST ID: ENST00000393830
  CDS Start-End: 40-2538
agggtggctccgctttcgagcccgggcgcggtgcccaccatgcgcggctgcctgcggctcgcgctgctctgcgcgctgccctggctcctgctggcggcgtcgcccgggcacccggcgaaatcccccaggcagcccccggcaccgcgccgcgaccccttcgacgctgccaggggcgccgatttcgatcatgtctacagcggggtggtgaacctcagcaccgagaacatctactctttcaactacaccagccagcccgaccaggtgacagccgtgagggtgtatgtgaacagttcctctgagaatctcaactacccggtccttgttgtggttcgccagcagaaagaggtgctgtcctggcaggttcctctgctcttccaaggactataccagaggagctacaactatcaagaagtgagccgcaccttatgtccctcagaagcaaccaatgagacgggacccttgcagcaactgatatttgtagatgtcgcatccatggcacccctgggtgctcagtacaaactgctagttaccaagctgaagcacttccagctccggacaaatgttgcctttcactttactgccagcccctctcaacctcagtattttctatacaagtttcccaaagacgtggactcagttatcattaaagtggtgtctgaaatggcttatccatgttctgttgtctcagtccagaatatcatgtgcccggtgtatgatctcgaccacaatgtggaatttaatggtgtctatcagtccatgaccaagaaagctgccatcacgctacagaagaaggattttccaggcgagcagttcttcgtggtatttgtgataaagcctgaagattatgcctgtggaggatctttcttcatccaggaaaaggaaaaccagacctggaatctacagcgaaaaaagaaccttgaagtgaccattgtcccttccattaaagaatctgtttatgtgaaatccagtcttttcagtgtcttcatcttcctgtccttctacttgggatgccttcttgttgggtttgttcattatctgaggtttcagagaaaatccattgatggaagctttgggtccaatgatggctctggaaatatggtggcatctcatcccattgctgccagcacacccgaagggagcaattatgggacaatagatgagtcaagctccagtcctggaaggcagatgtcctcctccgatggtgggccaccgggccagtcagacacagacagctccgtggaggagagcgacttcgacaccatgccagacattgagagtgataaaaacatcatccggaccaagatgttcctttacctgtcagatttgtccaggaaggaccggagaattgtcagcaaaaaatataaaatttatttttggaacatcatcaccattgctgtgttttacgcgctgcccgtgatccagctggtcattacctatcagacagtggtaaatgtcactggcaaccaggacatctgttactacaacttcctctgtgctcaccccttgggcgtcctgagtgccttcaacaacattctcagcaatctgggccacgtgcttctgggcttcctcttcctgctgatagtcttgcgccgcgacatcctccatcggagagccctggaagccaaggacatctttgctgtggagtacgggattcccaaacactttggtctcttctacgctatgggcattgcattgatgatggaaggggtgctcagtgcttgctaccatgtctgccctaattattccaacttccaattcgacacctccttcatgtacatgatcgctggcctgtgcatgctgaagctctatcagacccgccacccagacatcaatgccagcgcctactctgcctatgcctcctttgctgtggtcatcatggtcaccgtccttggagtggtgtttggaaaaaatgacgtatggttctgggtcatcttctctgcaatccacgttctggcctcgctagccctcagcacccagatatattatatgggtcgtttcaagatagatgtgtctgacacagatttgggaattttccggcgggctgccatggtgttctacacagactgtatccagcagtgtagccgacctctatatatggatagaatggtgttgctggttgtggggaatctggttaactggtccttcgccctctttggattgatataccgccccagggactttgcttcctacatgctgggcatcttcatctgtaaccttttgctgtacctggccttttacatcatcatgaagctccgcagctctgaaaaggtcctcccagtcccgctcttctgcatcgtggccaccgctgtgatgtgggctgccgccctatattttttcttccagaatctcagcagctgggagggaactccggccgaatcccgggagaagaaccgcgagtgcattctgctggatttcttcgatgaccatgacatctggcacttcctctctgctactgctctgtttttctcattcttggttttgttaactttggatgatgaccttgatgtggttcggagagaccagatccctgtcttctgaacctccaacattaagagaggggagggagcgatca

SEQ ID NO: 181423 - DNA, 3135 bp, Homo sapiens
  Payload ID: 15733
  Gene Symbol: SIDT2
  Gene Name: SID1 transmembrane family, member 2
  ENST ID: ENST00000278951
  CDS Start-End: 84-2651
gccgcaacccgtcccggaggtgtcctgtctcctgtcgccgccgccgccgccaccaccgctgccactgccgccctgccggggccatgttcgctctgggcttgcccttcttggtgctcttggtggcctcggtcgagagccatctgggggttctggggcccaagaacgtctcgcagaaagacgccgagtttgagcgcacctacgtggacgaggtcaacagcgagctggtcaacatctacaccttcaaccatactgtgacccgcaacaggacagagggcgtgcgtgtgtctgtgaacgtcctgaacaagcagaagggggcgccgttgctgtttgtggtccgccagaaggaggctgtggtgtccttccaggtgcccctaatcctgcgagggatgtttcagcgcaagtacctctaccaaaaagtggaacgaaccctgtgtcagccccccaccaagaatgagtcggagattcagttcttctacgtggatgtgtccaccctgtcaccagtcaacaccacataccagctccgggtcagccgcatggacgattttgtgctcaggactggggagcagttcagcttcaataccacagcagcacagccccagtacttcaagtatgagttccctgaaggcgtggactcggtaattgtcaaggtgacctccaacaaggccttcccctgctcagtcatctccattcaggatgtgctgtgtcctgtctatgacctggacaacaacgtagccttcatcggcatgtaccagacgatgaccaagaaggcggccatcaccgtacagcgcaaagacttccccagcaacagcttttatgtggtggtggtggtgaagaccgaagaccaagcctgcgggggctccctgcctttctaccccttcgcagaagatgaaccggtcgatcaagggcaccgccagaaaaccctgtcagtgctggtgtctcaagcagtcacgtctgaggcatacgtcagtgggatgctcttttgcctgggtatatttctctccttttacctgctgaccgtcctcctggcctgctgggagaactggaggcagaagaagaagaccctgctggtggccattgaccgagcctgcccagaaagcggtcaccctcgagtcctggctgattcttttcctggcagttccccttatgagggttacaactatggctcctttgagaatgtttctggatctaccgatggtctggttgacagcgctggcactggggacctctcttacggttaccaggggcacgaccagttcaagcggcgcctcccctctggccagatgcggcagctgtgcattgccatgggccgctcctttgaacctgtaggtactcggccccgagtggactccatgagctctgtggaggaggatgactacgacacattgaccgacatcgattccgacaagaatgtcattcgcaccaagcaatacctctatgtggctgacctggcacggaaggacaagcgtgttctgcggaaaaagtaccagatctacttctggaacattgccaccattgctgtcttctatgcccttcctgtggtgcagctggtgatcacctaccagacggtggtgaatgtcacagggaatcaggacatctgctactacaacttcctctgcgcccacccactgggcaatctcagcgccttcaacaacatcctcagcaacctggggtacatcctgctggggctgcttttcctgctcatcatcctgcaacgggagatcaaccacaaccgggccctgctgcgcaatgacctctgtgccctggaatgtgggatccccaaacactttgggcttttctacgccatgggcacagccctgatgatggaggggctgctcagtgcttgctatcatgtgtgccccaactataccaatttccagtttgacacatcgttcatgtacatgatcgccggactctgcatgctgaagctctaccagaagcggcacccggacatcaacgccagcgcctacagtgcctacgcctgcctggccattgtcatcttcttctctgtgctgggcgtggtctttggcaaagggaacacggcgttctggatcgtcttctccatcattcacatcatcgccaccctgctcctcagcacgcagctctattacatgggccggtggaaactggactcggggatcttccgccgcatcctccacgtgctctacacagactgcatccggcagtgcagcgggccgctctacgtggaccgcatggtgctgctggtcatgggcaacgtcatcaactggtcgctggctgcctatgggcttatcatgcgccccaatgatttcgcttcctacttgttggccattggcatctgcaacctgctcctttacttcgccttctacatcatcatgaagctccggagtggggagaggatcaagctcatccccctgctctgcatcgtttgcacctccgtggtctggggcttcgcgctcttcttcttcttccagggactcagcacctggcagaaaacccctgcagagtcgagggagcacaaccgggactgcatcctcctcgacttctttgacgaccacgacatctggcacttcctctcctccatcgccatgttcgggtccttcctggtaagcgggcctcccggccgagccgggtgggtacgtgaaggtagcagctgcctccttctctgtggctgatctggcgtccacaccccaggtgttgctgacactggatgacgacctggatactaaaggggcttcaggaagggatgtgctgtttccctctacgtgcccagtcctagcctcgctctaggacccagggctggcttctaagtttccgtccagtcttcaggcaagttctgtgttagtcatgcacacacatacctatgaaaccttggagtttacaaagaattgccccagctctgggcaccctggccaccctggtccttggatccccttcgtcccacctggtccaccccagatgctgaggatgggggagctcaggcggggcctctgctttggggatgggaatgtgtttttctcccaaacttgtttttatagctctgcttgaagggctgggagatgaggtgggtctggatcttttctcagagcgtctccatgctatggttgcatttccgttttctatgaatgaatttgcattcaataaacaaccagactcagt

SEQ ID NO: 181424 - DNA, 4406 bp, Homo sapiens
  Payload ID: 15733
  Gene Symbol: SIDT2
  Gene Name: SID1 transmembrane family, member 2
  Uniprot ID: Q8NBJ9
  ENST ID: ENST00000324225
  CDS Start-End: 532-3030
ctcacttttcagtgttcgtgcgtcgggacggcgcgtccgcccgcccttaaagggcccgcacctcggaaaactcgcagcccagcacggcgtcgggtagctaccacctatcacgcccctcactctgcgactcgccttcctccgcggccagcccccgccgccggctcttcctccctcccctttcccggcgtctccaggctcccggcaaccagccgccctccttctcacggccctggcccggggctccagggtctcaggtcgtactcagcccctcgcgagctgggaccccttcccgtagccagcatcccctccctccccgccccctcccggccgccccctcccctgcggggaccctgggagcctcttcggggctcttgggaggggacatttcctaatctcaggccggggttaaagttctggtcctggtgagatgctggaagctgcggccgcagccgcaacccgtcccggaggtgtcctgtctcctgtcgccgccgccgccgccaccaccgctgccactgccgccctgccggggccatgttcgctctgggcttgcccttcttggtgctcttggtggcctcggtcgagagccatctgggggttctggggcccaagaacgtctcgcagaaagacgccgagtttgagcgcacctacgtggacgaggtcaacagcgagctggtcaacatctacaccttcaaccatactgtgacccgcaacaggacagagggcgtgcgtgtgtctgtgaacgtcctgaacaagcagaagggggcgccgttgctgtttgtggtccgccagaaggaggctgtggtgtccttccaggtgcccctaatcctgcgagggatgtttcagcgcaagtacctctaccaaaaagtggaacgaaccctgtgtcagccccccaccaagaatgagtcggagattcagttcttctacgtggatgtgtccaccctgtcaccagtcaacaccacataccagctccgggtcagccgcatggacgattttgtgctcaggactggggagcagttcagcttcaataccacagcagcacagccccagtacttcaagtatgagttccctgaaggcgtggactcggtaattgtcaaggtgacctccaacaaggccttcccctgctcagtcatctccattcaggatgtgctgtgtcctgtctatgacctggacaacaacgtagccttcatcggcatgtaccagacgatgaccaagaaggcggccatcaccgtacagcgcaaagacttccccagcaacagcttttatgtggtggtggtggtgaagaccgaagaccaagcctgcgggggctccctgcctttctaccccttcgcagaagatgaaccggtcgatcaagggcaccgccagaaaaccctgtcagtgctggtgtctcaagcagtcacgtctgaggcatacgtcagtgggatgctcttttgcctgggtatatttctctccttttacctgctgaccgtcctcctggcctgctgggagaactggaggcagaagaagaagaccctgctggtggccattgaccgagcctgcccagaaagcggtcaccctcgagtcctggctgattcttttcctggcagttccccttatgagggttacaactatggctcctttgagaatgtttctggatctaccgatggtctggttgacagcgctggcactggggacctctcttacggttaccagggccgctcctttgaacctgtaggtactcggccccgagtggactccatgagctctgtggaggaggatgactacgacacattgaccgacatcgattccgacaagaatgtcattcgcaccaagcaatacctctatgtggctgacctggcacggaaggacaagcgtgttctgcggaaaaagtaccagatctacttctggaacattgccaccattgctgtcttctatgcccttcctgtggtgcagctggtgatcacctaccagacggtggtgaatgtcacagggaatcaggacatctgctactacaacttcctctgcgcccacccactgggcaatctcagcgccttcaacaacatcctcagcaacctggggtacatcctgctggggctgcttttcctgctcatcatcctgcaacgggagatcaaccacaaccgggccctgctgcgcaatgacctctgtgccctggaatgtgggatccccaaacactttgggcttttctacgccatgggcacagccctgatgatggaggggctgctcagtgcttgctatcatgtgtgccccaactataccaatttccagtttgacacatcgttcatgtacatgatcgccggactctgcatgctgaagctctaccagaagcggcacccggacatcaacgccagcgcctacagtgcctacgcctgcctggccattgtcatcttcttctctgtgctgggcgtggtctttggcaaagggaacacggcgttctggatcgtcttctccatcattcacatcatcgccaccctgctcctcagcacgcagctctattacatgggccggtggaaactggactcggggatcttccgccgcatcctccacgtgctctacacagactgcatccggcagtgcagcgggccgctctacgtggaccgcatggtgctgctggtcatgggcaacgtcatcaactggtcgctggctgcctatgggcttatcatgcgccccaatgatttcgcttcctacttgttggccattggcatctgcaacctgctcctttacttcgccttctacatcatcatgaagctccggagtggggagaggatcaagctcatccccctgctctgcatcgtttgcacctccgtggtctggggcttcgcgctcttcttcttcttccagggactcagcacctggcagaaaacccctgcagagtcgagggagcacaaccgggactgcatcctcctcgacttctttgacgaccacgacatctggcacttcctctcctccatcgccatgttcgggtccttcctggtgttgctgacactggatgacgacctggatactgtgcagcgggacaagatctatgtcttctagcaggagctgggcccttcgcttcacctcaaggggccctgagctcctttgtgtcatagaccggtcactctgtcgtgctgtggggatgagtcccagcaccgctgcccagcactggatggcagcaggacagccaggtctagcttaggcttggcctgggacagccatggggtggcatggaaccttgcagctgccctctgccgaggagcaggcctgctcccctggaacccccagatgttggccaaattgctgctttcttctcagtgttggggccttccatgggcccctgtcctttggctctccatttgtccctttgcaagaggaaggatggaagggacaccctccccatttcatgccttgcattttgcccgtcctcctccccacaatgccccagcctgggacctaaggcctctttttcctcccatactcccactccagggcctagtctggggcctgaatctctgtcctgtatcagggccccagttctctttgggctgtccctggctgccatcactgcccattccagtcagccaggatggatgggggtatgagattttgggggttggccagctggtgccagacttttggtgctaaggcctgcaaggggcctggggcagtgcgtattctcttccctctgacctgtgctcagggctggctctttagcaatgcgctcagcccaatttgagaaccgccttctgattcaagaggctgaattcagaggtcacctcttcatcccatcagctcccagactgatgccagcaccaggactggagggagaagcgcctcaccccttcccttccttctttccaggcccttagtcttgccaaaccccagctggtggcctttcagtgccattgacactgcccaagaatgtccaggggcaaaggagggatgatacagagttcagcccgttctgcctccacagctgtgggcaccccagtgcctaccttagaaaggggcttcaggaagggatgtgctgtttccctctacgtgcccagtcctagcctcgctctaggacccagggctggcttctaagtttccgtccagtcttcaggcaagttctgtgttagtcatgcacacacatacctatgaaaccttggagtttacaaagaattgccccagctctgggcaccctggccaccctggtccttggatccccttcgtcccacctggtccaccccagatgctgaggatgggggagctcaggcggggcctctgctttggggatgggaatgtgtttttctcccaaacttgtttttatagctctgcttgaagggctgggagatgaggtgggtctggatcttttctcagagcgtctccatgctatggttgcatttccgttttctatgaatgaatttgcattcaataaacaaccagactca

SEQ ID NO: 181425 - DNA, 3910 bp, Homo sapiens
  Payload ID: 15733
  Gene Symbol: SIDT2
  Gene Name: SID1 transmembrane family, member 2
  ENST ID: ENST00000431081
  CDS Start-End: 42-2531
gccgccgccaccaccgctgccactgccgccctgccggggccatgttcgctctgggcttgcccttcttggtgctcttggtggcctcggtcgagagccatctgggggttctggggcccaagaacgtctcgcagaaagacgccgagtttgagcgcacctacgtggacgaggtcaacagcgagctggtcaacatctacaccttcaaccatactgtgacccgcaacaggacagagggcgtgcgtgtgtctgtgaacgtcctgaacaagcagaagggggcgccgttgctgtttgtggtccgccagaaggaggctgtggtgtccttccaggtgcccctaatcctgcgagggatgtttcagcgcaagtacctctaccaaaaagtggaacgaaccctgtgtcagccccccaccaagaatgagtcggagattcagttcttctacgtggatgtgtccaccctgtcaccagtcaacaccacataccagctccgggtcagccgcatggacgattttgtgctcaggactggggagcagttcagcttcaataccacagcagcacagccccagtacttcaagtatgagttccctgaaggcgtggactcggtaattgtcaaggtgacctccaacaaggccttcccctgctcagtcatctccattcaggatgtgctgtgtcctgtctatgacctggacaacaacgtagccttcatcggcatgtaccagacgatgaccaagaaggcggccatcaccgtacagcgcaaagacttccccagcaacagcttttatgtggtggtggtggtgaagaccgaagaccaagcctgcgggggctccctgcctttctaccccttcgcagaagatgaaccggtcgatcaagggcaccgccagaaaaccctgtcagtgctggtgtctcaagcagtcacgtctgaggcatacgtcagtgggatgctcttttgcctgggtatatttctctccttttacctgctgaccgtcctcctggcctgctgggagaactggaggcagaagaagaagaccctgctggtggccattgaccgagcctgcccagaaagcgcttctctccttggtcaccctcgagtcctggctgattcttttcctggcagttccccttatgagggttacaactatggctcctttgagaatgtttctggatctaccgatggtctggttgacagcgctggcactggggacctctcttacggttaccagggtactcggccccgagtggactccatgagctctgtggaggaggatgactacgacacattgaccgacatcgattccgacaagaatgtcattcgcaccaagcaatacctctatgtggctgacctggcacggaaggacaagcgtgttctgcggaaaaagtaccagatctacttctggaacattgccaccattgctgtcttctatgcccttcctgtggtgcagctggtgatcacctaccagacggtggtgaatgtcacagggaatcaggacatctgctactacaacttcctctgcgcccacccactgggcaatctcagcgccttcaacaacatcctcagcaacctggggtacatcctgctggggctgcttttcctgctcatcatcctgcaacgggagatcaaccacaaccgggccctgctgcgcaatgacctctgtgccctggaatgtgggatccccaaacactttgggcttttctacgccatgggcacagccctgatgatggaggggctgctcagtgcttgctatcatgtgtgccccaactataccaatttccagtttgacacatcgttcatgtacatgatcgccggactctgcatgctgaagctctaccagaagcggcacccggacatcaacgccagcgcctacagtgcctacgcctgcctggccattgtcatcttcttctctgtgctgggcgtggtctttggcaaagggaacacggcgttctggatcgtcttctccatcattcacatcatcgccaccctgctcctcagcacgcagctctattacatgggccggtggaaactggactcggggatcttccgccgcatcctccacgtgctctacacagactgcatccggcagtgcagcgggccgctctacgtggaccgcatggtgctgctggtcatgggcaacgtcatcaactggtcgctggctgcctatgggcttatcatgcgccccaatgatttcgcttcctacttgttggccattggcatctgcaacctgctcctttacttcgccttctacatcatcatgaagctccggagtggggagaggatcaagctcatccccctgctctgcatcgtttgcacctccgtggtctggggcttcgcgctcttcttcttcttccagggactcagcacctggcagaaaacccctgcagagtcgagggagcacaaccgggactgcatcctcctcgacttctttgacgaccacgacatctggcacttcctctcctccatcgccatgttcgggtccttcctggtgttgctgacactggatgacgacctggatactgtgcagcgggacaagatctatgtcttctagcaggagctgggcccttcgcttcacctcaaggggccctgagctcctttgtgtcatagaccggtcactctgtcgtgctgtggggatgagtcccagcaccgctgcccagcactggatggcagcaggacagccaggtctagcttaggcttggcctgggacagccatggggtggcatggaaccttgcagctgccctctgccgaggagcaggcctgctcccctggaacccccagatgttggccaaattgctgctttcttctcagtgttggggccttccatgggcccctgtcctttggctctccatttgtccctttgcaagaggaaggatggaagggacaccctccccatttcatgccttgcattttgcccgtcctcctccccacaatgccccagcctgggacctaaggcctctttttcctcccatactcccactccagggcctagtctggggcctgaatctctgtcctgtatcagggccccagttctctttgggctgtccctggctgccatcactgcccattccagtcagccaggatggatgggggtatgagattttgggggttggccagctggtgccagacttttggtgctaaggcctgcaaggggcctggggcagtgcgtattctcttccctctgacctgtgctcagggctggctctttagcaatgcgctcagcccaatttgagaaccgccttctgattcaagaggctgaattcagaggtcacctcttcatcccatcagctcccagactgatgccagcaccaggactggagggagaagcgcctcaccccttcccttccttctttccaggcccttagtcttgccaaaccccagctggtggcctttcagtgccattgacactgcccaagaatgtccaggggcaaaggagggatgatacagagttcagcccgttctgcctccacagctgtgggcaccccagtgcctaccttagaaaggggcttcaggaagggatgtgctgtttccctctacgtgcccagtcctagcctcgctctaggacccagggctggcttctaagtttccgtccagtcttcaggcaagttctgtgttagtcatgcacacacatacctatgaaaccttggagtttacaaagaattgccccagctctgggcaccctggccaccctggtccttggatccccttcgtcccacctggtccaccccagatgctgaggatgggggagctcaggcggggcctctgctttggggatgggaatgtgtttttctcccaaacttgtttttatagctctgcttgaagggctgggagatgaggtgggtctggatcttttctcagagcgtctccatgctatggttgcatttccgttttctatgaatgaatttgcattcaataaacaaccagactcagtt

SEQ ID NO: 181426 - DNA, 540 bp, Homo sapiens
  Payload ID: 15733
  Gene Symbol: SIDT2
  Gene Name: SID1 transmembrane family, member 2
  ENST ID: ENST00000532960
  CDS Start-End: 211-540
acttttcagtgttcgtgcgtcgggacggcgcgtccgcccgcccttaaagggcccgcacctcggaaaactcgcagcccagcacggcgtcggttctggtcctggtgagatgctggaagctgcggccgcagccgcaacccgtcccggaggtgtcctgtctcctgtcgccgccgccgccgccaccaccgctgccactgccgccctgccggggccatgttcgctctgggcttgcccttcttggtgctcttggtggcctcggtcgagagccatctgggggttctggggcccaagaacgtctcgcagaaagacgccgagtttgagcgcacctacgtggacgaggtcaacagcgagctggtcaacatctacaccttcaaccatactgtgacccgcaacaggacagagggcgtgcgtgtgtctgtgaacgtcctgaacaagcagaagggggcgccgttgctgtttgtggtccgccagaaggaggctgtggtgtccttccaggtgcccctaatcctgcgagggatgtttcagcgcaagtacctctaccaa

SEQ ID NO: 181427 - DNA, 2143 bp, Homo sapiens
  Payload ID: 15733
  Gene Symbol: SIDT2
  Gene Name: SID1 transmembrane family, member 2
  ENST ID: ENST00000532062
  CDS Start-End: 556-930
ctgcatccggcagtgcagcgggccgctctacgtggtacctgcctggttcccctgctccattctccacatctcctttcttccctctgatgggggagtggggctgggctgaggacccaggggagagtggggaccagctggctgggccttcttccaccaccctccctgcccctgccctcagtccctgtgtccctgcttccctccaggaccgcatggtgctgctggtcatgggcaacgtcatcaactggtcgctgtgagtatggtcagcagtagtggcctggttgggtggacagctggggactcggtcagccactggctgccttgggggctaaggacaacttccaaatgttgggcataagacatgggggctaagagagatcttggcctctcttctctctcttggcatctgggcttctagaatcttctgtgggcttctgaacacagcccaacatcataataaaacatgcctaggcagggcaggaagagcacttccttgcccttgggcttcctgcttcaccacccttcatccctcttgccagggctgcctatgggcttatcatgcgccccaatgatttcgcttcctacttgttggccattggcatctgcaacctgctcctttacttcgccttctacatcatcatgaagctccggagtggggagaggatcaagctcatccccctgctctgcatcgtttgcacctccgtggtctggggcttcgcgctcttcttcttcttccagggactcagcacctggcagaaaacccctgcagagtcgagggagcacaaccgggactgcatcctcctcgacttctttgacgaccacgacatctggcacttcctctcctccatcgccatgttcgggtccttcctggtgttgctgacactggatgacgacctggatactgtgcagcgggacaagatctatgtcttctagcaggagctgggcccttcgcttcacctcaaggggccctgagctcctttgtgtcatagaccggtcactctgtcgtgctgtggggatgagtcccagcaccgctgcccagcactggatggcagcaggacagccaggtctagcttaggcttggcctgggacagccatggggtggcatggaaccttgcagctgccctctgccgaggagcaggcctgctcccctggaacccccagatgttggccaaattgctgctttcttctcagtgttggggccttccatgggcccctgtcctttggctctccatttgtccctttgcaagaggaaggatggaagggacaccctccccatttcatgccttgcattttgcccgtcctcctccccacaatgccccagcctgggacctaaggcctctttttcctcccatactcccactccagggcctagtctggggcctgaatctctgtcctgtatcagggccccagttctctttgggctgtccctggctgccatcactgcccattccagtcagccaggatggatgggggtatgagattttgggggttggccagctggtgccagacttttggtgctaaggcctgcaaggggcctggggcagtgcgtattctcttccctctgacctgtgctcagggctggctctttagcaatgcgctcagcccaatttgagaaccgccttctgattcaagaggctgaattcagaggtcacctcttcatcccatcagctcccagactgatgccagcaccaggactggagggagaagcgcctcaccccttcccttccttctttccaggcccttagtcttgccaaaccccagctggtggcctttcagtgccattgacactgcccaagaatgtccaggggcaaaggagggatgatacagagttcagcccgttctgcctccacagctgtgggcaccccagtgcctaccttagaaaggggcttcaggaagggatgtgctgtttccctctacgtgcccagtcctagcctcgctctaggacccagggctggcttctaagtttccgtccagtcttcaggcaagttctgtgttagtcatgcacacacatacctatgaaaccttggagtttacaaagaattgccccagctctgggcaccctggccaccctggtccttggatccccttcgtcccacctggtccaccccagatgctgaggatgggggagctcaggcggggcctctgc

SEQ ID NO: 181428 - DNA, 583 bp, Homo sapiens
  Payload ID: 15733
  Gene Symbol: SIDT2
  Gene Name: SID1 transmembrane family, member 2
  ENST ID: ENST00000531353
  CDS Start-End: 291-583
attcttccatcagttgtggtctgagcacacatggcttgctctctaccctaaaccccagaatctgacagctctgtggggtctcggtgggagaggaaacaggcttattactgggcttgcccagaaaacctcaggggaatgagactggcccagaactgaaaagctctgtgcaggcaaagggcgtgcgtgtgtctgtgaacgtcctgaacaagcagaagggggcgccgttgctgtttgtggtccgccagaaggaggctgtggtgtccttccaggtgcccctaatcctgcgagggatgtttcagcgcaagtacctctaccaaaaagtggaacgaaccctgtgtcagccccccaccaagaatgagtcggagattcagttcttctacgtggatgtgtccaccctgtcaccagtcaacaccacataccagctccgggtcagccgcatggacgattttgtgctcaggactggggagcagttcagcttcaataccacagcagcacagccccagtacttcaagtatgagttccctgaaggcgtggactcggtaattgtcaaggtgacctccaacaaggccttcccctgctcagt

SEQ ID NO: 181429 - DNA, 840 bp, Homo sapiens
  Payload ID: 15733
  Gene Symbol: SIDT2
  Gene Name: SID1 transmembrane family, member 2
  ENST ID: ENST00000525478
  CDS Start-End: 1-402
gggatcttccgccgcatcctccacgtgctctacacagactgcatccggcagtgcagcgggccgctctacgtggaccgcatggtgctgctggtcatgggcaacgtcatcaactggtcgctggctgcctatgggcttatcatgcgccccaatgatttcgcttcctacttgttggccattggcatctgcaacctgctcctttacttcgccttctacatcatcatgaagaaaacccctgcagagtcgagggagcacaaccgggactgcatcctcctcgacttctttgacgaccacgacatctggcacttcctctcctccatcgccatgttcgggtccttcctggtgttgctgacactggatgacgacctggatactgtgcagcgggacaagatctatgtcttctagcaggagctgggcccttcgcttcacctcaaggggccctgagctcctttgtgtcatagaccggtcactctgtcgtgctgtggggatgagtcccagcaccgctgcccagcactggatggcagcaggacagccaggtctagcttaggcttggcctgggacagccatggggtggcatggaaccttgcagctgccctctgccgaggagcaggcctgctcccctggaacccccagatgttggccaaattgctgctttcttctcagtgttggggccttccatgggcccctgtcctttggctctccatttgtccctttgcaagaggaaggatggaagggacaccctccccatttcatgccttgcattttgcccgtcctcctccccacaatgccccagcctgggacctaaggcctctttttcctcccatactcccactccagggccta

SEQ ID NO: 181430 - DNA, 834 bp, Homo sapiens
  Payload ID: 15733
  Gene Symbol: SIDT2
  Gene Name: SID1 transmembrane family, member 2
  ENST ID: ENST00000524842
  CDS Start-End: 323-834
gagcgcacctacgtggacgaggtcaacagcgagctggtcaacatctacaccttcaaccatactgtgacccgcaacaggacagagggcgtgcgtgtgtctgtgaacgtcctgaacaagcagaagggggcgccgttgctgtttgtggtccgccagaaggaggctgtggtgtccttccaggtttcagcgcaagtacctctaccaaaaagtggaacgaaccctgtgtcagccccccaccaagaatgagtcggagattcagttcttctacgtggatgtgtccaccctgtcaccagtcaacaccacataccagctccgggtcagccgcatggacgattttgtgctcaggactggggagcagttcagcttcaataccacagcagcacagccccagtacttcaagtatgagttccctgaaggcgtggactcggtaattgtcaaggtgacctccaacaaggccttcccctgctcagtcatctccattcaggatgtgctgtgtcctgtctatgacctggacaacaacgtagccttcatcggcatgtaccagacgatgaccaagaaggcggccatcaccgtacagcgcaaagacttccccagcaacagcttttatgtggtggtggtggtgaagaccgaagaccaagcctgcgggggctccctgcctttctaccccttcgcagaagatgaaccggtcgatcaagggcaccgccagaaaaccctgtcagtgctggtgtctcaagcagtcacgtctgaggcatacgtcagtgggatgctcttttgcctgggtatatttctctccttttacctgctgaccgtcctcctggcctgctgggagaactggag

SEQ ID NO: 181431 - DNA, 3924 bp, Homo sapiens
  Payload ID: 15733
  Gene Symbol: SIDT2
  Gene Name: SID1 transmembrane family, member 2
  Uniprot ID: Q8NBJ9
  ENST ID: ENST00000620360
  CDS Start-End: 51-2549
cggcaaccagccgccgccaccaccgctgccactgccgccctgccggggccatgttcgctctgggcttgcccttcttggtgctcttggtggcctcggtcgagagccatctgggggttctggggcccaagaacgtctcgcagaaagacgccgagtttgagcgcacctacgtggacgaggtcaacagcgagctggtcaacatctacaccttcaaccatactgtgacccgcaacaggacagagggcgtgcgtgtgtctgtgaacgtcctgaacaagcagaagggggcgccgttgctgtttgtggtccgccagaaggaggctgtggtgtccttccaggtgcccctaatcctgcgagggatgtttcagcgcaagtacctctaccaaaaagtggaacgaaccctgtgtcagccccccaccaagaatgagtcggagattcagttcttctacgtggatgtgtccaccctgtcaccagtcaacaccacataccagctccgggtcagccgcatggacgattttgtgctcaggactggggagcagttcagcttcaataccacagcagcacagccccagtacttcaagtatgagttccctgaaggcgtggactcggtaattgtcaaggtgacctccaacaaggccttcccctgctcagtcatctccattcaggatgtgctgtgtcctgtctatgacctggacaacaacgtagccttcatcggcatgtaccagacgatgaccaagaaggcggccatcaccgtacagcgcaaagacttccccagcaacagcttttatgtggtggtggtggtgaagaccgaagaccaagcctgcgggggctccctgcctttctaccccttcgcagaagatgaaccggtcgatcaagggcaccgccagaaaaccctgtcagtgctggtgtctcaagcagtcacgtctgaggcatacgtcagtgggatgctcttttgcctgggtatatttctctccttttacctgctgaccgtcctcctggcctgctgggagaactggaggcagaagaagaagaccctgctggtggccattgaccgagcctgcccagaaagcggtcaccctcgagtcctggctgattcttttcctggcagttccccttatgagggttacaactatggctcctttgagaatgtttctggatctaccgatggtctggttgacagcgctggcactggggacctctcttacggttaccagggccgctcctttgaacctgtaggtactcggccccgagtggactccatgagctctgtggaggaggatgactacgacacattgaccgacatcgattccgacaagaatgtcattcgcaccaagcaatacctctatgtggctgacctggcacggaaggacaagcgtgttctgcggaaaaagtaccagatctacttctggaacattgccaccattgctgtcttctatgcccttcctgtggtgcagctggtgatcacctaccagacggtggtgaatgtcacagggaatcaggacatctgctactacaacttcctctgcgcccacccactgggcaatctcagcgccttcaacaacatcctcagcaacctggggtacatcctgctggggctgcttttcctgctcatcatcctgcaacgggagatcaaccacaaccgggccctgctgcgcaatgacctctgtgccctggaatgtgggatccccaaacactttgggcttttctacgccatgggcacagccctgatgatggaggggctgctcagtgcttgctatcatgtgtgccccaactataccaatttccagtttgacacatcgttcatgtacatgatcgccggactctgcatgctgaagctctaccagaagcggcacccggacatcaacgccagcgcctacagtgcctacgcctgcctggccattgtcatcttcttctctgtgctgggcgtggtctttggcaaagggaacacggcgttctggatcgtcttctccatcattcacatcatcgccaccctgctcctcagcacgcagctctattacatgggccggtggaaactggactcggggatcttccgccgcatcctccacgtgctctacacagactgcatccggcagtgcagcgggccgctctacgtggaccgcatggtgctgctggtcatgggcaacgtcatcaactggtcgctggctgcctatgggcttatcatgcgccccaatgatttcgcttcctacttgttggccattggcatctgcaacctgctcctttacttcgccttctacatcatcatgaagctccggagtggggagaggatcaagctcatccccctgctctgcatcgtttgcacctccgtggtctggggcttcgcgctcttcttcttcttccagggactcagcacctggcagaaaacccctgcagagtcgagggagcacaaccgggactgcatcctcctcgacttctttgacgaccacgacatctggcacttcctctcctccatcgccatgttcgggtccttcctggtgttgctgacactggatgacgacctggatactgtgcagcgggacaagatctatgtcttctagcaggagctgggcccttcgcttcacctcaaggggccctgagctcctttgtgtcatagaccggtcactctgtcgtgctgtggggatgagtcccagcaccgctgcccagcactggatggcagcaggacagccaggtctagcttaggcttggcctgggacagccatggggtggcatggaaccttgcagctgccctctgccgaggagcaggcctgctcccctggaacccccagatgttggccaaattgctgctttcttctcagtgttggggccttccatgggcccctgtcctttggctctccatttgtccctttgcaagaggaaggatggaagggacaccctccccatttcatgccttgcattttgcccgtcctcctccccacaatgccccagcctgggacctaaggcctctttttcctcccatactcccactccagggcctagtctggggcctgaatctctgtcctgtatcagggccccagttctctttgggctgtccctggctgccatcactgcccattccagtcagccaggatggatgggggtatgagattttgggggttggccagctggtgccagacttttggtgctaaggcctgcaaggggcctggggcagtgcgtattctcttccctctgacctgtgctcagggctggctctttagcaatgcgctcagcccaatttgagaaccgccttctgattcaagaggctgaattcagaggtcacctcttcatcccatcagctcccagactgatgccagcaccaggactggagggagaagcgcctcaccccttcccttccttctttccaggcccttagtcttgccaaaccccagctggtggcctttcagtgccattgacactgcccaagaatgtccaggggcaaaggagggatgatacagagttcagcccgttctgcctccacagctgtgggcaccccagtgcctaccttagaaaggggcttcaggaagggatgtgctgtttccctctacgtgcccagtcctagcctcgctctaggacccagggctggcttctaagtttccgtccagtcttcaggcaagttctgtgttagtcatgcacacacatacctatgaaaccttggagtttacaaagaattgccccagctctgggcaccctggccaccctggtccttggatccccttcgtcccacctggtccaccccagatgctgaggatgggggagctcaggcggggcctctgctttggggatgggaatgtgtttttctcccaaacttgtttttatagctctgcttgaagggctgggagatgaggtgggtctggatcttttctcagagcgtctccatgctatggttgcatttccgttttctatgaatgaatttgcattcaataaacaaccagactc

SEQ ID NO: 181432 - DNA, 2609 bp, Homo sapiens
  Payload ID: 15733
  Gene Symbol: SIDT2
  Gene Name: SID1 transmembrane family, member 2
  ENST ID: ENST00000628876
  CDS Start-End: 42-2609
gccgccgccaccaccgctgccactgccgccctgccggggccatgttcgctctgggcttgcccttcttggtgctcttggtggcctcggtcgagagccatctgggggttctggggcccaagaacgtctcgcagaaagacgccgagtttgagcgcacctacgtggacgaggtcaacagcgagctggtcaacatctacaccttcaaccatactgtgacccgcaacaggacagagggcgtgcgtgtgtctgtgaacgtcctgaacaagcagaagggggcgccgttgctgtttgtggtccgccagaaggaggctgtggtgtccttccaggtgcccctaatcctgcgagggatgtttcagcgcaagtacctctaccaaaaagtggaacgaaccctgtgtcagccccccaccaagaatgagtcggagattcagttcttctacgtggatgtgtccaccctgtcaccagtcaacaccacataccagctccgggtcagccgcatggacgattttgtgctcaggactggggagcagttcagcttcaataccacagcagcacagccccagtacttcaagtatgagttccctgaaggcgtggactcggtaattgtcaaggtgacctccaacaaggccttcccctgctcagtcatctccattcaggatgtgctgtgtcctgtctatgacctggacaacaacgtagccttcatcggcatgtaccagacgatgaccaagaaggcggccatcaccgtacagcgcaaagacttccccagcaacagcttttatgtggtggtggtggtgaagaccgaagaccaagcctgcgggggctccctgcctttctaccccttcgcagaagatgaaccggtcgatcaagggcaccgccagaaaaccctgtcagtgctggtgtctcaagcagtcacgtctgaggcatacgtcagtgggatgctcttttgcctgggtatatttctctccttttacctgctgaccgtcctcctggcctgctgggagaactggaggcagaagaagaagaccctgctggtggccattgaccgagcctgcccagaaagcggtcaccctcgagtcctggctgattcttttcctggcagttccccttatgagggttacaactatggctcctttgagaatgtttctggatctaccgatggtctggttgacagcgctggcactggggacctctcttacggttaccaggggcacgaccagttcaagcggcgcctcccctctggccagatgcggcagctgtgcattgccatgggccgctcctttgaacctgtaggtactcggccccgagtggactccatgagctctgtggaggaggatgactacgacacattgaccgacatcgattccgacaagaatgtcattcgcaccaagcaatacctctatgtggctgacctggcacggaaggacaagcgtgttctgcggaaaaagtaccagatctacttctggaacattgccaccattgctgtcttctatgcccttcctgtggtgcagctggtgatcacctaccagacggtggtgaatgtcacagggaatcaggacatctgctactacaacttcctctgcgcccacccactgggcaatctcagcgccttcaacaacatcctcagcaacctggggtacatcctgctggggctgcttttcctgctcatcatcctgcaacgggagatcaaccacaaccgggccctgctgcgcaatgacctctgtgccctggaatgtgggatccccaaacactttgggcttttctacgccatgggcacagccctgatgatggaggggctgctcagtgcttgctatcatgtgtgccccaactataccaatttccagtttgacacatcgttcatgtacatgatcgccggactctgcatgctgaagctctaccagaagcggcacccggacatcaacgccagcgcctacagtgcctacgcctgcctggccattgtcatcttcttctctgtgctgggcgtggtctttggcaaagggaacacggcgttctggatcgtcttctccatcattcacatcatcgccaccctgctcctcagcacgcagctctattacatgggccggtggaaactggactcggggatcttccgccgcatcctccacgtgctctacacagactgcatccggcagtgcagcgggccgctctacgtggaccgcatggtgctgctggtcatgggcaacgtcatcaactggtcgctggctgcctatgggcttatcatgcgccccaatgatttcgcttcctacttgttggccattggcatctgcaacctgctcctttacttcgccttctacatcatcatgaagctccggagtggggagaggatcaagctcatccccctgctctgcatcgtttgcacctccgtggtctggggcttcgcgctcttcttcttcttccagggactcagcacctggcagaaaacccctgcagagtcgagggagcacaaccgggactgcatcctcctcgacttctttgacgaccacgacatctggcacttcctctcctccatcgccatgttcgggtccttcctggtaagcgggcctcccggccgagccgggtgggtacgtgaaggtagcagctgcctccttctctgtggctga

SEQ ID NO: 181433 - DNA, 7606 bp, Homo sapiens
  Payload ID: 15734
  Gene Symbol: SDK1
  Gene Name: sidekick cell adhesion molecule 1
  ENST ID: ENST00000389531
  CDS Start-End: 1-6582
atggcccggggcgcccggccctcggcggccggtggcggcggcggcggcgcggagccccctgagcgcgcgggccccgggcggccgcggggatccccgcccggccgcgcccgcccctcgctggcgccgcgccccggcccggagccctcgcgaccccgggcggcgcccgagacctccggcggggacacggcgggcgcggggcggtgcggcgggcggcgggcggcaaagttggggccgggccgccgcggctggtgggcgctgctggcgctgcagctgcacttgctccgggcgctggcgcaagatgatgttgctccatattttaaaacggagccaggcctaccacagatccacctggaagggaaccgccttgttctcacctgccttgccgaagggagctggcctttggagttcaagtggatgcgcgatgacagtgagctcaccacctacagcagcgaatataagtacattattccatctttgcagaagctcgatgctgggttttaccgctgcgtggtgcgaaacagaatgggagcactcctgcaaagaaaatcagaagttcaagtcgcatatatgggaagtttcatggatacggaccagaggaaaacagtttctcaaggacgtgcagcgattctaaacctgctgcccatcaccagctaccccagacctcaagtgacttggtttagagaagggcacaagattattccaagcaacagaatagccatcacattggagaatcagctggtgatcctcgccaccacaaccagtgatgccggggcatactacgtgcaggccgtgaatgagaaaaatggagaaaacaagacaagcccattcattcatttgagcatagcaagagatgttggcacacctgaaaccatggccccaaccattgtggttcccccgggcaacagaagtgtggtggctggatccagtgagaccaccttggaatgtatagccagtgccaggcctgtggaggacctgagtgtgacctggaagaggaatggagtgagaatcaccagtggcctccacagctttggaagacgcctcaccatcagcaacccgacgtccgcggacaccgggccatacgtctgcgaggcggcgctgccggggagcgcttttgaaccggccagggcgacggcctttcttttcatcatagagccaccatattttactgctgagcccgagagtcggatttcagctgaagtagaagaaactgtggacatcggatgtcaagccatgggggtcccccttcccaccctccagtggtacaaggatgccatctccatcagcaggctccagaatcctcgatacaaagtgctcgccagcggaggcctgcgcatccagaagctgcgtccagaggactccggaatcttccagtgcttcgccagcaatgaaggaggggagatccagacccacacctacctggatgtaaccaatatcgctccagtgttcacccagcggccagtggacaccacagttactgacgggatgacagccattctaaggtgtgaggtgtccggggctcccaaacccgccatcacctggaaaagagaaaaccacattctggccagtggctctgtccggattcctaggttcatgcttcttgaatcggggggtctacagatcgcgcccgtcttcatccaggatgccggcaactacacctgctatgcggccaacacagagggctccctgaatgcatcggccacgctcactgtgtggaatcggacgtccatcgtccaccctcctgaggaccacgtggtgattaaggggaccacggccacgctgcactgtggtgccacacatgacccccgggtttcactccgctacgtttggaagaaggacaacgtggccctgactccatcgagcacgtctaggatcgtggtggagaaggacgggtcccttctcatcagccagacgtggtcaggcgacatcggtgactacagctgcgagattgtttctgaaggagggaatgactccaggatggcccggctggaagtgattgaactgcctcattcacctcagaacctcctggtcagccctaattcttcccacagccacgccgtggtgctctcttgggtccggccctttgatggaaacagtcctattctttattacatcgtggagctctctgaaaacaactctccatggaaggtgcatctgtcaaacgttggccctgagatgacaggcgtcaccgtgagtggcctgactccggctcgtacctatcaattccgggtgtgcgcggtgaatgaagtgggcaggggccagtacagcgccgagacaagcaggttgatgctacctgaagaaccacccagtgctcccccgaaaaatatagtggccagtgggcggactaatcagtccattatggtccagtggcagccacccccagaaacagagcacaacggggtgttgcgtggatacatcctcaggtaccgcctggctggccttcccggagagtaccagcagcggaacatcaccagcccggaggtgaactactgcctggtgacagacctgatcatctggacacagtatgagatacaggtggcggcgtacaacggggccggtctgggcgtcttcagcagggcagtgaccgagtacaccttgcagggagtgcccaccgcgcccccgcagaacgtgcagacggaagccgtgaactccaccaccattcagttcctgtggaaccctccgcctcagcagtttatcaatggcatcaaccagggatacaagcttctggcatggccggcagatgcccccgaggctgtcactgtggtcactattgccccagatttccacggagtccaccatggacacataacgaacctgaagaagtttaccgcctacttcacttccgttctgtgcttcaccacccctggggacgggcctcccagcacacctcagctggtctggactcaggaagacaaaccaggagctgtgggacatctgagtttcacagagatcttggacacatctctcaaggtcagctggcaggagcccctggagaaaaatggcatcattactggctatcagatctcttgggaagtgtacggcaggaacgactctcgtctcacgcacaccctgaacagcacgacgcacgagtacaagatccaaggcctctcatctctcaccacctacaccatcgacgtggccgctgtgactgccgtgggcactggcctggtgacttcatccaccatttcttctggagtgcccccagaccttcctggtgccccatccaacctggtcatttccaacatcagccctcgctccgccacccttcagttccggccaggctatgacgggaaaacgtccatctccaggtggattgttgaggggcaggtgggagctatcggcgacgaggaggagtgggtcaccctctatgaagaggagaatgagcctgatgcccagatgctggagatcccaaacctcacaccctacactcactacagatttcgaatgaagcaagtgaacattgttgggccgagcccctacagtccgtcttcccgggtcatccagaccctgcaggccccacccgacgtggctccaaccagcgtcacggtccgtactgccagtgagaccagcctgcggcttcgctgggtgcccctgccggattctcagtacaacgggaaccccgagtccgtgggctacaggattaagtactggcgctcagacctccagtcctcagcagtggcccaagtcgtcagtgaccggctggagagagaattcaccatcgaggagctggaggagtggatggaatacgagctgcagatgcaggccttcaacgccgtcggggctgggccgtggagcgaggtggtgcggggccggacgcgggagtcagttccttcagccgcccctgagaacgtgtcagccgaggctgtcagctcgacccagattttactgacatggacatccgtgccggaacaggaccagaatgggctcatactgggctacaagatcctgttccgggccaaagacctggatcccgagcccaggagccacatcgtgcgagggaaccacacgcagtcggccctgctggcaggcctgcgcaagttcgtgctctacgagctccaggtgctggcgttcacccgcatcgggaacggggtccccagcacgcccctcatcctggagcgcaccaaagacgatgccccaggcccaccagtgaggctcgtgttccccgaagtgagactcacctccgtgcggatagtgtggcaacctccggaggagcccaacggcatcatcctggggtaccagattgcctaccgcctggccagcagcagcccccacaccttcaccaccgtggaggtcggcgccacagtgaggcagttcacagccaccgacctggccccggagtccgcatacatcttcaggctgtccgccaagacgaggcagggctggggggagccactggaggccaccgtcatcaccaccgagaagagagagcggccggcaccccccagagagctcctggtgccccaggcagaagtgaccgcacgcagcctccggctccagtgggtcccgggcagcgacggggcctcccccatccggtacttcaccatgcaggtgcgagagctgcctcggggtgagtggcagacctactcctcgtccatcagccatgaggcgacagcatgcgtcgttgacagactgaggcccttcacctcctacaagctgcgcctgaaagccaccaacgacattggggacagtgacttcagttcagagacagaggcggtgaccacgctgcaggatgttccaggagagcccccgggatctgtctcagcgacgccacacaccacgtcctctgtcctgatacagtggcagcctccgagggacgaaagcctgaatggccttcttcagggatacaggatctactacagggagctggagtatgaagccgggtcaggcactgaggccaagacgctcaaaaaccctatagctttacatgctgagctcacagatttaaagaagtaccggcgctatgaagtaataatgaccgcctataacatcatcggcgagagcccagccagcgcgcccgtggaggtctttgtcggcgaggctgccccggccatggccccgcagaacgtgcaggtgaccccactcacggccagccagctggaggtcacgtgggacccaccacccccggagagccagaatgggaacatccaaggctacaagatttactactgggaggcagacagccagaacgaaacggagaaaatgaaggtcctcttcctccccgagcccgtggtgaggctgaagaacctgaccagccataccaagtacctggtcagcatatcagccttcaacgccgccggagatggacctaagagtgacccccagcaggggcgcacccaccaggccgcccctggggcccccagctttctggcgttctcagaaataacctccaccacgctcaacgtgtcctggggcgagcctgcggcggccaacggcatcctgcagggctatcgggtggtgtacgagcccttggcccctgtacaaggggtgagcaaggtggtgaccgtggaagtgagagggaactggcagcgctggctgaaggtgcgggacctcaccaagggagtgacctatttcttccgtgtccaagcgcggaccatcacctacgggcccgagctccaagccaatatcacagccgggccagccgagggatccccgggctcgcctagagatgtcctggtcaccaagtccgcctctgaactgacgctgcagtggactgagggacactctggcgacacacctaccacgggctatgtgatcgaggcccggccctcagatgaaggcttatgggacatgtttgtgaaggacatcccgcggagcgccacatcctacaccctcagcctggataagctccggcaaggagtgacttacgagttccgggtggtggctgtgaatgaggcgggctacggggagcccagcaacccctccacggctgtgtcagctcaagtggaagccccattctacgaggagtggtggttcctcctggtgatggctctgtccagcctgatcgtcatcctgctggtggtgttcgccctcgtcctgcacgggcagaataagaagtataagaactgcagcacaggaaaggggatctccaccatggaggagtctgtgaccctggacaacggaggatttgctgccctggagctcagcagccgccacctcaatgtcaagagcaccttctccaagaagaacgggaccaggtccccaccccggcctagccccggcggcctgcactactcagacgaggacatctgcaacaagtacaacggcgccgtgctgaccgagagcgtgagcctcaaggagaagtcggcagatgcatcagaatctgaggccacggactctgactacgaggacgcgctgcccaagcactccttcgtgaaccactacatgagcgaccccacctactacaactcatggaagcgcagggcccagggccgcgcacctgcgccgcacaggtacgaggcggtggcgggctccgaggcgggcgcgcagctgcacccggtcatcaccacgcagagcgcgggcggcgtctacacccccgctggccccggcgcgcgaactccgctcaccggcttctcctccttcgtgtgagcaaagcgccgcgcctccctcagggcggaacggaggcaactttccggagtctatttttgttaagacaatcaactccaataactgagctgaagtttttgtttaaaaagaaaaaaatctgataagtgatgattttacctacttgtggacactagatttcaattaggaaggtttttttaaacggctttttgtaacttcgctgcaggaagcaggtttgtttctttttcttttctttttaagagaaggtgtatttcactggtgcaatggcttggcacctccggggcctgggaggacctcagacctccccagccctgggtttctccgtcttcaagaccaactaggaagggtcaagcggggagagggagtggagggtcaggtgagatctcagagctgccccggccggcccccgtctctttctacctcctcttccagagaaccagcggctcacacccttctcaacgcaggacatcctcggcggctcctggggtttgaagagcaaacgtttttccctgggctcagtgcgttttgtcccaacttcatctgtttctgaaatgttctcacttggcagtgtctagtcaaggagtcggctttcaggttcctgacggccaggcagggatgctaaggtgtggctcagccgtcactgtctgtgtcactgcagtggtgcggtcctcaggcttttctgcctgtctttcccccttccttctcacctgacagcgagggagagggaagcctcttagggctggaagccaccacgctggccctctccttccccgaacacagcacacggtcaactccgcgggacacgaggacacgggacggcgtctccagaattgcttgttacgtaggaagcgtgcattgttaaccagagtatttttaaaatctttttatctttttttaaactatgtcacatgaaatgaatgcgtctttgctgtctccaggtgcctttttattaattgttcagctttgtacatgggaaagatgaaaagcaacagtgtctgcaaataaagcaaaacagctctgagaacac

SEQ ID NO: 181434 - DNA, 10397 bp, Homo sapiens
  Payload ID: 15734
  Gene Symbol: SDK1
  Gene Name: sidekick cell adhesion molecule 1
  Uniprot ID: Q7Z5N4
  ENST ID: ENST00000404826
  CDS Start-End: 140-6781
cctcagcgctgggcggccgctcacctcgggccggggggcgccgcgcctcccgcggagtggccgcgcccgctcggagccgtcccgcctgtcctgcccgcccgtccgtccggcgcggcgctcggggtggcggctgctcggcatggcccggggcgcccggccctcggcggccggtggcggcggcggcggcgcggagccccctgagcgcgcgggccccgggcggccgcggggatccccgcccggccgcgcccgcccctcgctggcgccgcgccccggcccggagccctcgcgaccccgggcggcgcccgagacctccggcggggacacggcgggcgcggggcggtgcggcgggcggcgggcggcaaagttggggccgggccgccgcggctggtgggcgctgctggcgctgcagctgcacttgctccgggcgctggcgcaagatgatgttgctccatattttaaaacggagccaggcctaccacagatccacctggaagggaaccgccttgttctcacctgccttgccgaagggagctggcctttggagttcaagtggatgcgcgatgacagtgagctcaccacctacagcagcgaatataagtacattattccatctttgcagaagctcgatgctgggttttaccgctgcgtggtgcgaaacagaatgggagcactcctgcaaagaaaatcagaagttcaagtcgcatatatgggaagtttcatggatacggaccagaggaaaacagtttctcaaggacgtgcagcgattctaaacctgctgcccatcaccagctaccccagacctcaagtgacttggtttagagaagggcacaagattattccaagcaacagaatagccatcacattggagaatcagctggtgatcctcgccaccacaaccagtgatgccggggcatactacgtgcaggccgtgaatgagaaaaatggagaaaacaagacaagcccattcattcatttgagcatagcaagagatgttggcacacctgaaaccatggccccaaccattgtggttcccccgggcaacagaagtgtggtggctggatccagtgagaccaccttggaatgtatagccagtgccaggcctgtggaggacctgagtgtgacctggaagaggaatggagtgagaatcaccagtggcctccacagctttggaagacgcctcaccatcagcaacccgacgtccgcggacaccgggccatacgtctgcgaggcggcgctgccggggagcgcttttgaaccggccagggcgacggcctttcttttcatcatagagccaccatattttactgctgagcccgagagtcggatttcagctgaagtagaagaaactgtggacatcggatgtcaagccatgggggtcccccttcccaccctccagtggtacaaggatgccatctccatcagcaggctccagaatcctcgatacaaagtgctcgccagcggaggcctgcgcatccagaagctgcgtccagaggactccggaatcttccagtgcttcgccagcaatgaaggaggggagatccagacccacacctacctggatgtaaccaatatcgctccagtgttcacccagcggccagtggacaccacagttactgacgggatgacagccattctaaggtgtgaggtgtccggggctcccaaacccgccatcacctggaaaagagaaaaccacattctggccagtggctctgtccggattcctaggttcatgcttcttgaatcggggggtctacagatcgcgcccgtcttcatccaggatgccggcaactacacctgctatgcggccaacacagagggctccctgaatgcatcggccacgctcactgtgtggaatcggacgtccatcgtccaccctcctgaggaccacgtggtgattaaggggaccacggccacgctgcactgtggtgccacacatgacccccgggtttcactccgctacgtttggaagaaggacaacgtggccctgactccatcgagcacgtctaggatcgtggtggagaaggacgggtcccttctcatcagccagacgtggtcaggcgacatcggtgactacagctgcgagattgtttctgaaggagggaatgactccaggatggcccggctggaagtgattgaactgcctcattcacctcagaacctcctggtcagccctaattcttcccacagccacgccgtggtgctctcttgggtccggccctttgatggaaacagtcctattctttattacatcgtggagctctctgaaaacaactctccatggaaggtgcatctgtcaaacgttggccctgagatgacaggcgtcaccgtgagtggcctgactccggctcgtacctatcaattccgggtgtgcgcggtgaatgaagtgggcaggggccagtacagcgccgagacaagcaggttgatgctacctgaagaaccacccagtgctcccccgaaaaatatagtggccagtgggcggactaatcagtccattatggtccagtggcagccacccccagaaacagagcacaacggggtgttgcgtggatacatcctcaggtaccgcctggctggccttcccggagagtaccagcagcggaacatcaccagcccggaggtgaactactgcctggtgacagacctgatcatctggacacagtatgagatacaggtggcggcgtacaacggggccggtctgggcgtcttcagcagggcagtgaccgagtacaccttgcagggagtgcccaccgcgcccccgcagaacgtgcagacggaagccgtgaactccaccaccattcagttcctgtggaaccctccgcctcagcagtttatcaatggcatcaaccagggatacaagcttctggcatggccggcagatgcccccgaggctgtcactgtggtcactattgccccagatttccacggagtccaccatggacacataacgaacctgaagaagtttaccgcctacttcacttccgttctgtgcttcaccacccctggggacgggcctcccagcacacctcagctggtctggactcaggaagacaaaccaggagctgtgggacatctgagtttcacagagatcttggacacatctctcaaggtcagctggcaggagcccctggagaaaaatggcatcattactggctatcagatctcttgggaagtgtacggcaggaacgactctcgtctcacgcacaccctgaacagcacgacgcacgagtacaagatccaaggcctctcatctctcaccacctacaccatcgacgtggccgctgtgactgccgtgggcactggcctggtgacttcatccaccatttcttctggagtgcccccagaccttcctggtgccccatccaacctggtcatttccaacatcagccctcgctccgccacccttcagttccggccaggctatgacgggaaaacgtccatctccaggtggattgttgaggggcaggtgggagctatcggcgacgaggaggagtgggtcaccctctatgaagaggagaatgagcctgatgcccagatgctggagatcccaaacctcacaccctacactcactacagatttcgaatgaagcaagtgaacattgttgggccgagcccctacagtccgtcttcccgggtcatccagaccctgcaggccccacccgacgtggctccaaccagcgtcacggtccgtactgccagtgagaccagcctgcggcttcgctgggtgcccctgccggattctcagtacaacgggaaccccgagtccgtgggctacaggattaagtactggcgctcagacctccagtcctcagcagtggcccaagtcgtcagtgaccggctggagagagaattcaccatcgaggagctggaggagtggatggaatacgagctgcagatgcaggccttcaacgccgtcggggctgggccgtggagcgaggtggtgcggggccggacgcgggagtcagttccttcagccgcccctgagaacgtgtcagccgaggctgtcagctcgacccagattttactgacatggacatccgtgccggaacaggaccagaatgggctcatactgggctacaagatcctgttccgggccaaagacctggatcccgagcccaggagccacatcgtgcgagggaaccacacgcagtcggccctgctggcaggcctgcgcaagttcgtgctctacgagctccaggtgctggcgttcacccgcatcgggaacggggtccccagcacgcccctcatcctggagcgcaccaaagacgatgccccaggcccaccagtgaggctcgtgttccccgaagtgagactcacctccgtgcggatagtgtggcaacctccggaggagcccaacggcatcatcctggggtaccagattgcctaccgcctggccagcagcagcccccacaccttcaccaccgtggaggtcggcgccacagtgaggcagttcacagccaccgacctggccccggagtccgcatacatcttcaggctgtccgccaagacgaggcagggctggggggagccactggaggccaccgtcatcaccaccgagaagagagagcggccggcaccccccagagagctcctggtgccccaggcagaagtgaccgcacgcagcctccggctccagtgggtcccgggcagcgacggggcctcccccatccggtacttcaccatgcaggtgcgagagctgcctcggggtgagtggcagacctactcctcgtccatcagccatgaggcgacagcatgcgtcgttgacagactgaggcccttcacctcctacaagctgcgcctgaaagccaccaacgacattggggacagtgacttcagttcagagacagaggcggtgaccacgctgcaggatgttccaggagagcccccgggatctgtctcagcgacgccacacaccacgtcctctgtcctgatacagtggcagcctccgagggacgaaagcctgaatggccttcttcagggatacaggatctactacagggagctggagtatgaagccgggtcaggcactgaggccaagacgctcaaaaaccctatagctttacatgctgagctcacagcccaaagcagcttcaagacggtgaacagcagctccacatcgacgatgtgtgaactaacacatttaaagaagtaccggcgctatgaagtaataatgaccgcctataacatcatcggcgagagcccagccagcgcgcccgtggaggtctttgtcggcgaggctgccccggccatggccccgcagaacgtgcaggtgaccccactcacggccagccagctggaggtcacgtgggacccaccacccccggagagccagaatgggaacatccaaggctacaagatttactactgggaggcagacagccagaacgaaacggagaaaatgaaggtcctcttcctccccgagcccgtggtgaggctgaagaacctgaccagccataccaagtacctggtcagcatatcagccttcaacgccgccggagatggacctaagagtgacccccagcaggggcgcacccaccaggccgcccctggggcccccagctttctggcgttctcagaaataacctccaccacgctcaacgtgtcctggggcgagcctgcggcggccaacggcatcctgcagggctatcgggtggtgtacgagcccttggcccctgtacaaggggtgagcaaggtggtgaccgtggaagtgagagggaactggcagcgctggctgaaggtgcgggacctcaccaagggagtgacctatttcttccgtgtccaagcgcggaccatcacctacgggcccgagctccaagccaatatcacagccgggccagccgagggatccccgggctcgcctagagatgtcctggtcaccaagtccgcctctgaactgacgctgcagtggactgagggacactctggcgacacacctaccacgggctatgtgatcgaggcccggccctcagatgaaggcttatgggacatgtttgtgaaggacatcccgcggagcgccacatcctacaccctcagcctggataagctccggcaaggagtgacttacgagttccgggtggtggctgtgaatgaggcgggctacggggagcccagcaacccctccacggctgtgtcagctcaagtggaagccccattctacgaggagtggtggttcctcctggtgatggctctgtccagcctgatcgtcatcctgctggtggtgttcgccctcgtcctgcacgggcagaataagaagtataagaactgcagcacaggaaaggggatctccaccatggaggagtctgtgaccctggacaacggaggatttgctgccctggagctcagcagccgccacctcaatgtcaagagcaccttctccaagaagaacgggaccaggtccccaccccggcctagccccggcggcctgcactactcagacgaggacatctgcaacaagtacaacggcgccgtgctgaccgagagcgtgagcctcaaggagaagtcggcagatgcatcagaatctgaggccacggactctgactacgaggacgcgctgcccaagcactccttcgtgaaccactacatgagcgaccccacctactacaactcatggaagcgcagggcccagggccgcgcacctgcgccgcacaggtacgaggcggtggcgggctccgaggcgggcgcgcagctgcacccggtcatcaccacgcagagcgcgggcggcgtctacacccccgctggccccggcgcgcgaactccgctcaccggcttctcctccttcgtgtgagcaaagcgccgcgcctccctcagggcggaacggaggcaactttccggagtctatttttgttaagacaatcaactccaataactgagctgaagtttttgtttaaaaagaaaaaaatctgataagtgatgattttacctacttgtggacactagatttcaattaggaaggtttttttaaacggctttttgtaacttcgctgcaggaagcaggtttgtttctttttcttttctttttaagagaaggtgtatttcactggtgcaatggcttggcacctccggggcctgggaggacctcagacctccccagccctgggtttctccgtcttcaagaccaactaggaagggtcaagcggggagagggagtggagggtcaggtgagatctcagagctgccccggccggcccccgtctctttctacctcctcttccagagaaccagcggctcacacccttctcaacgcaggacatcctcggcggctcctggggtttgaagagcaaacgtttttccctgggctcagtgcgttttgtcccaacttcatctgtttctgaaatgttctcacttggcagtgtctagtcaaggagtcggctttcaggttcctgacggccaggcagggatgctaaggtgtggctcagccgtcactgtctgtgtcactgcagtggtgcggtcctcaggcttttctgcctgtctttcccccttccttctcacctgacagcgagggagagggaagcctcttagggctggaagccaccacgctggccctctccttccccgaacacagcacacggtcaactccgcgggacacgaggacacgggacggcgtctccagaattgcttgttacgtaggaagcgtgcattgttaaccagagtatttttaaaatctttttatctttttttaaactatgtcacatgaaatgaatgcgtctttgctgtctccaggtgcctttttattaattgttcagctttgtacatgggaaagatgaaaagcaacagtgtctgcaaataaagcaaaacagctctgagaacacacgctcccgactcgcctcgtgcacaccaggccgtcccctccctctgtcctggcttctgctggctgctcgcagcagccaccgcttctccaccactggcgctgctgctgccccctctcccagtccgaggccagcttttagccttaacaggttttttggaaatgtttcttttttttatttaaaattgtcattgtttggtttaaatttttcagctagatgaaaagagtatgaactactttggaaaacttaacagctcagagatggccatgcctccagcccctcacgtcatctttgcaacagacgactgggctgccatggtccacccctcagcccgggtcccgggtctggatggaacgggagcactgctggtgcccactggcgtgtgtgccccgggtccctgtaagtgccccctcaccagcagcagcgtgacacacacaagactcaagaccaccctgtcagtgccccccagtgcacggcaaacgggcaggtgccgttcccccagtgacctgagggtaggggacaactgagcagtatctgaccagtgccacccaggagccagtctcctggccacatgcagaaagtgtggcccctgcttacctagatgttttgtgcacctccatgggcagagggtgtggatattgcctggattctgtgctgtcagcgttgctgagtatggccccaggagaccaaggagagttttgtataggctggaaaaccccttttcagtctttccaaaattagagggtatggcaagtttccttttttctctcctcccttccttcccctccttcctttcctttacccctcctttccttccttcctcccttcctctcttctttcctccctccctccctccttccctcccttccttcctctctttcctccttccttccctcccttctttccctccctcccttcctctctcccctattccttcttccttttctcctcctttttctgagtggagggggaaatattctaaaccaaaaatcctagatgctctgcccaaagccacttctgcatgagaatcgcaacccacagttccccggatgagactcaccacagtggacagtgccacctccttcccctcggccccggagagggcgaagtgggcgggaagccaggatgtgagcactggaatttcttggaagagaagcgataaatggagaccatggccagcgctgctttctgtgcactctgatgactgctctctgcagccatgaggatgtggctttacatgccagggagagtgttgagacgtcttaggttgaggatgagcagattcgagatatgtttgttgctctcgggttttcgatacaacatcatgacacttctgtttcaagctcatgttttccgtctcccctccactcttagtaaaccttgatctgtacggagcggcctgtccgaggctacgccggcctcctggctgctgctggactgtgcttaggacagcgcccatgcctcggagggactctgtcccatgagaaccacctgtgcaaaggaacagagctggatgtttccaggtagattttggcctcccagagcaatgcggcatttgagaagcaacagttcctaactccttatcttcagggaaggaaaagaaaatcacagcctaggaagatggaggttggattttaatctcggttttaaaaagaggacaaacaaaatgtctctaagccaggctagatggaatgtgctcccgctctctcctgccgtgctgaaagtcatgccttgcggatgcctcatgacagcagtggctgagtctccccacccacccccaacgtggctcatttcagattgcttcggccccaccctgcaaggatgtggtcacggagtggccaggaggctccgtctgagccacagggatgggtgtgcagagctccctcctcctggggtgccagggcagagattccaggcaggtgagcccagagagagctgccaggccacaccccctcggcctcctgcacggccaccttctgggtgaatcggtccagcccaagcccctctccccagcctcgccttcagcctctctcccagcctgcttttataaggcgcacttcactcaatgctgtagccaaaaaacgaggggccccagggagaggggacccagatggccacacacggaacgcgcctccacagccccgggaggtggctcactctgtacaggtcttcggaggccgtgtttgtatctaactgtgactgggctgaagcatgatgtttgcctaatggttcgtagcatggtttttatttcttacgcattcttggcacacagtgtagctatcctcctgacgagcaacccgtctgcgtacctaagtgtggctccccgtgggtcagcgtcctggtagcatggatccagtctgaaaggtgaggacaacgtggaaactcatgagctgagcctgcccgctgggacacgtctccttcccgcgtcaccttctggtttagggagccgtcaggtccctaaacgttccctacaactttttctgaaattgtgcagaaaaacagatctcattaaaagaaaaaaagaaacaacttgtaggaagacagagaggtgctatgggtacaatttttaataaaaacattattttgttccttaaa

SEQ ID NO: 181435 - DNA, 554 bp, Homo sapiens
  Payload ID: 15734
  Gene Symbol: SDK1
  Gene Name: sidekick cell adhesion molecule 1
  ENST ID: ENST00000426596
  CDS Start-End: 1-323
caggagatgttggcacacctgaaaccatggccccaaccattgtggttcccccgggcaacagaagtgtggtggctggatccagtgagaccaccttggaatgtatagccagtgccaggcctgtggaggacctgagtgtgacctggaagaggaatggagtgagaatcaccagtggcctccacagctttggaagacgcctcaccatcagcaacccgacgtccgcggacaccgggccatacgtctgcgaggcggcgctgccggggagcgcttttgaaccggccagggcgacggcctttcttttcatcataggtcccaccttgttttaaagatacagtcaatataggaggcatgccaagctatcttatccacattcaacacaattataatgaaagtaaaccagctctggaagacagttcccagaaattaattatcgcacagaaagtgaacacaacagccttttgttatcatgataatgaaatcaccaccaccttaatacttgacaaacttggccatgcctctgttgaatttctgctgaataaactggaaaaatgttgcaa

SEQ ID NO: 181436 - DNA, 10258 bp, Homo sapiens
  Payload ID: 15734
  Gene Symbol: SDK1
  Gene Name: sidekick cell adhesion molecule 1
  ENST ID: ENST00000615806
  CDS Start-End: 1-6642
atggcccggggcgcccggccctcggcggccggtggcggcggcggcggcgcggagccccctgagcgcgcgggccccgggcggccgcggggatccccgcccggccgcgcccgcccctcgctggcgccgcgccccggcccggagccctcgcgaccccgggcggcgcccgagacctccggcggggacacggcgggcgcggggcggtgcggcgggcggcgggcggcaaagttggggccgggccgccgcggctggtgggcgctgctggcgctgcagctgcacttgctccgggcgctggcgcaaggtaggtgcgccccatattttaaaacggagccaggcctaccacagatccacctggaagggaaccgccttgttctcacctgccttgccgaagggagctggcctttggagttcaagtggatgcgcgatgacagtgagctcaccacctacagcagcgaatataagtacattattccatctttgcagaagctcgatgctgggttttaccgctgcgtggtgcgaaacagaatgggagcactcctgcaaagaaaatcagaagttcaagtcgcatatatgggaagtttcatggatacggaccagaggaaaacagtttctcaaggacgtgcagcgattctaaacctgctgcccatcaccagctaccccagacctcaagtgacttggtttagagaagggcacaagattattccaagcaacagaatagccatcacattggagaatcagctggtgatcctcgccaccacaaccagtgatgccggggcatactacgtgcaggccgtgaatgagaaaaatggagaaaacaagacaagcccattcattcatttgagcatagcaagagatgttggcacacctgaaaccatggccccaaccattgtggttcccccgggcaacagaagtgtggtggctggatccagtgagaccaccttggaatgtatagccagtgccaggcctgtggaggacctgagtgtgacctggaagaggaatggagtgagaatcaccagtggcctccacagctttggaagacgcctcaccatcagcaacccgacgtccgcggacaccgggccatacgtctgcgaggcggcgctgccggggagcgcttttgaaccggccagggcgacggcctttcttttcatcatagagccaccatattttactgctgagcccgagagtcggatttcagctgaagtagaagaaactgtggacatcggatgtcaagccatgggggtcccccttcccaccctccagtggtacaaggatgccatctccatcagcaggctccagaatcctcgatacaaagtgctcgccagcggaggcctgcgcatccagaagctgcgtccagaggactccggaatcttccagtgcttcgccagcaatgaaggaggggagatccagacccacacctacctggatgtaaccaatatcgctccagtgttcacccagcggccagtggacaccacagttactgacgggatgacagccattctaaggtgtgaggtgtccggggctcccaaacccgccatcacctggaaaagagaaaaccacattctggccagtggctctgtccggattcctaggttcatgcttcttgaatcggggggtctacagatcgcgcccgtcttcatccaggatgccggcaactacacctgctatgcggccaacacagagggctccctgaatgcatcggccacgctcactgtgtggaatcggacgtccatcgtccaccctcctgaggaccacgtggtgattaaggggaccacggccacgctgcactgtggtgccacacatgacccccgggtttcactccgctacgtttggaagaaggacaacgtggccctgactccatcgagcacgtctaggatcgtggtggagaaggacgggtcccttctcatcagccagacgtggtcaggcgacatcggtgactacagctgcgagattgtttctgaaggagggaatgactccaggatggcccggctggaagtgattgaactgcctcattcacctcagaacctcctggtcagccctaattcttcccacagccacgccgtggtgctctcttgggtccggccctttgatggaaacagtcctattctttattacatcgtggagctctctgaaaacaactctccatggaaggtgcatctgtcaaacgttggccctgagatgacaggcgtcaccgtgagtggcctgactccggctcgtacctatcaattccgggtgtgcgcggtgaatgaagtgggcaggggccagtacagcgccgagacaagcaggttgatgctacctgaagaaccacccagtgctcccccgaaaaatatagtggccagtgggcggactaatcagtccattatggtccagtggcagccacccccagaaacagagcacaacggggtgttgcgtggatacatcctcaggtaccgcctggctggccttcccggagagtaccagcagcggaacatcaccagcccggaggtgaactactgcctggtgacagacctgatcatctggacacagtatgagatacaggtggcggcgtacaacggggccggtctgggcgtcttcagcagggcagtgaccgagtacaccttgcagggagtgcccaccgcgcccccgcagaacgtgcagacggaagccgtgaactccaccaccattcagttcctgtggaaccctccgcctcagcagtttatcaatggcatcaaccagggatacaagcttctggcatggccggcagatgcccccgaggctgtcactgtggtcactattgccccagatttccacggagtccaccatggacacataacgaacctgaagaagtttaccgcctacttcacttccgttctgtgcttcaccacccctggggacgggcctcccagcacacctcagctggtctggactcaggaagacaaaccaggagctgtgggacatctgagtttcacagagatcttggacacatctctcaaggtcagctggcaggagcccctggagaaaaatggcatcattactggctatcagatctcttgggaagtgtacggcaggaacgactctcgtctcacgcacaccctgaacagcacgacgcacgagtacaagatccaaggcctctcatctctcaccacctacaccatcgacgtggccgctgtgactgccgtgggcactggcctggtgacttcatccaccatttcttctggagtgcccccagaccttcctggtgccccatccaacctggtcatttccaacatcagccctcgctccgccacccttcagttccggccaggctatgacgggaaaacgtccatctccaggtggattgttgaggggcaggtgggagctatcggcgacgaggaggagtgggtcaccctctatgaagaggagaatgagcctgatgcccagatgctggagatcccaaacctcacaccctacactcactacagatttcgaatgaagcaagtgaacattgttgggccgagcccctacagtccgtcttcccgggtcatccagaccctgcaggccccacccgacgtggctccaaccagcgtcacggtccgtactgccagtgagaccagcctgcggcttcgctgggtgcccctgccggattctcagtacaacgggaaccccgagtccgtgggctacaggattaagtactggcgctcagacctccagtcctcagcagtggcccaagtcgtcagtgaccggctggagagagaattcaccatcgaggagctggaggagtggatggaatacgagctgcagatgcaggccttcaacgccgtcggggctgggccgtggagcgaggtggtgcggggccggacgcgggagtcagttccttcagccgcccctgagaacgtgtcagccgaggctgtcagctcgacccagattttactgacatggacatccgtgccggaacaggaccagaatgggctcatactgggctacaagatcctgttccgggccaaagacctggatcccgagcccaggagccacatcgtgcgagggaaccacacgcagtcggccctgctggcaggcctgcgcaagttcgtgctctacgagctccaggtgctggcgttcacccgcatcgggaacggggtccccagcacgcccctcatcctggagcgcaccaaagacgatgccccaggcccaccagtgaggctcgtgttccccgaagtgagactcacctccgtgcggatagtgtggcaacctccggaggagcccaacggcatcatcctggggtaccagattgcctaccgcctggccagcagcagcccccacaccttcaccaccgtggaggtcggcgccacagtgaggcagttcacagccaccgacctggccccggagtccgcatacatcttcaggctgtccgccaagacgaggcagggctggggggagccactggaggccaccgtcatcaccaccgagaagagagagcggccggcaccccccagagagctcctggtgccccaggcagaagtgaccgcacgcagcctccggctccagtgggtcccgggcagcgacggggcctcccccatccggtacttcaccatgcaggtgcgagagctgcctcggggtgagtggcagacctactcctcgtccatcagccatgaggcgacagcatgcgtcgttgacagactgaggcccttcacctcctacaagctgcgcctgaaagccaccaacgacattggggacagtgacttcagttcagagacagaggcggtgaccacgctgcaggatgttccaggagagcccccgggatctgtctcagcgacgccacacaccacgtcctctgtcctgatacagtggcagcctccgagggacgaaagcctgaatggccttcttcagggatacaggatctactacagggagctggagtatgaagccgggtcaggcactgaggccaagacgctcaaaaaccctatagctttacatgctgagctcacagcccaaagcagcttcaagacggtgaacagcagctccacatcgacgatgtgtgaactaacacatttaaagaagtaccggcgctatgaagtaataatgaccgcctataacatcatcggcgagagcccagccagcgcgcccgtggaggtctttgtcggcgaggctgccccggccatggccccgcagaacgtgcaggtgaccccactcacggccagccagctggaggtcacgtgggacccaccacccccggagagccagaatgggaacatccaaggctacaagatttactactgggaggcagacagccagaacgaaacggagaaaatgaaggtcctcttcctccccgagcccgtggtgaggctgaagaacctgaccagccataccaagtacctggtcagcatatcagccttcaacgccgccggagatggacctaagagtgacccccagcaggggcgcacccaccaggccgcccctggggcccccagctttctggcgttctcagaaataacctccaccacgctcaacgtgtcctggggcgagcctgcggcggccaacggcatcctgcagggctatcgggtggtgtacgagcccttggcccctgtacaaggggtgagcaaggtggtgaccgtggaagtgagagggaactggcagcgctggctgaaggtgcgggacctcaccaagggagtgacctatttcttccgtgtccaagcgcggaccatcacctacgggcccgagctccaagccaatatcacagccgggccagccgagggatccccgggctcgcctagagatgtcctggtcaccaagtccgcctctgaactgacgctgcagtggactgagggacactctggcgacacacctaccacgggctatgtgatcgaggcccggccctcagatgaaggcttatgggacatgtttgtgaaggacatcccgcggagcgccacatcctacaccctcagcctggataagctccggcaaggagtgacttacgagttccgggtggtggctgtgaatgaggcgggctacggggagcccagcaacccctccacggctgtgtcagctcaagtggaagccccattctacgaggagtggtggttcctcctggtgatggctctgtccagcctgatcgtcatcctgctggtggtgttcgccctcgtcctgcacgggcagaataagaagtataagaactgcagcacaggaaaggggatctccaccatggaggagtctgtgaccctggacaacggaggatttgctgccctggagctcagcagccgccacctcaatgtcaagagcaccttctccaagaagaacgggaccaggtccccaccccggcctagccccggcggcctgcactactcagacgaggacatctgcaacaagtacaacggcgccgtgctgaccgagagcgtgagcctcaaggagaagtcggcagatgcatcagaatctgaggccacggactctgactacgaggacgcgctgcccaagcactccttcgtgaaccactacatgagcgaccccacctactacaactcatggaagcgcagggcccagggccgcgcacctgcgccgcacaggtacgaggcggtggcgggctccgaggcgggcgcgcagctgcacccggtcatcaccacgcagagcgcgggcggcgtctacacccccgctggccccggcgcgcgaactccgctcaccggcttctcctccttcgtgtgagcaaagcgccgcgcctccctcagggcggaacggaggcaactttccggagtctatttttgttaagacaatcaactccaataactgagctgaagtttttgtttaaaaagaaaaaaatctgataagtgatgattttacctacttgtggacactagatttcaattaggaaggtttttttaaacggctttttgtaacttcgctgcaggaagcaggtttgtttctttttcttttctttttaagagaaggtgtatttcactggtgcaatggcttggcacctccggggcctgggaggacctcagacctccccagccctgggtttctccgtcttcaagaccaactaggaagggtcaagcggggagagggagtggagggtcaggtgagatctcagagctgccccggccggcccccgtctctttctacctcctcttccagagaaccagcggctcacacccttctcaacgcaggacatcctcggcggctcctggggtttgaagagcaaacgtttttccctgggctcagtgcgttttgtcccaacttcatctgtttctgaaatgttctcacttggcagtgtctagtcaaggagtcggctttcaggttcctgacggccaggcagggatgctaaggtgtggctcagccgtcactgtctgtgtcactgcagtggtgcggtcctcaggcttttctgcctgtctttcccccttccttctcacctgacagcgagggagagggaagcctcttagggctggaagccaccacgctggccctctccttccccgaacacagcacacggtcaactccgcgggacacgaggacacgggacggcgtctccagaattgcttgttacgtaggaagcgtgcattgttaaccagagtatttttaaaatctttttatctttttttaaactatgtcacatgaaatgaatgcgtctttgctgtctccaggtgcctttttattaattgttcagctttgtacatgggaaagatgaaaagcaacagtgtctgcaaataaagcaaaacagctctgagaacacacgctcccgactcgcctcgtgcacaccaggccgtcccctccctctgtcctggcttctgctggctgctcgcagcagccaccgcttctccaccactggcgctgctgctgccccctctcccagtccgaggccagcttttagccttaacaggttttttggaaatgtttcttttttttatttaaaattgtcattgtttggtttaaatttttcagctagatgaaaagagtatgaactactttggaaaacttaacagctcagagatggccatgcctccagcccctcacgtcatctttgcaacagacgactgggctgccatggtccacccctcagcccgggtcccgggtctggatggaacgggagcactgctggtgcccactggcgtgtgtgccccgggtccctgtaagtgccccctcaccagcagcagcgtgacacacacaagactcaagaccaccctgtcagtgccccccagtgcacggcaaacgggcaggtgccgttcccccagtgacctgagggtaggggacaactgagcagtatctgaccagtgccacccaggagccagtctcctggccacatgcagaaagtgtggcccctgcttacctagatgttttgtgcacctccatgggcagagggtgtggatattgcctggattctgtgctgtcagcgttgctgagtatggccccaggagaccaaggagagttttgtataggctggaaaaccccttttcagtctttccaaaattagagggtatggcaagtttccttttttctctcctcccttccttcccctccttcctttcctttacccctcctttccttccttcctcccttcctctcttctttcctccctccctccctccttccctcccttccttcctctctttcctccttccttccctcccttctttccctccctcccttcctctctcccctattccttcttccttttctcctcctttttctgagtggagggggaaatattctaaaccaaaaatcctagatgctctgcccaaagccacttctgcatgagaatcgcaacccacagttccccggatgagactcaccacagtggacagtgccacctccttcccctcggccccggagagggcgaagtgggcgggaagccaggatgtgagcactggaatttcttggaagagaagcgataaatggagaccatggccagcgctgctttctgtgcactctgatgactgctctctgcagccatgaggatgtggctttacatgccagggagagtgttgagacgtcttaggttgaggatgagcagattcgagatatgtttgttgctctcgggttttcgatacaacatcatgacacttctgtttcaagctcatgttttccgtctcccctccactcttagtaaaccttgatctgtacggagcggcctgtccgaggctacgccggcctcctggctgctgctggactgtgcttaggacagcgcccatgcctcggagggactctgtcccatgagaaccacctgtgcaaaggaacagagctggatgtttccaggtagattttggcctcccagagcaatgcggcatttgagaagcaacagttcctaactccttatcttcagggaaggaaaagaaaatcacagcctaggaagatggaggttggattttaatctcggttttaaaaagaggacaaacaaaatgtctctaagccaggctagatggaatgtgctcccgctctctcctgccgtgctgaaagtcatgccttgcggatgcctcatgacagcagtggctgagtctccccacccacccccaacgtggctcatttcagattgcttcggccccaccctgcaaggatgtggtcacggagtggccaggaggctccgtctgagccacagggatgggtgtgcagagctccctcctcctggggtgccagggcagagattccaggcaggtgagcccagagagagctgccaggccacaccccctcggcctcctgcacggccaccttctgggtgaatcggtccagcccaagcccctctccccagcctcgccttcagcctctctcccagcctgcttttataaggcgcacttcactcaatgctgtagccaaaaaacgaggggccccagggagaggggacccagatggccacacacggaacgcgcctccacagccccgggaggtggctcactctgtacaggtcttcggaggccgtgtttgtatctaactgtgactgggctgaagcatgatgtttgcctaatggttcgtagcatggtttttatttcttacgcattcttggcacacagtgtagctatcctcctgacgagcaacccgtctgcgtacctaagtgtggctccccgtgggtcagcgtcctggtagcatggatccagtctgaaaggtgaggacaacgtggaaactcatgagctgagcctgcccgctgggacacgtctccttcccgcgtcaccttctggtttagggagccgtcaggtccctaaacgttccctacaactttttctgaaattgtgcagaaaaacagatctcattaaaagaaaaaaagaaacaacttgtaggaagacagagaggtgctatgggtacaatttttaataaaaacattattttgttccttaaa

SEQ ID NO: 181437 - DNA, 10723 bp, Homo sapiens
  Payload ID: 15735
  Gene Symbol: SDK2
  Gene Name: sidekick cell adhesion molecule 2
  Uniprot ID: Q58EX2
  ENST ID: ENST00000392650
  CDS Start-End: 2-6520
catgtgggggcttttgatctggacactgctagctctgcatcagatccgcgcggccagagcccaagatgatgtgtccccgtatttcaagacagagcctgtgcggacacaggtgcacttggaaggaaaccgcctggtgcttacatgcatggccgagggcagctggccactggagttcaagtggctccacaacaacagggagctgaccaagttctccctggaatacagatacatgatcaccagcctggaccgcacccacgctggcttttaccgttgcatcgtgcggaaccgaatgggggccctgctgcagcggcaaaccgaggtccaggtggcctacatggggagctttgaggaaggtgagaagcaccagagcgtctcccacggagaagcagctgtcatccgtgccccgcgcatcgccagcttcccccagccacaggtgacctggttccgggacggccgcaagatcccgcccagcagccgcatagccatcacgctggagaacacccttgtcatcctgtcaacggtggcccctgacgcaggtcgctactatgtgcaggctgttaacgacaaaaacggggataacaagaccagccagcccatcacgctcaccgtggagaatgtaggggggcctgcagaccccatcgcacccaccatcatcatcccacctaaaaacaccagcgtggtggccggcacctcagaggttaccttggagtgtgtggccaatgccaggcccctgatcaagctacatatcatttggaagaaggacggggtattgctgtcgggcggcatcagtgaccacaaccgccggctcaccatccccaaccccaccggcagtgacgccggctactacgagtgtgaggctgtcctgcgcagcagcagcgtcccctctgttgtccggggcgcctacctctcagtgctggaaccgcctcagtttgtcaaggagccagaaagacacatcactgcggagatggagaaggtggtggacatcccctgtcaggccaaaggtgtgccgccgccctccatcacctggtacaaggacgcagccgtggtggaggtggagaagttgacccgcttccggcagcgcaacgacgggggcctgcagatcagcggcctggtgcccgatgataccggcatgttccagtgcttcgcccgcaatgcagccggcgaggtgcaaacttccacctacctggctgtcaccagcatcgcccctaacatcaccagaggccccctggacagcacggtgatcgatggcatgtcagtggtgctagcatgtgagacctcgggggcgccccgaccagctatcacttggcagaaaggggagcgcatcttggccagtggctctgtgcagctgcctcgcttcacacccctggagtcgggcagcctcctcatcagccccacacacatctccgatgcggggacctacacctgcctggccaccaactctcggggggtcgatgaggcctcagcagacctagtcgtttgggctcggacccgcatcaccaagcccccccaggatcagagtgtcatcaagggcacccaggcctccatggtgtgcggagtgacccacgacccccgagtaaccatcaggtacatctgggagaaggacggggccaccctgggcacggagagccatcctcgtatccgcctggacagaaacggctccctgcacatctcacagacgtggtcgggagacatcggcacgtacacctgccgggtgatctcagcaggaggcaacgactctcgcagtgcccacctgcgagtcaggcaactgccccacgcgcccgagcacccagtggccactctcagcaccgtggaaaggcgagccatcaacctgacgtggaccaagccctttgatggcaacagccccctgatccgctacattctggagatgtcggagaacaatgccccctggactgtactcctggccagtgtggaccccaaagctacctcagtgacagtcaagggcctggttcctgcacgctcctaccagttccgtctttgtgccgtcaacgacgtggggaaaggacagttcagcaaagacaccgagagggtctccctccccgaggagccccccacggcccctccacagaacgtcatcgccagcggtcgaaccaaccagtccatcatgatccagtggcagccgcctcctgagagccaccagaatggaattctcaagggttacatcatcaggtactgcctggccgggctgcccgtggggtaccagtttaagaacatcacggatgctgatgtgaacaacctgctgctggaggatctcatcatttggaccaactacgagatcgaggtggctgcttacaacagcgctgggctgggggtctacagcagtaaagtcaccgagtggacgctgcagggagttcccacggtccctccgggcaatgtgcacgcggaagccaccaattccacgaccatccgcttcacctggaacgcccccagcccccagttcatcaacggcatcaaccagggctacaagctgatcgcctgggagccggaacaggaagaggaggttaccatggtgaccgcccggcctaactttcaagacagcatccacgtgggcttcgtgtctggcctgaagaagttcaccgagtacttcacctcagtgctgtgtttcaccacccccggggacgggccacgcagcaccccgcagctggtgcgcacccatgaggatgtgcctgggcccgtgggacacctgagcttcagtgagatcctggacacatcgctgaaggtcagctggcaagagccgggagagaaaaatggcatcctcacagggtaccggatctcctgggaggagtacaatcgaaccaacacccgtgtgacccactacctgcccaacgtgaccctggagtaccgtgtcacgggcctcaccgcgctcaccacctacaccatcgaggtggccgccatgacctcaaagggccagggccaagtgtccgcctccaccatctcctctggggtgcccccagaactcccagggccccccaccaacctgggcatttccaacatcggcccccgctctgtgaccttgcagttcaggccaggctacgatgggaaaacctccatctcccgctggctggtggaagcccaggtaggcgtggttggggagggagaggagtggttgctgatccaccagctctccaatgagcccgatgcccgctccatggaggtgcccgacctcaaccccttcacctgctacagcttccgcatgcgccaggtgaacatcgtgggcaccagcccccccagtcagccttctagaaagatccagaccctgcaggcaccccctgacatggccccagccaatgtgtctctgcgcacagccagtgagaccagcctgtggctgcgctggatgcctctcccggagatggaatacaatgggaaccctgagtccgtgggctataagatcaagtacagccggtcagacgggcatggcaagacgctgagccacgtggtgcaggaccgtgtggagcgggactacaccatcgaggacctggaggagtggacagagtaccgcgtccaggtccaggccttcaacgccatcgggagcgggccctggagccagacggtggtgggcaggacccgggagtcagttccctcttccggccccaccaatgtgtctgcactggccaccacctccagcagcatgctggtgcgctggagcgaggtccccgaggctgatcgcaacgggctcgtgctgggctataaggtgatgtataaggagaaggactcggacacccagccccgattctggctggtggaaggcaactcgtctcgcagtgcccagctcaccggcttgggcaaatacgtgctctatgaagtccaggtgctggccttcacacgcatcggggacggcagccccagccaccctcccatcctggagcggacgctggatgatgtcccaggaccacccatgggcatcctgttcccagaggtgcggaccacgtctgtgcggctgatctggcagccccctgccgcccccaatggcatcattcttgcttaccagatcacacaccggctcaacaccaccacggccaacaccgccactgtggaggtgctggcacccagcgcccggcagtacacagccacgggcctcaagccagagtctgtctacctgttccgcatcacggcccagacccgcaagggctggggagaagctgccgaggccttggtggtgaccaccgagaagagagaccgtccgcagccccccagcaggccgatggtgcagcaggaggatgtgagagcacgcagcgtgctgctgtcctgggagccagggagcgacgggctctcccctgtgcgctactacaccatccagacccgcgagctgcccagcggcaggtgggcactgcactcggcctccgtgagccacaatgcctccagcttcattgtggacaggctgaagcccttcacgtcctacaagttccgagtgaaggcgaccaatgacattggcgacagcgagttcagcgaggagtcggagtcactgaccaccctgcaggctgcccccgatgaagcacccaccatcctctccgtgacgccccacaccaccacctccgtgctaatccgatggcagccgccagcagaggacaagatcaatggcatcctcctgggcttccggatccgataccgggagctgctctatgaaggactgaggggcttcacgcttcgaggcatcaacaacccaggggccacatgggctgagcttacctccatgtactccatgcggaacctgagccggcccagcctcacgcagtacgagctggacaacctgaacaagcacaggcggtacgagatacggatgagcgtgtacaacgctgtgggtgaggggccctccagccccccgcaggaggtctttgttggggaggcagtgcccacagcagcacctcgtaacgtggtcgtccacggcgccacggccacacagctggacgtgacttgggagccacctccgctggacagccagaatggagacatccaggggtacaagatttatttctgggaagcccagcgggggaacctcacagagcgagtgaagacgcttttcctggctgagaacagcgtgaagctcaagaacttgactggctacacggcctacatggtcagcgtggccgccttcaacgccgctggggatgggcctcggagcacccccacccaaggccagacccagcaagcagcccccagcgctcccagctcggtcaagttcagtgagctgaccacaacctcagtgaatgtgtcctgggaagccccgcagttccccaatggcatcctggagggctacaggctggtgtacgagccctgcagccccgtggatggagtcagcaagatcgtgaccgtggacgtgaaggggaacagccccctgtggctgaaggtgaaggacctggcggagggggtgacctacaggttccgcatcagagccaagaccttcacctacgggccggagatcgaagccaacgtcaccacgggccccggagaaggtgccccaggaccgcctggcgtgcccatcatcgtgcggtacagctctgccatcgccattcactggtccagcggagacccgggcaaagggcccatcacccgctacgtcatcgaggccagaccttcagacgagggactatgggacatcctcatcaaagacatccccaaggaggtgagctcctacacgttcagcatggacatcctgaagccgggcgtgagctatgacttccgggtcatcgcggtcaacgactatggtttcggcacccccagcagcccctcccagtctgtgccagcccagaaagccaaccccttctatgaggagtggtggttcttggtggtcattgccctggtcggcctcatcttcatcctgcttctggtcttcgtgctcatcatccggggccagagcaagaagtacgccaagaagacagactcggggaacagtgccaagtctggagccctaggccacagcgagatgatgagcttggatgaaagcagcttccctgccctggaactcaacaacaggcggctctccgtcaagaactctttctgccgaaagaacggcctgtacaccaggtctccccccaggcccagcccaggcagcctgcactactcggatgaggatgtcaccaaatacaacgacctcatccctgcagagagcagcagcctgacggagaagccctcagaaatctccgactctcagggaagtgacagcgagtacgaggtcgactcaaaccaccagaaggcccactcctttgtcaaccactacatcagtgaccccacatactacaactcgtggcggcgacagcagaagggcatctcgagggcacaggcctacagctacacggagagcgactcgggtgagccagaccacaccaccgtcaccaacagcaccagcacccagcagggcagcctctttcggcccaaggccagtcggactccaacgccccagaacccccctaaccccccaagtcagcagagcaccctctaccgtccccccagcagcctggccccaggctcccgggctcccatagcaggattttcatcatttgtttgacatcagaagaggaaaaagcagaaagagaaatggcaccaaactcctccttcacccctcctctcactgcctgccagaaaacaaaaacaccaagaaaccaagtcaacttttcacctcctgagtttatttttccagagattccagggccagcaaagccggcgttcagaaggagggagaaaaccgtgagaggatgtgtgtggccagcagctcttcagctttgagatggtggggttcactgctcccttgggaattacacggagctggggaagtggctgtgtcactgctatggacacggagtggggcgggcatctggagagagagagggagcggaggctaaggactggaggccgccaggcaggcgtggccgagggaagaaaaagcttctggatgtccagccagctgcccccttccagcccctccaggacccctggacccactgccgctgctctctgcaaaaagaatgggcatcccggaggccacgcctatcttctctctctgctcctccttccctccatgcaccatcactgtggctggcaggcatcggacagcctcatccagaccccctgccctgtcttggcaacctctactgcccatctcccctgctcaacttctccaccaagcatttggtttatttagaaaaaggaagaaaaacaaaaaacaaaaaactaaagggtgagaatttgcttagcgccttccttgttcctgcatattttttaaaatattgaatccaaggaagagagcccaagggtaggggagaaaccccccacaactgacccctgcctccctgtgctggaattgactttcctgagcatggacaaggaaaggtgaagtctggggagcagaggtgtaaataaggcgactggccttggcactgtgggatgattaggtttaacgcattgtgggcaagataagaatgacactttgactgttctctttcttccaatccaggttccatccgtcctctctttaaaggggtagtcagcttcccaaggctggggagtggggcacagctgagggatctccctctgggcagacacgtcactctccactggatagatcctcaccacacacacacacacacacacatctcccatgcacttacaaggaacagggtctagggatcctctccagaacaaactcatctgggccctcctagccagacagcacactcactttcagatctgtgtccctctcactgccacccggcagcctcctaagcacagaggcacaggagcccagaggggtggcccaagtccctggtccagaggctggaatacccagagtttgctcagtcagcctagcacccagtttacaggcaaaaaggcaaagacaccctaacccccagtaacagcttccaggctgggctccgcctggccagggcggggaggggaaggggcaggtcaggaagctcagtccaaagtggacccagcatttgaattgcacgcccagcaggggcaggtcagatgggaccaagtgacaagaatagctgatgggagggaatgcttttacacacacacacacacacacacacacacatacacatacacaatctgctccaaggagtgttctgcaaaaagccacatccagtggccaggatcttcccgtccacttggtacttacggatgccagggtttagggagaagcctttctatctaactccatacattgtccaaggccctctgtgccctcagccagccctgtaaggccagcccaacacctgccccaccgctgagatgggtggcagatggcccacaggggcctgtctgattcagcgtgagccccttcgtggagcagggctccctctgtgcactgtgtacaggcgctgctggccctgcccaagagatgatgctctgttggggtgggtgagcagagttcaaggaagcccaagtaggagatttgggaaacatgccaaggtaagagagagcctggaccactctcctacagccccaagtcagtcactgtgctaatggtgaccgggaagggaagtcagggtctggggcccaaagaacgggcacacccagccatgagtttttcctgaagcacttgacccctgggaaatgtgaacggggagatgctggaagatggctcagcagacaggccagcccagctccagtgtccaaaaagcggtttctccaataaggaggcctgggaagggaagcacaatcttccccaaaggagaaccaagggctgaggttctgcccctccaggaagtaaggtgctctcggggcctccttggacttgtctgggggctgcagtggagtcagctggacacctgctccacccctgccacctccgcccccaccctctgcagcatctggcatctccatggcagcacatctgcagctgccggcctgtgatcgtgccgcacagctttcttttctttcctctcatcttttttttttttttttttttaaataacttcatccctttccctctctgctgagcatttaaccatttaaggaagttcccagtttgcattagggaattatttaagcccagcccagtgagggattatttgggaggaagcaggagtgagtaaaaacattgtgtctgtgtatatattgcacatgaggtcaattttcctttgcctttaatgaatcacctggtgcactaagatattccacccccccactccccacacgctcattcgcacccatgctgacacctacgtgtacatgcgggatggtgcccatgcacgcctgtgcttacacacatgcacacacaaatatgcacagaacacacatctgtatgtgtgttagcaaagagactcctgaactccctctgatggctgaagccatctctcccctgtgaggcacaggtggcctgggttgcttgcacttggggcgtggctgggatctattgtctgagagggtgaggacaccacgcaaatttagacaagcccatgagatcaggctgggcccatggtgaaagtcccacacttagtcaatacccactcatctggaatattgtctccacagccccagccacagctggaagcccaggcctgcagctgtggaactctagattttttcaggacacgtctctttgcccttgtttacatatctactggcacagccgaggctcccaaccgtcctcccagaaacctggccacattagaaaggggtggtgggccctgccctttgtagaaagagtgggaccctttctggcctgtgattttccgtgccagtgatgccagggcccctgcctgtgggactccacccaaagcaggttcacaccaggacacacctggcacctttggcattgcctccttgtgccctaagcaatctcccagtgttgcacccaggagcccatgctgggcacaccagggctttccccttcctggctgcgcctccagagttgacgtcagctccacacccacactgccaagacaaaccaaaaagatgctctgggctccagaaccaccatcctcctagggctccagagagtttgcaaacccaggctgcctccccttctgtccatccctcaccccccggcccccaaaactcctacccccaaacctggcactgccgtgatttagaggaaacaaggacacagcgggggctgcccccacctggtgcacgctgcctcaaggccttctgttgctgcccacgcctccctgggcagtgcttctaaaggtgccagagcctcaccacagtgccactctggctgggcaggggcttccctcagcttcccagagtgcacatctgaaggtgcctaccctgggtgaggggctggtgggcaggaaggtaaaggggagaccatctgagcagccgccacccgctccccagtgcctctgtatggccctatccagggacacccatgggcatgcgcacatggcaatcctgaccaccacctgagcacaggtgccccctcgggaccaccccccttctctttgtttccatcagaataaccaaaagcatttaaacgtgttacctttctccatccatctagactccagaaacaaaaatcaacacaaatctttattttttgatttaaaagatataacaaaaaattatggggagagtattcattatggcaggtgtctgtctgtaagaaaaaaatatatatctctatgtcatatagcgtgttagcaggtttattttttaaatgaaaggtaagaaagaaattgatttgaaatatataccacaagaagtcccgtgtcctgtcaaactgtcagtattttataaataaacttttttttttgga

SEQ ID NO: 181438 - DNA, 4638 bp, Homo sapiens
  Payload ID: 15735
  Gene Symbol: SDK2
  Gene Name: sidekick cell adhesion molecule 2
  ENST ID: ENST00000424778
  CDS Start-End: 1-3990
cagggctacaagctgatcgcctgggagccggaacaggaagaggaggttaccatggtgaccgcccggcctaactttcaagacagcatccacgtgggcttcgtgtctggcctgaagaagttcaccgagtacttcacctcagtgctgtgtttcaccacccccggggacgggccacgcagcaccccgcagctggtgcgcacccatgaggatgtgcctgggcccgtgggacacctgagcttcagtgagatcctggacacatcgctgaaggtcagctggcaagagccgggagagaaaaatggcatcctcacagggtaccggatctcctgggaggagtacaatcgaaccaacacccgtgtgacccactacctgcccaacgtgaccctggagtaccgtgtcacgggcctcaccgcgctcaccacctacaccatcgaggtggccgccatgacctcaaagggccagggccaagtgtccgcctccaccatctcctctggggtgcccccagaactcccagggccccccaccaacctgggcatttccaacatcggcccccgctctgtgaccttgcagttcaggccaggctacgatgggaaaacctccatctcccgctggctggtggaagcccaggtaggcgtggttggggagggagaggagtggttgctgatccaccagctctccaatgagcccgatgcccgctccatggaggtgcccgacctcaaccccttcacctgctacagcttccgcatgcgccaggtgaacatcgtgggcaccagcccccccagtcagccttctagaaagatccagaccctgcaggcaccccctgacatggccccagccaatgtgtctctgcgcacagccagtgagaccagcctgtggctgcgctggatgcctctcccggagatggaatacaatgggaaccctgagtccgtgggctataagatcaagtacagccggtcagacgggcatggcaagacgctgagccacgtggtgcaggaccgtgtggagcgggactacaccatcgaggacctggaggagtggacagagtaccgcgtccaggtccaggccttcaacgccatcgggagcgggccctggagccagacggtggtgggcaggacccgggagtcagttccctcttccggccccaccaatgtgtctgcactggccaccacctccagcagcatgctggtgcgctggagcgaggtccccgaggctgatcgcaacgggctcgtgctgggctataaggtgatgtataaggagaaggactcggacacccagccccgattctggctggtggaaggcaactcgtctcgcagtgcccagctcaccggcttgggcaaatacgtgctctatgaagtccaggtgctggccttcacacgcatcggggacggcagccccagccaccctcccatcctggagcggacgctggatgatgtcccaggaccacccatgggcatcctgttcccagaggtgcggaccacgtctgtgcggctgatctggcagccccctgccgcccccaatggcatcattcttgcttaccagatcacacaccggctcaacaccaccacggccaacaccgccactgtggaggtgctggcacccagcgcccggcagtacacagccacgggcctcaagccagagtctgtctacctgttccgcatcacggcccagacccgcaagggctggggagaagctgccgaggccttggtggtgaccaccgagaagagagaccgtccgcagccccccagcaggccgatggtgcagcaggaggatgtgagagcacgcagcgtgctgctgtcctgggagccagggagcgacgggctctcccctgtgcgctactacaccatccagacccgcgagctgcccagcggcaggtgggcactgcactcggcctccgtgagccacaatgcctccagcttcattgtggacaggctgaagcccttcacgtcctacaagttccgagtgaaggcgaccaatgacattggcgacagcgagttcagcgaggagtcggagtcactgaccaccctgcaggctgcccccgatgaagcacccaccatcctctccgtgacgccccacaccaccacctccgtgctaatccgatggcagccgccagcagaggacaagatcaatggcatcctcctgggcttccggatccgataccgggagctgctctatgaaggactgaggggcttcacgcttcgaggcatcaacaacccaggggccacatgggctgagcttacctacctgaacaagcacaggcggtacgagatacggatgagcgtgtacaacgctgtgggtgaggggccctccagccccccgcaggaggtctttgttggggaggcagtgcccacagcagcacctcgtaacgtggtcgtccacggcgccacggccacacagctggacgtgacttgggagccacctccgctggacagccagaatggagacatccaggggtacaagatttatttctgggaagcccagcgggggaacctcacagagcgagtgaagacgcttttcctggctgagaacagcgtgaagctcaagaacttgactggctacacggcctacatggtcagcgtggccgccttcaacgccgctggggatgggcctcggagcacccccacccaaggccagacccagcaagcagcccccagcgctcccagctcggtcaagttcagtgagctgaccacaacctcagtgaatgtgtcctgggaagccccgcagttccccaatggcatcctggagggctacaggctggtgtacgagccctgcagccccgtggatggagtcagcaagatcgtgaccgtggacgtgaaggggaacagccccctgtggctgaaggtgaaggacctggcggagggggtgacctacaggttccgcatcagagccaagaccttcacctacgggccggagatcgaagccaacgtcaccacgggccccggagaaggtgccccaggaccgcctggcgtgcccatcatcgtgcggtacagctctgccatcgccattcactggtccagcggagacccgggcaaagggcccatcacccgctacgtcatcgaggccagaccttcagacgagggactatgggacatcctcatcaaagacatccccaaggaggtgagctcctacacgttcagcatggacatcctgaagccgggcgtgagctatgacttccgggtcatcgcggtcaacgactatggtttcggcacccccagcagcccctcccagtctgtgccagcccagaaagccaaccccttctatgaggagtggtggttcttggtggtcattgccctggtcggcctcatcttcatcctgcttctggtcttcgtgctcatcatccggggccagagcaagaagtacgccaagaagacagactcggggaacagtgccaagtctggagccctaggccacagcgagatgatgagcttggatgaaagcagcttccctgccctggaactcaacaacaggcggctctccgtcaagaactctttctgccgaaagaacggcctgtacaccaggtctccccccaggcccagcccaggcagcctgcactactcggatgaggatgtcaccaaatacaacgacctcatccctgcagagagcagcagcctgacggagaagccctcagaaatctccgactctcagggaagtgacagcgagtacgaggtcgactcaaaccaccagaaggcccactcctttgtcaaccactacatcagtgaccccacatactacaactcgtggcggcgacagcagaagggcatctcgagggcacaggcctacagctacacggagagcgactcgggtgagccagaccacaccaccgtcaccaacagcaccagcacccagcagggcagcctctttcggcccaaggccagtcggactccaacgccccagaacccccctaaccccccaagtcagcagagcaccctctaccgtccccccagcagcctggccccaggctcccgggctcccatagcaggattttcatcatttgtttgacatcagaagaggaaaaagcagaaagagaaatggcaccaaactcctccttcacccctcctctcactgcctgccagaaaacaaaaacaccaagaaaccaagtcaacttttcacctcctgagtttatttttccagagattccagggccagcaaagccggcgttcagaaggagggagaaaaccgtgagaggatgtgtgtggccagcagctcttcagctttgagatggtggggttcactgctcccttgggaattacacggagctggggaagtggctgtgtcactgctatggacacggagtggggcgggcatctggagagagagagggagcggaggctaaggactggaggccgccaggcaggcgtggccgagggaagaaaaagcttctggatgtccagccagctgcccccttccagcccctccaggacccctggacccactgccgctgctctctgcaaaaagaatgggcatcccggaggccacgcctatcttctctctctgctcctccttccctccatgcaccatcactgtggctggcaggcatcggacagcctcatccagaccccctgccctgtcttggcaacctctactgcccatctcccctgctcaacttctccaccaagcatttggtttatttagaaaaaggaagaaaaa

SEQ ID NO: 181439 - DNA, 4231 bp, Homo sapiens
  Payload ID: 15736
  Gene Symbol: SFXN1
  Gene Name: sideroflexin 1
  Uniprot ID: Q9H9B4
  ENST ID: ENST00000321442
  CDS Start-End: 255-1223
ggcgcggtcgctaagccagaagcggagtcgcgggcgcggggcggggcctggacccgggcctggacccggagggcgggtccctgggcctcgtagctcccgggcccggacgcgcgctcacaggcgcgcgcgaggacgcgctccggggacgcgcgaggacgccgtggcgggagaagcgtttccggtggcggcggaggctgcactgagcgggacctgcgagcagcgcgggcggcagcccgggggaagcgtccgggaccatgtctggagaactaccaccaaacattaacatcaaggaacctcgatgggatcaaagcactttcattggacgagccaatcatttcttcactgtaactgaccccaggaacattctgttaaccaacgaacaactcgagagtgcgagaaaaatagtacatgattacaggcaaggaattgttcctcctggtcttacagaaaatgaattgtggagagcaaagtacatctatgattcagcttttcatcctgacactggtgagaagatgattttgataggaagaatgtcagcccaggttcccatgaacatgaccatcacaggttgtatgatgacgttttacaggactacgccggctgtgctgttctggcagtggattaaccagtccttcaatgccgtcgtcaattacaccaacagaagtggagacgcacccctcactgtcaatgagttgggaacagcttacgtttctgcaacaactggtgccgtagcaacagctctaggactcaatgcattgaccaagcatgtctcaccactgataggacgttttgttccctttgctgccgtagctgctgctaattgcattaatattccattaatgaggcaaagggaactcaaagttggcattcccgtcacggatgagaatgggaaccgcttgggggagtcggcgaacgctgcgaaacaagccatcacgcaagttgtcgtgtccaggattctcatggcagcccctggcatggccatccctccattcattatgaacactttggaaaagaaagcctttttgaagaggttcccatggatgagtgcacccattcaagttgggttagttggcttctgtttggtgtttgctacacccctgtgttgtgccctgtttcctcagaaaagttccatgtctgtgacaagcttggaggccgagttgcaagctaagatccaagagagccatcctgaattgcgacgcgtgtacttcaataagggattgtaaagcagggaggaaacctctgcagctcattctgccactgcaaagctggtgtagccatgctggtgagaaaaatcctgttcaacctgggttctcccagttacggaaaccttttaaagatccacattagccttttagaataaagctgctactttaacagagcacctggcgtgggccaagtgcctgatactcccttacactgaatcatgttatgatttatagaaatacctttcctgtagcttttatagtcattgtttttcaaagacgatataccagccctcacccaggttttaaaaaagcactggtaggcatagaataggtgctcagtatatggtcagtaaatgttctattgattatcaatcagtgaaaaaagaaatctgtttaaaatactgaattttcatctcactcccattgcaaatcaaggagatctcagcagtgaactgggaaaatacaaaagctctgggctaatctataaaaacttaccctgaaatattaagggcagtttgcttctagtttggggattgcgctagcccaatgaaggtgatgaagcttttggatttggagggtaaaagctccttcacaccccttccaaaagtcagtcacagaccactgcaacatgccttccctgctggatcattatatacattcagattgtgagtggattgccttggttgacttttaatttattgttttttgttcttataaagatgataatcttaccttgcagttattgactttatattcaattatttacatcaaataatgaaataactgaaatgtacaaatgtcaaattttggaagtatattcaataccaatgctgtatgagtgggctgaatccagttcattgttttttttttggtaagaagtgagactacagttccagctacctacatgtcttttcttgtcatccttatagatctctttggctttcagaaagatacagtgataatgtgtgtatgaatcagtcacaatgaattttacttgaatattgtatgttgcattccacttcatttgaaaataatgaaaccatgtaccactgtttacatcatctgtagtgatttcatagataatatatttaatatgacagattatgtttcaactctgtagatgtttaacgtcatagacagttggccctctgtatccgtgagctctatatctgtgaattcaaccaagtttggatggaaaattttttttttttttttttttttgagacggagtctcgctctgtcacccaggctggagtgcagtggcgtagtctcggctcactgcaagctccgcctcccgggttcacgccgttctcctgcctcagcctctctgagaagctgggactacaggcgcccgccaccacgcccggctaatttttttgtatttttagtagagacggggtttcactgtggtctcgatctcctgacctcgtgatccgcccgccttggcctcccaaggtgctgggattacaagcgtgagccaccgcacccggcctgaaaatattttctaaaaagataaaaaatatacataacgatgaaaaataatacaaatttaaaaaccaatacagtataacaactatttacatagtgcttacattgtattaggtgttataagcaatctagagatgatttagcaagtatacaggaggatgtgcctaggttatatgcaaatactgtgccattttatatcaggaacttgagcatctgcagatattggtatcggagggcggtcctggaaccaagcatccacggatactgaggggtgacatttcatgaagtgtagatcattgtattcagagattgtaaatgaaaaaaatatagaaactatttagttttggtagattttttttctgacaatgtgaccagactgaatttcctcataaagaaaaaatggcgtgccttgtgtctgtgtttctcttttctctgaaaggattaatagatctgaagctttgggccactcagagccttccttgatgctgccagagtcttcttatttagattttctgtcttaaaccattggaagcaaaacggttttcccatgacattctggccttggacagattctgttgtcctcgacgcgtctctttataaagtggtaaaagcctgaaattcagggcagctctccatgaggtgctgaagggctcttttcataagaagctaaggcactgctgcctgccccaggtgtcccgctcctctcagagtcctccccctaccaggtagtgtgtagctccatttcagaatgttaacctccagtgaagagctaatgactggttagaagattgacaaactaaccaaaattttacacactccggttatgtgtgtgaaaggttataaaaggaatggccgggtgcggtggctcacccctgtaatcccagcactttgggaggccgaggcgggtggatcacctgaggtcaggagtttgagaccagcctggccaacatggagaaaccccgcctctactaaaaatacaaaaaattagccaggcatggaggcacatgcctataatcccagctactcgggaggctgaggtaggagaatcgcttgaatccgggagctggaggttgcagtgagccaagatcgcaccattgcactccagcctgggcaacaagagcgaaactccatctcaaaaaaaaaaaaaagagattataaaagggatgatgaacatggagctgcatctttttaaacgttgttttttgatgcttcagactcttaatgcttttatataaagctatcaactgtatgttgatcacagtttataagaaagaacaaatcaagattggcaatccttgccgatcttttagaaataccttttctggagaaaaaaaaatccacatgaagtgcaataagcttataaagctaagtagttattaatatttctattaacatgatacaaaggatgatgattgtaagtgtttactgactggcagcttttatttcagtattagcacagcgtcttgccagtgttggaggccatgtattatttcagttcaactggatgaaatgttaaataaactcagaatgaaaataaa

SEQ ID NO: 181440 - DNA, 572 bp, Homo sapiens
  Payload ID: 15736
  Gene Symbol: SFXN1
  Gene Name: sideroflexin 1
  ENST ID: ENST00000507017
  CDS Start-End: 139-572
ctcactctatcacctaggttggagtgcagtggcacaatctcagccgactgcaacctccacatcccaggctccagcaatcctgctacctcagcctcctgagtagctgggaccatacgccaccatgcccagtccgggaccatgtctggagaactaccaccaaacattaacatcaaggaacctcgatgggatcaaagcactttcattggacgagccaatcatttcttcactgtaactgaccccaggaacattctgttaaccaacgaacaactcgagagtgcgagaaaaatagtacatgattacaggcaaggaattgttcctcctggtcttacagaaaatgaattgtggagagcaaagtacatctatgattcagcttttcatcctgacactggtgagaagatgattttgataggaagaatgtcagcccaggttcccatgaacatgaccatcacaggttgtatgatgacgttttacaggactacgccggctgtgctgttctggcagtggattaaccagtccttcaatgccgtcgtcaattacaccaacagaagtggagacgcacccctcactgtcaa

SEQ ID NO: 181441 - DNA, 796 bp, Homo sapiens
  Payload ID: 15736
  Gene Symbol: SFXN1
  Gene Name: sideroflexin 1
  ENST ID: ENST00000506963
  CDS Start-End: 216-796
cactgagcgggacctgcgagcagcgcgggcggcagcccgggggaagcgaggcatggtcttgctttgtcacccaggctggagtgcagcggcatgatgatagctcactacagctccaactcttgggctcaagcgatccccacaccccactgccacctcagcctcctgagtagctgcaactataggcgtgcaccaccatgcccggataatccgggaccatgtctggagaactaccaccaaacattaacatcaaggaacctcgatgggatcaaagcactttcattggacgagccaatcatttcttcactgtaactgaccccaggaacattctgttaaccaacgaacaactcgagagtgcgagaaaaatagtacatgattacaggcaaggaattgttcctcctggtcttacagaaaatgaattgtggagagcaaagtacatctatgattcagcttttcatcctgacactggtgagaagatgattttgataggaagaatgtcagcccaggttcccatgaacatgaccatcacaggttgtatgatgacgttttacaggactacgccggctgtgctgttctggcagtggattaaccagtccttcaatgccgtcgtcaattacaccaacagaagtggagacgcacccctcactgtcaatgagttgggaacagcttacgtttctgcaacaactggtgccgtagcaacagctctaggactcaatgcattgaccaagcatgtctcaccactgataggacgttttgttccctttgctgccgtagctgctgctaattgcattaatattcc

SEQ ID NO: 181442 - DNA, 2611 bp, Homo sapiens
  Payload ID: 15736
  Gene Symbol: SFXN1
  Gene Name: sideroflexin 1
  ENST ID: ENST00000507823
  CDS Start-End: 88-258
tgcactgagcgggacctgcgagcagcgcgggcggcagcccgggggaagcggtgagtcgcgggcggcaggcccagccagtccgggaccatgtctggagaactaccaccaaacattaacatcaaggaacctcgatgggatcaaagcactttcattggacgagccaatcatttcttcactgtaactgaccccaggaacattctgttaaccaacgaacaactcgagagtgcgagaaaaatagtacatgattacagaaaatgaattgtggagagcaaagtacatctatgattcagcttttcatcctgacactggtgagaagatgattttgataggaagaatgtcagcccaggttcccatgaacatgaccatcacaggttgtatgatgacgttttacaggactacgccggctgtgctgttctggcagtggattaaccagtccttcaatgccgtcgtcaattacaccaacagaagtggagacgcacccctcactgtcaatgagttgggaacagcttacgtttctgcaacaactggtgccgtagcaacagctctaggactcaatgcattgaccaagcatgtctcaccactgataggacgttttgttccctttgctgccgtagctgctgctaattgcattaatattccattaatgaggcaaagggaactcaaagttggcattcccgtcacggatgagaatgggaaccgcttgggggagtcggcgaacgctgcgaaacaagccatcacgcaagttgtcgtgtccaggattctcatggcagcccctggcatggccatccctccattcattatgaacactttggaaaagaaagcctttttgaagaggttcccatggatgagtgcacccattcaagttgggttagttggcttctgtttggtgtttgctacacccctgtgttgtgccctgtttcctcagaaaaggtatgtatttgttattcgtcagaatcatcatgagtattaatcctaaaaaccaattgaaggtgcaggtgccattattccatttcattggcagggaagttgagactcaaaagatactgaagccagggtctcttaaaaggaagggatggaggcagaaatcaaacccacatctgtctaatttcagatgcacccagctcttttctacccccttccattaaatttgaaaatgctttattcttttgtgagaatcagattaactctgatgcaaatttgcttttatgaaaatttaaaatatggtccaatccactggcaaatgcatctgtaatacagatatgataggatgcaagttccacccccagggacagcaattatatgcacttagcttaggtggttggtatatttgcttcctttcttcccacttagttttttgccttaaaagctttcttgtgcacgcctctcatcgcaaactgcccttgaatcctgcctttgatgtgagaacaggactaactggcgttaaatcggcattttctacatcaggtctccagcctgctcttgacctgactccaacacacaaagcagcggcattttgttgtctgtcattttctgtaagtgttaccaggccccttgccttggtaataccctttcctttgtgggccagtaggtcccgaacatatggtctttaatcccccagccttgcggagttggttttggatgaggtgttctgttctagaactaatgctgtcagatccctctacctgatcgagaactccaccttgtatctgctctcccactctgtctccgaccctgctgttcttgaatagaaatttaaacctcatggacaggagcccttcatcaccttggagcctactgaagagccccccttgaagagggcaggaccttcagaacttgctctgggagcctgattcagatgaatttcctcatctctacagtgggataatgatacctgcttaattgtacaaaccccagagtcttggggctcaacctgagaatgtccatttctgtagtatgtggcttatgaacactggtgttcagcagctggccttgatttagcagtttagactttgagcacataaaatgccaaggggtgtgcctgataccaagttgtaaaacacctaagaaatgtagctgtaattattttcagattgaaagggttttagatttgaaaacccatagagaaactttctactttggccttttttctttgagtgctgcaagaaataaaatatagcccaacatttattttttatgattcattgaaactctaggggtagaaatggaaagctttctgtaactactagtgtccttaggtcaaggccctcagaaagcgtgtggttttacatttgagaaaccaatcctcttttgttttactgtattttaaaatagcttcttactctgttttgttgtttatacattgtatgtttggcttcttgaggtctctggctcctcagtttttccttggctcataacatagtatcctcattgatccaagcatgaccctgttttgcttatttttattttacttatactaataatataatgaatatccacaaattcagtgcccaatgaggcaggagaatcgctcgaacccagtaggcagaggctgtggtgagccaagatcacgctactgcattccagcctgggcaacagtgcgagattctgtctc

SEQ ID NO: 181443 - DNA, 641 bp, Homo sapiens
  Payload ID: 15736
  Gene Symbol: SFXN1
  Gene Name: sideroflexin 1
  ENST ID: ENST00000502865
  CDS Start-End: 1-68
ggaacattctgttaaccaacgaacaactcgagagtgcgagaaaaatagtacatgattacagaaaatgaattgtggagagcaaagtacatctatgattcagcttttcatcctgacactggtgagaagatgattttgataggaagaatgtcagcccaggttcccatgaacatgaccatcacaggttgtatgatgacgttttacaggactacgccggctgtgctgttctggcagtggattaaccagtccttcaatgccgtcgtcaattacaccaacagaagtggagacgcacccctcactgtcaatgagttgggaacagcttacgtttctgcaacaactggtgccgtagcaacagctctaggactcaatgcattgaccaagcatgtctcaccactgataggacgttttgttccctttgctgccgtagctgctgctaattgcattaatattccattaatgaggcaaagggaactcaaagttggcattcccgtcacggatgagaatgggaaccgcttgggggagtcggcgaacgctgcgaaacaagccatcacgcaagttgtcgtgtccaggattctcatggcagcccctggcatggccatccctccattcattatgaacactttggaaaagaaagcctttttgaa

SEQ ID NO: 181444 - DNA, 637 bp, Homo sapiens
  Payload ID: 15736
  Gene Symbol: SFXN1
  Gene Name: sideroflexin 1
  ENST ID: ENST00000502393
  CDS Start-End: 75-608
ggtggcggcggaggctgcactgagcgggacctgcgagcagcgcgggcggcagcccgggggaagcgtccgggaccatgtctggagaactaccaccaaacattaacatcaaggaacctcgatgggatcaaagcactttcattggacgagccaatcatttcttcactgtaactgaccccaggaacattctgttaaccaacgaacaactcgagagtgcgagaaaaatagtacatgattacaggcaaggaattgttcctcctggtcttacagaaaatgaattgtggagagcaaagtacatctatgattcagcttttcatcctgacactggtgagaagatgattttgataggaagaatgtcagcccaggttcccatgaacatgaccatcacaggttgtatgatgacgttttacaggactacgccggctgtgctgttctggcagtggattaaccagtccttcaatgccgtcgtcaattacaccaacagaagtggagacgcacccctcactgtcaatgagttgggaacagcttacgtttctgcaacaactggtgccgtagcaacagctctaggactcaatgcattgaccaaggtactcagatttttatttccataataaagctgtttaatttgttatcacctgcc

SEQ ID NO: 181445 - DNA, 6866 bp, Homo sapiens
  Payload ID: 15737
  Gene Symbol: SFXN2
  Gene Name: sideroflexin 2
  Uniprot ID: Q96NB2
  ENST ID: ENST00000369893
  CDS Start-End: 168-1136
ggcgggagcctcccggcctgggattggtcgaaaaggaggggcgtggggcgggcgtgggggcagttccccagcccaggtcctcctctcacccgggccagttttcaaggcgggctgtaactggtggcatttgtcccgggaccaggtccacagttttatgtgtgagcaagatggaggctgacctgtctggctttaacatcgatgccccccgttgggaccagcgcaccttcctggggagagtgaagcacttcctaaacatcacggacccccgcactgtctttgtatctgagcgggagctggactgggccaaggtgatggtggagaagagcaggatgggggttgtgcccccaggcacccaagtggagcagctgctgtatgccaagaagctgtatgactcggccttccaccccgacactggggagaagatgaatgtcatcgggcgcatgtctttccagcttcctggcggcatgatcatcacgggcttcatgctccagttctacaggacgatgccggcggtgatcttctggcagtgggtgaaccagtccttcaatgccttagtcaactacaccaacaggaatgcggcttcccccacatcagtcaggcagatggccctttcctacttcacagccacaaccactgctgtggccacggctgtgggcatgaacatgttgacaaagaaagcgccgcccttggtgggccgctgggtgccctttgccgctgtggctgcggctaactgtgtcaatatccccatgatgcgacagcaggagctcataaagggaatctgcgtgaaggacaggaatgaaaatgagattggtcattcccggagagctgcggccataggcatcacccaagtagttatttctcggatcaccatgtcagctcctgggatgatcttgctgccagtcatcatggaaaggcttgagaaattgcacttcatgcagaaagtcaaggtcctgcacgccccattgcaggtcatgctgagcgggtgcttcctcatcttcatggtgccagtggcgtgtgggcttttcccacagaaatgtgaattgccagtttcctatctggaaccgaagctccaagacactatcaaggccaagtatggagaacttgagccttatgtctacttcaataagggtctctaaatgccccacttcagcaaggaccagtctattcccatattcaccagctcctccttagctacgtgcacacttgtgtcctccttcccctttgccaacaaggcctgaaggccagggtagattggggggtgggacaatgaatgcctcatacttacaccctggtactggttgattggacctcaggggaaaaaagtgaaaaagggtagcaaaggccaatgtcttctagctgcttcctcaacccctgtcccctggagaccagaagctgaggccctctcagggaggagacatccaagcaaatcatttggaaaagttaggaaacctttaggattctggttccagccagggttgaggaaaagaccttggatcaaaaggaagcttctatacctctttcttcttcgcttcctcctctcccaagcaatggaaacttttacccatgtaattctagctgaactcaggaaaaagaagggggaaaggactctgtccccttggggctcatcacccttccacatcctcctcctcgttgccccctggtcaggcagcttcttttttttttttttcaagatggagtcttgctctgtcgcccaggctggaatgcagtggcgcgatctcggctcactgcaaactctgcctcctggattcaagcgattctcctgcctcagcctctcaagtagctgggattacagggcacctgccaccacgcctggctaatttttgtattttagtggagacggggtttcaccatgctggccagactggtctcgaactcctgacctcaggtgatccgcccgcctcagcctctgaaattgctgggattacaggcatgagccaccacacccagcccggacagcttctttgggagtgctgctaaccttgaaattatcagacacttaggagttattagtgctaaaaaggggaccgtgcaaggcagcagagttacatggttcttcaaatcatgtctgaacctattcttggaatcttctctataataagggaagttctcttaccccactgccacatacctctgttttaaaagataagtccactaactgtgagtaaaaatgatatatataggcattaaccacacactttaatgggtataatttcctggctgcctcccttcctcagcccattaggttaaacaccaaagaaagactggtgtgtactgaataggaaagggaagttttatttggaaccttctaagaggaaatcaaccaggaccaaagagccttaaaggacacacagcaatgcacagccacttcccttccccagcttggctgccctaggtgatttctcaagctccttgggggactgttgtttctcatctggaatcaatgtgtgtatgagttttgtctggtaggattgctgactctgtccaacagatatcactgtgaattgaataaatttgttgaaagagcacacaggcacacatacacacaaactgtaaactaagttaatgaagcctgaatggaaagcaggatctggccttactttggccttggcatgtcagaaggtatcacaactactatataaggggaacttgtctgatgcctggaggctgttgtttatttccctcattaaaggggaaatccacctgtctccacaggaagctccagatctcccagaatgggagctgtgttgccctagagcaagagttggcaagctatggctcaaggggccaaatccacctgccacctgtttttgtgcaattggaagctaagaatgtttttacatttttaaagagttgtaaaagggaacaacaggaatgacagagaccctacctatgtggcatacaaagcctaaaatatttactgtctgatccttgacacaaaaagtttcccctgccctggagcagtggttcttaagcacatgcatcaaccgggcgcagtggctcatgcctgtaatccccacactttgggaggccgaggcaggtggatcacctgaggtcaggagttcgagaccagcctgatcaacatggtgaaacccgatctctactaaaaatacaaaaaatttgctgggtgtggtggcatacacctgtaatcccagctactcggggggctgagactggagaatcacttgaacctgggaggtggaggttgtggtgagccaagattgcgccactgcactccaacctgggcgactccgtctcaaaaaaaaaaaagaaaacacatcagaattagctggcaggcttgttaaagcacagattgcaggatccattgccagattctgtcactctgggctggagcctgagaacgtgcatttctagtcattgcccggtgatgctgattctgttggtcttggcaccatacgtggaggagcactgctctaaggggaaagggcctcctccccgaggccaaggaattcactgcaacttgatttttctccccgtttaaaaaagttaaaatataactcacataccataaacttagtccttttaaagtgtacaattcagtggtttttaatgtagtcacaaagttgtacaagcatcaccactaattccagaattattttgagacaggatctcactctgttaccctggttggagtgcagtagtgcaatcactgctcattgcagcctcaacctcctgagctcaagtaatcctcctgcctcagcctctggggtagctgggaccacaggctaatttgatttttttgatgaggtctcactatgttgccccaggctggtctcgaactcatggcctcaagtgatcctcctccctcagccttccaaagtgttggaattacacacatgagccactgcatctggtctcagaacatttttcttagccccaaaagaaaccccatacccattggcagtcactccacattctccctacctgccagcgcctcacaattcacttcctgtctttagagatttgcgtattctgaacatttcatgtaagtggagtaatgcagtatgtggccctctgtgtctggtttctttccttaggataatgttttcaaggttcatccatgttgtagcatatgcaatttgattttagctggtgtctgaacagaaaagtctgtctttgagctagcttctttaggacaggagacctggctttatttccaaaagcaaataggaaaagggaaacattaccagagccagtagagcttggaaacaactcctgactgatgttctttcagaacatacaatgtttccccttccttctcagctcctcaagcctcttggatttcctgttctcttatagacaactgctcttttggaaatgtctggaaggtatgtggtggctataatgttcagggacattctaaaaagtggtcactcaaactgcatctcagtctcattttgtaacatctctcttctttgagttggctgctgtgggatgttgaataagaggcagttaaggttactaaaaggccttggtgtgggaagtgctaatccagactgtcctatccaatagctcagcttgagctttcaggtaaaaggagaaagggaagttggggcaaaatcccctgtgtttgccaaactgaattggggtttcttatttattgagagaaagagggtatcactttcttgcccaggctggagtgcaatggtatgatcatgactcattgcttcctcagcctcctggactcaagtgatcctcctgccttagcctcccgagtagcttctttttcctgagttcggctagaatagcatgggtaaaaggttccattgctcgggagaggaggaggaagggaagaagaagaggtatagaagcttccttttgatccaaggtcttttcctcaatcctggctagaaccagaatcctaaaggtttcctgactacaggtacatgccaccatgcccagctaatttttaaattttttgtagacagagggcctcactatgtttcccaggttggtcttgaacccctgacctcaagcaatcctcatgccttggcctcccaaagtgttgggattacaggcgtgagccactacatcccacctggggtttcttagtgatgatgaaacctagcctttatgtggaagacttacaactttttgaggccaggaattagagaccttgtgccatgaaaataatttggtccttccctagtactcaatttttacttctcctctaaggagcttgacttgtggaatggataaatttctaagaaacgagagattggcaaaaatacgtgtcactttttatagtacttggaaaagcaggatcaagataaaggcagaactatggactttcttaagctgagggaagactgacttaactcttacctgtttcccatttttccaacacttaagccaagaacaacttcctctgggctcagatgtgggctagactgggccaggctgtaaaacactttgacaggtttttgagaggaaattgactgctaaagtcaactgtgttatttgccatgggtcttcctttgtccatttattttaccaacttttttttttcttttttttttgagacagagtctcactctgtcacctagggtggagtgcagtggcacagtcttggctcactgcaacctctgcctcccaggttcaagcgattcttctgctttagcctcctgagtagctgggactacaggcatgcaccaccacgcctggctaattttttgtatttttagtagagattgggtttcacaatgttggccaggctcgaactcctgaccatgtgatccgcccacctcggcctcccaaagtgctgggattacaggcaggagccaccgcacctggcctttttttttttttgagacagggtctcactctgttgcccaggctggagtacagtggcacaatcaaggctcattgcagcttcaatctccctagctctggtgattgtcccacctcagcctcccaagtagctgggactacaagtgtgcaccaccatgcttggctaatttggctaatttagtttttttatttttgtagagacagggttctctccatgttgcccaggctggtttcaaactcctgagctcaagggatctacctgcctcagcctcccaaagggctaggattataagcatgagccaccacacctggctattttaccaacattgatcaagctctggttgagccttgtacaggatattataggctttaaaagaagaagaagaaagacctggtatgctgtacaaaaaactgcaaaccaggcacgcagatataagtgttacaagaatccagaagaagcagcaaggagatggggctaggagtttgtaagcagggaactgtatctgtaatatgtaaatgaagttactgggcatctcttcaatggtcagtgtgagtggaatgtgtgggaaaatgtagtggtgagaggtgagataaagagaagtagacagggacgaagtcacagagaggaccgtgttgggaagtttggactctctattctgtaggtagatgaagtatttaaaagaagaggccatgatatagtaatatttggtttaatgtggtatggttgtagtgtgtggcggaaatttgagaggaagaattgtcaacttgcagggcagcagggaagccatttgtatttagctagaagaacatggattgaagcaatggatgatggatttcagagcaatttgtgaagtagaaccagaattttgtccgtcgaacttggggtgacgaagcactatgcctcagataaaggtactatcttctagggaattcaaacggacctaagctgctatttgggcagttgagaccaagagaggcatcctggtaatagtgctgtgcttcaagacaaaagacattaaaatatttttacattgcaa

SEQ ID NO: 181446 - DNA, 606 bp, Homo sapiens
  Payload ID: 15737
  Gene Symbol: SFXN2
  Gene Name: sideroflexin 2
  ENST ID: ENST00000602544
  CDS Start-End: 77-415
gggccagttttcaaggcgggctgtaactggtggcatttgtcccgggaccaggtccacagttttatgtgtgagcaagatggaggctgacctgtctggctttaacatcgatgccccccgttgggaccagcgcaccttcctggggagagtgaagcacttcctaaacatcacggacccccgcactgtctttgtatctgagcgggagctggactgggccaaggtgatggtggagaagagcaggatgggggttgtgcccccaggcacccaagtggagcagctgctgtatgccaagaagctgtatgactcggccttccaccccgacactggggagaagatgaatgtcatcgggcgcatgtctttccagcttcctggcggcatgatcatcacgggcttcatgctccagttctacagctattgagctgggctttgggccgggtgttgggaatgtgaaggcttcagtaacctcccgtcaaggagctcccagttttgttgaggagaccaagaagtaaacagttacagtacagcttggacgatgccggcggtgatcttctggcagtgggtgaaccagtccttcaatgccttagtcaactacaccaacaggaatgcggc

SEQ ID NO: 181447 - DNA, 2324 bp, Homo sapiens
  Payload ID: 15737
  Gene Symbol: SFXN2
  Gene Name: sideroflexin 2
  ENST ID: ENST00000459894
  CDS Start-End: 79-639
agttttcaaggcgggctgtaactggtggcatttgtcccgggaccagtatgccttgtaatttttcactgaaagctggacatgatgtaccctgtgagaggaactgaggggtccacagttttatgtgtgagcaagatggaggctgacctgtctggctttaacatcgatgccccccgttgggaccagcgcaccttcctggggagagtgaagcacttcctaaacatcacggacccccgcactgtctttgtatctgagcgggagctggactgggccaaggtgatggtggagaagagcaggatgggggttgtgcccccaggcacccaagtggagcagctgctgtatgccaagaagctgtatgactcggccttccaccccgacactggggagaagatgaatgtcatcgggcgcatgtctttccagcttcctggcggcatgatcatcacgggcttcatgctccagttctacaggacgatgccggcggtgatcttctggcagtgggtgaaccagtccttcaatgccttagtcaactacaccaacaggaatgcggcttcccccacatcagtcagaaagcgccgcccttggtgggccgctgggtgccctttgccgctgtggctgcggctaactgtgtcaatatccccatgatgcgacagcatcttgctgccagtcatcatggaaaggcttgagaaattgcacttcatgcagaaagtcaaggtcctgcacgccccattgcaggtcatgctgagcgggtgcttcctcatcttcatggtgccagtggcgtgtgggcttttcccacagaaatgtgaattgccagtttcctatctggaaccgaagctccaagacactatcaaggccaagtatggagaacttgagccttatgtctacttcaataagggtctctaaatgccccacttcagcaaggaccagtctattcccatattcaccagctcctccttagctacgtgcacacttgtgtcctccttcccctttgccaacaaggcctgaaggccagggtagattggggggtgggacaatgaatgcctcatacttacaccctggtactggttgattggacctcaggggaaaaaagtgaaaaagggtagcaaaggccaatgtcttctagctgcttcctcaacccctgtcccctggagaccagaagctgaggccctctcagggaggagacatccaagcaaatcatttggaaaagttaggaaacctttaggattctggttccagccagggttgaggaaaagaccttggatcaaaaggaagcttctatacctctttcttcttcgcttcctcctctcccaagcaatggaaacttttacccatgtaattctagctgaactcaggaaaaagaagggggaaaggactctgtccccttggggctcatcacccttccacatcctcctcctcgttgccccctggtcaggcagcttcttttttttttttttcaagatggagtcttgctctgtcgcccaggctggaatgcagtggcgcgatctcggctcactgcaaactctgcctcctggattcaagcgattctcctgcctcagcctctcaagtagctgggattacagggcacctgccaccacgcctggctaatttttgtattttagtggagacggggtttcaccatgctggccagactggtctcgaactcctgacctcaggtgatccgcccgcctcagcctctgaaattgctgggattacaggcatgagccaccacacccagcccggacagcttctttgggagtgctgctaaccttgaaattatcagacacttaggagttattagtgctaaaaaggggaccgtgcaaggcagcagagttacatggttcttcaaatcatgtctgaacctattcttggaatcttctctataataagggaagttctcttaccccactgccacatacctctgttttaaaagataagtccactaactgtgagtaaaaatgatatatataggcattaaccacacactttaatgggtataatttcctggctgcctcccttcctcagcccattaggttaaacaccaaagaaagactggtgtgtactgaataggaaagggaagttttatttggaaccttctaagaggaaatcaaccaggaccaaagagccttaaaggacacacagcaatgcacagccacttcccttccccagcttggctgccctaggtgatttctcaagctccttgggggactgttgtttctcatctggaatcaatgtgtgtatgagttttgtctggtaggattgctgactctgtccaacagatatcactgtgaattgaataaatttgttgaaagagcacacaggcacacatacac

SEQ ID NO: 181448 - DNA, 574 bp, Homo sapiens
  Payload ID: 15737
  Gene Symbol: SFXN2
  Gene Name: sideroflexin 2
  ENST ID: ENST00000602670
  CDS Start-End: 168-371
ttttcaaggcgggctgtaactggtggcatttgtcccgggaccaggctggagtgcaacggtgcgatctcggctcatcacaacctccacctctcgggttcaaacgattctcctgccttagcctcccaagtagctgggattacaggtccacagttttatgtgtgagcaagatggaggctgacctgtctggctttaacatcgatgccccccgttgggaccagcgcaccttcctggggagagtgaagcacttcctaaacatcacggacccccgcactgtctttgtatctgagcgggagctggactgggccaaggatgggggttgtgcccccaggcacccaagtggagcagctgctgtatgccaagaagctgtatgactcggccttccaccccgacactggggagaagatgaatgtcatcgggcgcatgtctttccagcttcctggcggcatgatcatcacgggcttcatgctccagttctacagctattgagctgggctttgggccgggtgttgggaatgtgaaggcttcagtaacctcccgtcaaggagctcccagttttgttgaggagaccaagaag

SEQ ID NO: 181449 - DNA, 642 bp, Homo sapiens
  Payload ID: 15737
  Gene Symbol: SFXN2
  Gene Name: sideroflexin 2
  ENST ID: ENST00000602868
  CDS Start-End: 138-642
acgatgcccagtagctggtgagagcaggcagtctgcaacagtgggacgtgctcaggtcctctgtggtgggctttgatttaggggacagtcatcttcttcctttgtcccttaggtccacagttttatgtgtgagcaagatggaggctgacctgtctggctttaacatcgatgccccccgttgggaccagcgcaccttcctggggagagtgaagcacttcctaaacatcacggacccccgcactgtctttgtatctgagcgggagctggactgggccaaggtgatggtggagaagagcaggatgggggttgtgcccccaggcacccaagtggagcagctgctgtatgccaagaagctgtatgactcggccttccaccccgacactggggagaagatgaatgtcatcgggcgcatgtctttccagcttcctggcggcatgatcatcacgggcttcatgctccagttctacaggacgatgccggcggtgatcttctggcagtgggtgaaccagtccttcaatgccttagtcaactacaccaacaggaatgcggcttcccccacatcagtcaggcagatggccctttcctacttcacagccacaaccactgctgtggccacggctgtgggcatgaacatgttgacaa

SEQ ID NO: 181450 - DNA, 583 bp, Homo sapiens
  Payload ID: 15737
  Gene Symbol: SFXN2
  Gene Name: sideroflexin 2
  ENST ID: ENST00000602647
  CDS Start-End: 527-583
cagttttcaaggcgggctgtaactggtggcatttgtcccgggaccaggtaaggggccttgggacaatggcgctcgccctgtctacctccaatccccacatctcgggtgggtgctgagattgctgtcctgactgcccaggcggggctgcagcgcgggctggacttccacctgcagaagccacgtggcgcgaagtgcgccctggggctgcagatgggcccctctgctctgacccccattgcctaggagtgccaggccgagcggctggggcgttacgagctgtccgggatgggggagtaccgatggggggaggccgtctgtcggagggcaagaagcagcctgggggctggccctgagccctgaggctggagtgcaacggtgcgatctcggctcatcacaacctccacctctcgggttcaaacgattctcctgccttagcctcccaagtagctgggattacaggcaggttctaagtttgacttaaaagaggtgacatccttgatgccaagagacccaagaagaagttggaatgcatttcaggtccacagttttatgtgtgagcaagatggaggctgacctgtctggc

SEQ ID NO: 181451 - DNA, 2315 bp, Homo sapiens
  Payload ID: 15737
  Gene Symbol: SFXN2
  Gene Name: sideroflexin 2
  ENST ID: ENST00000480358
  CDS Start-End: 204-665
acccgggccagttttcaaggcgggctgtaactggtggcatttgtcccgggaccagatggagtttcactcttattgcccaggctggagtgcaacggtgcgatctcggctcatcacaacctccacctctcgggttcaaacgattctcctgccttagcctcccaagtagctgggattacaggtccacagttttatgtgtgagcaagatggaggctgacctgtctggctttaacatcgatgccccccgttgggaccagcgcaccttcctggggagagtgaagcacttcctaaacatcacggacccccgcactgtctttgtatctgagcgggagctggactgggccaaggtgatggtggagaagagcaggatgggggttgtgcccccaggcacccaagtggagcagctgctgtatgccaagaagctgtatgactcggccttccaccccgacactggggagaagatgaatgtcatcgggcgcatgtctttccagcttcctggcggcatgatcatcacgggcttcatgctccagttctacaggacgatgccggcggtgatcttctggcagtgggtgaaccagtccttcaatgccttagtcaactacaccaacaggaatgcggcttcccccacatcagtcagtcttgctgccagtcatcatggaaaggcttgagaaattgcacttcatgcagaaagtcaaggtcctgcacgccccattgcaggtcatgctgagcgggtgcttcctcatcttcatggtgccagtggcgtgtgggcttttcccacagaaatgtgaattgccagtttcctatctggaaccgaagctccaagacactatcaaggccaagtatggagaacttgagccttatgtctacttcaataagggtctctaaatgccccacttcagcaaggaccagtctattcccatattcaccagctcctccttagctacgtgcacacttgtgtcctccttcccctttgccaacaaggcctgaaggccagggtagattggggggtgggacaatgaatgcctcatacttacaccctggtactggttgattggacctcaggggaaaaaagtgaaaaagggtagcaaaggccaatgtcttctagctgcttcctcaacccctgtcccctggagaccagaagctgaggccctctcagggaggagacatccaagcaaatcatttggaaaagttaggaaacctttaggattctggttccagccagggttgaggaaaagaccttggatcaaaaggaagcttctatacctctttcttcttcgcttcctcctctcccaagcaatggaaacttttacccatgtaattctagctgaactcaggaaaaagaagggggaaaggactctgtccccttggggctcatcacccttccacatcctcctcctcgttgccccctggtcaggcagcttcttttttttttttttcaagatggagtcttgctctgtcgcccaggctggaatgcagtggcgcgatctcggctcactgcaaactctgcctcctggattcaagcgattctcctgcctcagcctctcaagtagctgggattacagggcacctgccaccacgcctggctaatttttgtattttagtggagacggggtttcaccatgctggccagactggtctcgaactcctgacctcaggtgatccgcccgcctcagcctctgaaattgctgggattacaggcatgagccaccacacccagcccggacagcttctttgggagtgctgctaaccttgaaattatcagacacttaggagttattagtgctaaaaaggggaccgtgcaaggcagcagagttacatggttcttcaaatcatgtctgaacctattcttggaatcttctctataataagggaagttctcttaccccactgccacatacctctgttttaaaagataagtccactaactgtgagtaaaaatgatatatataggcattaaccacacactttaatgggtataatttcctggctgcctcccttcctcagcccattaggttaaacaccaaagaaagactggtgtgtactgaataggaaagggaagttttatttggaaccttctaagaggaaatcaaccaggaccaaagagccttaaaggacacacagcaatgcacagccacttcccttccccagcttggctgccctaggtgatttctcaagctccttgggggactgttgtttctcatctggaatcaatgtgtgtatgagttttgtctggtaggattgctgactctgtccaacagatatcactgtgaattgaataaatttgttgaaagagcacacaggcacacatacacacaaac

SEQ ID NO: 181452 - DNA, 582 bp, Homo sapiens
  Payload ID: 15737
  Gene Symbol: SFXN2
  Gene Name: sideroflexin 2
  ENST ID: ENST00000602764
  CDS Start-End: 178-582
agttttcaaggcgggctgtaactggtggcatttgtcccgggaccagagacggagtttcgccatgttgcccaggctgggctcgaactcctggggtcaagccatccgcccgcctaggcctcccaaagtgctgagactacaggtgttccaaagtggtccacagttttatgtgtgagcaagatggaggctgacctgtctggctttaacatcgatgccccccgttgggaccagcgcaccttcctggggagagtgaagcacttcctaaacatcacggacccccgcactgtctttgtatctgagcgggagctggactgggccaaggtgatggtggagaagagcaggatgggggttgtgcccccaggcacccaagtggagcagctgctgtatgccaagaagctgtatgactcggccttccaccccgacactggggagaagatgaatgtcatcgggcgcatgtctttccagcttcctggcggcatgatcatcacgggcttcatgctccagttctacaggacgatgccggcggtgatcttctggcagtgggtgaaccagtccttcaatgccttagtcaactacaccaacagg

SEQ ID NO: 181453 - DNA, 770 bp, Homo sapiens
  Payload ID: 15737
  Gene Symbol: SFXN2
  Gene Name: sideroflexin 2
  ENST ID: ENST00000602831
  CDS Start-End: 268-770
ctggcgggagcctcccggcctgggattggtcgaaaaggaggggcgtggggcgggcgtgggggcagttccccagcccaggtcctcctctcacccgggccagttttcaaggcgggctgtaactggtggcatttgtcccgggaccaggctggagtgcaacggtgcgatctcggctcatcacaacctccacctctcgggttcaaacgattctcctgccttagcctcccaagtagctgggattacaggtccacagttttatgtgtgagcaagatggaggctgacctgtctggctttaacatcgatgccccccgttgggaccagcgcaccttcctggggagagtgaagcacttcctaaacatcacggacccccgcactgtctttgtatctgagcgggagctggactgggccaaggtgatggtggagaagagcaggatgggggttgtgcccccaggcacccaagtggagcagctgctgtatgccaagaagctgtatgactcggccttccaccccgacactggggagaagatgaatgtcatcgggcgcatgtctttccagcttcctggcggcatgatcatcacgggcttcatgctccagttctacaggacgatgccggcggtgatcttctggcagtgggtgaaccagtccttcaatgccttagtcaactacaccaacaggaatgcggcttcccccacatcagtcaggcagatggccctttcctacttcacagccacaaccactgctgtggccacggctgtgggcatgaacatgttgac

SEQ ID NO: 181454 - DNA, 554 bp, Homo sapiens
  Payload ID: 15737
  Gene Symbol: SFXN2
  Gene Name: sideroflexin 2
  ENST ID: ENST00000602439
  CDS Start-End: 141-554
agttttcaaggcgggctgtaactggtggcatttgtcccgggaccagcttgctctaggcagccttgaccttaatccttgcctgtctcagtggtctttgtgtctgaccttctggggtctttggctaccttgatcttcctctgatgtccacagttttatgtgtgagcaagatggaggctgacctgtctggctttaacatcgatgccccccgttgggaccagcgcaccttcctggggagagtgaagcacttcctaaacatcacggacccccgcactgtctttgtatctgagcgggagctggactgggccaaggtgatggtggagaagagcaggatgggggttgtgcccccaggcacccaagtggagcagctgctgtatgccaagaagctgtatgactcggccttccaccccgacactggggagaagatgaatgtcatcgggcgcatgtctttccagcttcctggcggcatgatcatcacgggcttcatgctccagttctacaggacgatgccggcggtgatcttctggcagtgggtgaaccagtccttcaatgcctta

SEQ ID NO: 181455 - DNA, 3089 bp, Homo sapiens
  Payload ID: 15738
  Gene Symbol: SFXN3
  Gene Name: sideroflexin 3
  Uniprot ID: Q9BWM7
  ENST ID: ENST00000224807
  CDS Start-End: 457-1434
ggcacctcccttaggcgccagggacagccgagcgttacctggtcccgggcagcggagttctttacccaccccagttctggttctgacgccctagctcattccgcaaatttagggcttgggtctggcttgttcccctccggctcgaaccacctcttctctgagccgagccagctaccggggctcctggaattgccacccctccctgggcacccttgaggcctccgtggagggacgtcacggggcagagcgggacgtgagcctgagtttgctgcaggcgtgctctgtgtggtggctgggttctgccaatccccgtgcccaccgggtgggcgcggccgggaagctcctgcccctccctgctggtcggcgtcacgcgtgacgtcccgcgtgatggctgggagggcccggcggcgacagcggaggcagagaggaaggcggttctgagagcttcagagagcgatggaaagcaaaatgggtgaattgcctttagacatcaacatccaggaacctcgctgggaccaaagtactttcctgggcagagcccggcactttttcactgttactgatcctcgaaatctgctgctgtccggggcacagctggaagcttctcggaacatcgtgcagaactacagggccggcgtggtgaccccagggatcaccgaggaccagctgtggagggccaagtatgtgtatgactccgccttccatccggacacaggggagaaggtggtcctgattggccgcatgtcagcccaggtgcccatgaacatgaccatcactggctgcatgctcacattctacaggaagaccccaaccgtggtgttctggcagtgggtgaatcagtccttcaatgccattgttaactactccaaccgcagtggtgacactcccatcactgtgaggcagctggggacagcctatgtgagtgccaccactggagctgtggccacggccctgggactcaaatccctcaccaagcacctgccccccttggtcggcagatttgtgccctttgcagcagtggcagctgccaactgcatcaacatccccctgatgaggcagagagagctgcaggtgggcatcccggtggctgatgaggcaggtcagaggcttggctactcggtgactgcagccaagcagggaatcttccaggtggtgatttcaagaatctgcatggcgattcctgccatggccatcccaccactgatcatggacactctggagaagaaagacttcctgaagcgccgcccctggctgggggcacccctgcaggtgggactggtgggcttctgcctggtatttgcaacccccctgtgctgtgccctattcccccagaagagctccatacacataagcaacctggaaccagagctgagagctcagatccatgagcaaaaccccagcgttgaagtggtctactacaacaaggggctttgaggagggtcagcctctgtcccctccctcacttccttgggctgctgctttagtggagtcatgtcacccctaccacttggctatctgcctagcactgggcaggggccttggtgggcagatggcaattgagggtagcaacctattagggtgggggagggacctccataaggcttttcctcccttctctggtttcaaagatcagagcacataacccctcctgtgcttgagtgtccatgcatatacatacatgatacacatgtgtatgtgtacattgggtcctgaaagctagaagcaggcatgctagcctagtatgttctgacatctggcttcccttctcagcctcatgtccacctgcctgccagccaggctacaggtgtgacttccttctctaaactgttacaccagccaagttatttttgatggcacctcatcccttctagaaataggaggagccccaggatctcaggacagagacttatagacactagtaggacaaagcgggctgaatccttcaggtttctgatacctagctccccaagctgactgggctggcagaggagaacatgttgagacaagggaggcaggggacttatgcatccctcagtgccatcccttgtatcctggaatagctccatttcccctcctcctctctaccagacaaaggagtgcctgtgtcctgtactgccctcgctgtctcccccaccaccctacttgacagcgtgggcatcttcaggcacagccttgggagttcctggtgtgctctgacatcatgacctcaaatctaaatcctccaatcccaactccctttcccaaacaaaaagccacagaggcagagcaagcattcccctttaagagcttccactgcaccccctcccaagggacacagcggtaggaatggtgcttaaactccacaggtatcagagagggtgtaactaggacatcctcaagggcagctaggccccgaatgtacaatgttaagacagggaattttgtgttccattgacttttttttttttttttaatggagtttcactattttgcccaggctggagtgcgatggtgcgatcttggctcactgcaacctctgcctcctgggttcaagtgattctcttgcctcagtctcccgagtagtggaaattacaggtgtgtgctaccacatcttgctagttttgtatttttagcagagatgggggtttcaccatgttggccaggctagtctcgaactcctgacctcaggtgatccacctgccttggcctcccaaagcactgggattacaagcatgagccactgtgcccagcctgttccactgacatttcttagacattcagcaaaacccccaccttaacctcttttctttcttgagggttggtcctgtccccacctccaccctcccaccccctggaagaggaagggcccgggcatcagtggctagtccaaataaaatatgggcttggggatggaatgggtggtggtaagttcacagagtgtagttagatcccaactcccatgacctctggcttcagtggtgggtggggcagggcagatgaaagggcttcagtgggaacctctgagagcattttcctgttccccctatcaaccgcccccagtgataacatctgtgaagccagccattactcaataaactgcaaacttgtct

SEQ ID NO: 181456 - DNA, 3098 bp, Homo sapiens
  Payload ID: 15738
  Gene Symbol: SFXN3
  Gene Name: sideroflexin 3
  ENST ID: ENST00000393459
  CDS Start-End: 474-1439
attccggcacctcccttaggcgccagggacagccgagcgttacctggtcccgggcagcggagttctttacccaccccagttctggttctgacgccctagctcattccgcaaatttagggcttgggtctggcttgttcccctccggctcgaaccacctcttctctgagccgagccagctaccggggctcctggaattgccacccctccctgggcacccttgaggcctccgtggagggacgtcacggggcagagcgggacgtgagcctgagtttgctgcaggcgtgctctgtgtggtggctgggttctgccaatccccgtgcccaccgggtgggcgcggccgggaagctcctgcccctccctgctggtcggcgtcacgcgtgacgtcccgcgtgatggctgggagggcccggcggcgacagcggaggcagagaggaaggcggttctgagagcttcagagagcgatggaaagcaaaatgggtgaattgcctttagacatcaacatccaggaacctcgctgggaccaaagtactttcctgggcagagcccggcactttttcactgttactgatcctcgaaatctgctgctgtccggggcacagctggaagcttctcggaacatcgtgcagaactacagggccggcgtggtgaccccagggatcaccgaggaccagctgtggagggccaagtatgtgtatgactccgccttccatccggacacaggggagaaggtggtcctgattggccgcatgtcagcccaggtgcccatgaacatgaccatcactggctgcatgctcacattctacaggaagaccccaaccgtggtgttctggcagtgggtgaatcagtccttcaatgccattgttaactactccaaccgcagtggtgacactcccatcactgtgaggcagctggggacagcctatgtgagtgccaccactggagctgtggccacggccctgggactcaaatccctcaccaagcacctgccccccttggtcggcagatttgtgccctttgcagcagtggcagctgccaactgcatcaacatccccctgatgaggcagagagagctgcaggtgggcatcccggtggctgatgaggcaggtcagaggcttggctactcggtgactgcagccaagcagggaatcttccaggtggtgatttcaagaatctgcatggcgattcctgccatggccatcccaccactgatcatggacactctggagaagaaagacttcctgaagcgccgcccctggctgggggcacccctgcaggtgggactggtgggcttctgcctggtatttgcaacccccctgtgctgtgccctattcccccagaagagctccatacacataagcaacctggaaccagagctgagagctcagatccatgagcaaaaccccagcgttgaagtggtctactacaacaaggggctttgaggagggtcagcctctgtcccctccctcacttccttgggctgctgctttagtggagtcatgtcacccctaccacttggctatctgcctagcactgggcaggggccttggtgggcagatggcaattgagggtagcaacctattagggtgggggagggacctccataaggcttttcctcccttctctggtttcaaagatcagagcacataacccctcctgtgcttgagtgtccatgcatatacatacatgatacacatgtgtatgtgtacattgggtcctgaaagctagaagcaggcatgctagcctagtatgttctgacatctggcttcccttctcagcctcatgtccacctgcctgccagccaggctacaggtgtgacttccttctctaaactgttacaccagccaagttatttttgatggcacctcatcccttctagaaataggaggagccccaggatctcaggacagagacttatagacactagtaggacaaagcgggctgaatccttcaggtttctgatacctagctccccaagctgactgggctggcagaggagaacatgttgagacaagggaggcaggggacttatgcatccctcagtgccatcccttgtatcctggaatagctccatttcccctcctcctctctaccagacaaaggagtgcctgtgtcctgtactgccctcgctgtctcccccaccaccctacttgacagcgtgggcatcttcaggcacagccttgggagttcctggtgtgctctgacatcatgacctcaaatctaaatcctccaatcccaactccctttcccaaacaaaaagccacagaggcagagcaagcattcccctttaagagcttccactgcaccccctcccaagggacacagcggtaggaatggtgcttaaactccacaggtatcagagagggtgtaactaggacatcctcaagggcagctaggccccgaatgtacaatgttaagacagggaattttgtgttccattgacttttttttttttttttaatggagtttcactattttgcccaggctggagtgcgatggtgcgatcttggctcactgcaacctctgcctcctgggttcaagtgattctcttgcctcagtctcccgagtagtggaaattacaggtgtgtgctaccacatcttgctagttttgtatttttagcagagatgggggtttcaccatgttggccaggctagtctcgaactcctgacctcaggtgatccacctgccttggcctcccaaagcactgggattacaagcatgagccactgtgcccagcctgttccactgacatttcttagacattcagcaaaacccccaccttaacctcttttctttcttgagggttggtcctgtccccacctccaccctcccaccccctggaagaggaagggcccgggcatcagtggctagtccaaataaaatatgggcttggggatggaatgggtggtggtaagttcacagagtgtagttagatcccaactcccatgacctctggcttcagtggtgggtggggcagggcagatgaaagggcttcagtgggaacctctgagagcattttcctgttccccctatcaaccgcccccagtgataacatctgtgaagccagccattactcaataaactgcaaacttgtctactt

SEQ ID NO: 181457 - DNA, 744 bp, Homo sapiens
  Payload ID: 15738
  Gene Symbol: SFXN3
  Gene Name: sideroflexin 3
  ENST ID: ENST00000489434
  CDS Start-End: 4-537
aaaatgggtgaattgcctttagacatcaacatccaggaacctcgctgggaccaaagtactttcctgggcagagcccggcactttttcactgttactgatcctcgaaatctgctgctgtccggggcacagctggaagcttctcggaacatcgtgcagaactacagggccggcgtggtgaccccagggatcaccgaggaccagctgtggagggccaagtatgtgtatgactccgccttccatccggacacaggggagaaggtggtcctgattggccgcatgtcagcccaggtgcccatgaacatgaccatcactggctgcatgctcacattctacaggaagaccccaaccgtggtgttctggcagtgggtgaatcagtccttcaatgccattgttaactactccaaccgcagtggtgacactcccatcactgtgaggcagctggggacagcctatgtgagtgccaccactggagctgtggccacggccctgggactcaaatccctcaccaagagtccctcaccaccccatggcccttagggccactgaacaacacccttcctccccagcacctgccccccttggtcggcagatttgtgccctttgcagcagtggcagctgccaactgcatcaacatccccctgatgaggcagagagagctgcaggtgggcatcccggtggctgatgaggcaggtcagaggcttggctactcggtgactgcagccaagcagggaatcttccaggtgg

SEQ ID NO: 181458 - DNA, 1363 bp, Homo sapiens
  Payload ID: 15739
  Gene Symbol: SFXN4
  Gene Name: sideroflexin 4
  Uniprot ID: Q6P4A7
  ENST ID: ENST00000355697
  CDS Start-End: 21-1034
gccactctaaccagcgcaaaatgtccctggaacaggaggaggaaacgcaacctgggcggctcctaggacgcagagacgccgtccccgccttcattgagcccaacgtgcgcttctggatcaccgagcgccaatcctttattcgacgatttcttcaatggacagaattattagatcctacaaatgtgttcatttcagttgaaagtatagaaaactcgaggcaactattgtgcacaaatgaagatgtttccagccctgcctcggcggaccaaaggatacaagaagcttggaagcggagtcttgcaacagtgcatcccgacagcagcaacctgatccccaagctttttcgacctgcagcgttcctgcctttcatggcacccacggtatttttgtcaatgacgccactgaaagggatcaagtccgtgattttacctcaggttttcctctgtgcctacatggcagcgttcaacagcatcaatggaaacagaagttacacttgtaagccactagaaagatcattactaatggcgggagccgttgcttcttcaactttcttaggagtaatccctcagtttgtccagatgaagtatggcctgactggcccttggattaaaagactcttacctgtgatcttcctcgtgcaagccagtggaatgaatgtctacatgtcccgaagtcttgaatccattaaggggattgcggtcatggacaaggaaggcaatgtcctgggtcattccagaattgctgggacaaaggctgttagagaaacgctagcatccagaatagtgctgtttgggacctcagctctgattcctgaagtcttcacctacttttttaaaaggacccagtatttcaggaaaaacccagggtcattgtggattttgaaactgtcttgtactgtcctggcaatgggactgatggtgccattttcttttagtatatttccacagattggacagatacagtactgtagtcttgaagagaaaattcagtctccaacagaagaaacagaaatcttttatcacagaggggtgtaggcgtgagttttaggtgaatttatgtggttcctgcttgaaaaccttcccctctccaggttcggtttagagaactttgccacaggtcttctggggaccccagaggtgtctgtgctgacaaggcgacttcagattccatactgagatcgttcccaggctggcgtctctggggtttttaaggctggctggagaagacagtgggagggtgccccgtctgacacccctggggttgctgagggaacggttggagtggggatcggcctgcgaaaggatactgtgaaatcactaattaactaataaacctgtctcaagttgaggatttgaagaaagaa

SEQ ID NO: 181459 - DNA, 1133 bp, Homo sapiens
  Payload ID: 15739
  Gene Symbol: SFXN4
  Gene Name: sideroflexin 4
  ENST ID: ENST00000369131
  CDS Start-End: 600-1133
gtgcgcttctggatcaccgagcgccaagtacggcccgggcccggcgcgactaggggcagggagggggcgggccgggccgcgtggagtcgggctgacccgggtgaccttggccaggccacgtgggcgccccctgtctccgtttcctcctctcggagttgtgccgggaacgcgcaccaccggccttcaccccttagggcgcggcaggggacgcaggggaaatcgaagctgccagatgcccacgaccacaacgtcaccctccagattgccctctcggaggggcccagtccgcgcaggtggctgctccctactgcctgagctgtggctgagcagcagattggggagaaacaggctctcgcaccttgtcctttattcgacgatttcttcaatggacagaattattagatcctacaaatgtgttcatttcagttgaaagtatagaaaactcgaggcaactattgtgcacaaatgaagatgtttccagccctgcctcggcggaccaaaggatacaagaagcttggaagcggagtcttgcaacagtgcatcccgacagcagcaacctgatccccaagctttttcgacctgcagcgttcctgcctttcatggcacccacggtatttttgtcaatgacgccactgaaagggatcaagtccgtgattttacctcaggttttcctctgtgcctacatggcagcgttcaacagcatcaatggaaacagaagttacacttgtaagccactagaaagatcattactaatggcgggagccgttgcttcttcaactttcttaggagtaatccctcagtttgtccagatgaagtatggcctgactggcccttggattaaaagactcttacctgtgatcttcctcgtgcaagccagtggaatgaatgtctacatgtcccgaagtcttgaatccattaaggggattgcggtcatggacaaggaaggcaatgtcctgggtcattccagaattgctgggacaaaggctgttagagaaacgctagcatccagaatagtgctgtttgggacctcagctctgattcctgaagtcttcacctacttttttaaaaggacccagtatttcaggaaaaacccagggtcattgtggattttgaaactgtcttgtactgtcctg

SEQ ID NO: 181460 - DNA, 739 bp, Homo sapiens
  Payload ID: 15739
  Gene Symbol: SFXN4
  Gene Name: sideroflexin 4
  ENST ID: ENST00000419372
  CDS Start-End: 552-739
cgccaagtacggcccgggcccggcgcgactaggggcagggagggggcgggccgggccgcgtggagtcgggctgacccgggtgaccttggccaggccacgtgggcgccccctgtctccgtttcctcctctcggagttgtgccgggaacgcgcaccaccggccttcaccccttagggcgcggcaggggacgcaggggaaatcgaagctgccagatgcccacgaccacaacgtcaccctccagattgccctctcggaggggcccagtccgcgcaggtggctgctccctactgcctgagctgtggctgagcagcagattggggagaaacaggctctcgcaccttgtcctttattcgacgatttcttcaatggacagaattattagatcctacaaatgtgttcatttcagttgaaagtatagaaaactcgaggcaactattgtgcacaaatgaagatgtttccagccctgcctcggcggaccaaagggcaacagtgcatcccgacagcagcaacctgatccccaagctttttcgacctgcagcgttcctgcctttcatggcacccacggtatttttgtcaatgacgccactgaaagggatcaagtccgtgattttacctcaggttttcctctgtgcctacatggcagcgttcaacagcatcaatggaaacagaagttacacttgtaagccactagaaagatcattactaatggcgggagccgttgcttcttcaactttcttagg

SEQ ID NO: 181461 - DNA, 4140 bp, Homo sapiens
  Payload ID: 15740
  Gene Symbol: SFXN5
  Gene Name: sideroflexin 5
  Uniprot ID: Q8TD22
  ENST ID: ENST00000272433
  CDS Start-End: 132-1154
aactacactccccacaacgccttgcgcctcccgctcgctgcggttgattagggccaatcgggagaggcagctgtggcgggggccgaggagggacattttaaaagggccggagattgcgggcgtcagtggccatggcggatacagcgactacagcatcggcggcggcggctagtgccgctagcgcctcgagcgatgcacctcctttccaactgggcaaaccccgcttccagcagacgtccttctatggccgcttcaggcacttcttggatatcatcgaccctcgcacactctttgtcactgagagacgtctcagagaggctgtgcagctgctggaggactataagcatgggaccctgcgcccgggggtcaccaatgaacagctctggagtgcacagaaaatcaagcaggctattctacatccggacaccaatgagaagatcttcatgccatttagaatgtcaggttatattccttttgggacgccaattgtagtcggtcttctcttgcccaaccagacactggcatccactgtcttctggcagtggctgaaccagagccacaatgcctgtgtcaactatgcaaaccgcaatgcgaccaagccttcacctgcatccaagttcatccagggatacctgggagctgtcatcagcgccgtctccattgctgtgggccttaatgtcctggttcagaaagccaacaagttcaccccagccacccgccttctcatccagaggtttgtgccgttccctgctgtagccagtgccaatatctgcaatgtggtcctgatgcggtacggggagctggaggaagggattgatgtcctggacagcgatggcaacctcgtgggctcctccaagatcgcagcccgacacgccctgctggagacggcgctgacgcgagtggtcctgcccatgcccatcctggtgctacccccgatcgtcatgtccatgctggagaagacggctctcctgcaggcacgcccccggctgctcctccctgtgcaaagcctcgtgtgcctggcagccttcggcctggccctgccgctggccatcagcctcttcccgcaaatgtcagagattgaaacatcccaattagagccggagatagcccaggccacgagcagccggacagtggtgtacaacaaggggttgtgagtgtggtcagcggcctggggacggagcactgtgcagccggggagctgaggggcagggccgtagactcacggctgcacctgcagggagcagcacgccaaccccagcagtcctgggccccctgggagagtgctcaacctacagtggagggagactgacccattcacattttaacataggcaagaggagttctaacacatttcgtacaaaaaaataatcaagtgcatttctgggccttatgtggggttgtcaaaactccactcagcacaattatgtgtgaagctgaaaaattgtagagtgcccatggggtagaagtagaatccttttatactttggttccttttttatttttattttttatcagaatcaaatctgagccttagtttcagctgaccagaagtggcaggaggacaggtggaggcgagccagattaggcctggagttgggctggtttggtggccaggctggtaaatttaggatattacaatggccagcccagatggctccctgggctggcatggggaggggagagaaggtggtctgcaccccacaggatgaactagccatgactagggtcctcaggcagtggcccagggaatcagggagcactggaggcctctgcaagattctgtgggcagctggctctgaatgtagccagcccacatccattccagagctgcagaaccagtccctctgagtgaagtccagtgaccctggagctagggtcccccttcgtggagctctaactgattcagggcccctgaagtgaccccagctccaggcaggaaaccccgagaaggaatggtgcttggcaggaaccatggacctgcacttggcctcttcgggaagatcctccttccaggccccaggctggatgctgggttctggggctgagagtggggctagactgggctggctgccttctgcggagcttctccagccaccaaggctgcctgccccatcccatccctttctaagcaggaaggtctcatgcctgagaatgcctaggccagctccttagacacctatcagagaagcagcatcaacctaggagcagtgggccctggctctgtcactaaatggcagtgagatgtcagacaaattcattcccttctctcagcctccactccctgtctgaaaccagaagactggatcaaggggttcccactggctcctccagcaagacctcgtctttgcttgtcctgctcagatgctggtcatcctgggcatgtccccagtgtggactctggactgggaagggggcaggcccctttggacctgcagttggcctcagcagaaggccttgccttgtgtatgtgactccatatcccgggagcagttgacctttgccaaacactttacagttctggaggaggaggtaacatagatgcctgggcctgatggtggggccatacccatgtgtcgcctctcactctggcagcctcagaggccccttgctgctggctcccatctccctcccatttgcagaccaggaaggaagagcaagctgtacaaagggaagcagagcctggggtgggtgtgagcagggtgacccctcatctgaaaggcccaaaccagggggaagcaccagcctcagtgcagccccctcctgaccccacctagaatggaagcctccacctgcagccccaggcctccctcccccggggtctccacctcaggggagacttaggccagaggtgaacattcatgtgtaggaagaggccgctgcagggtggcatcttagggtaggggaagtgtgctgaggtgggccttccatgggcatggccgttgcctctctgccagccgctggtgcccaccagctggctctgcagcacattgccctgaggggcctgccactctcctgaggagcagcccacctgctgcccgtgaggagggggagaagggttagacaagcctggaggacaaaacagcgggagtgtgggggtgccatggtgttggaggggcaggcctttttgagccaatcccaccataatgtgaatatgccagtgactgctgcgctgtgctggtctctaggcctgaactaggtgctggcatgtctgggtcgtcttttgaaaagctcacttcaagctcaccctgctcctacctatcataaggtcttattcttgtgcactttatcttgggaccaaaactgcctacccaccccttcccgccctccccctgccagaggcctggtgccctggcccagcctgtggcctcagcatctcataactcatttgctttgtctcccggatgatttccgtcatgctcccaaatgcagcttcaggtgagccaaggggtctgctcctgtggcggtgcagtggcaaaggatccagatagcctagggtgagggtgacagagggacagtgggctatgccactaggccctggtctggctttggaaagacctgtgaggggaaaccttcacccagcacccatgccccactctgctgaggccagaggaagggaggcctgaggggcagattggttcatgcctggggtggaggctaagcctggacacagtcagggcggggctggccagctgtgcgagaacacaagccacgcctgcgatggtgctgcacccctggtgtccctgcctggccctcctctggtcacttcaaacatgccctcaggcttggggatgcccttcttccattcccagacagcagtgtgagggtgcagggaccaagatgtcaagctggccgtggagtcgagctggccgacggacccctttcacctggttatgagccgacttctttggtgttctggcctctggcctgggaaaagggcaggagcctagaggaggaaaaaggctggtggacagacccagggtggtcttcaagcctggcccagtgagagtgaggcccccgcacgcaagcctcagccactcccaggggcctttgcagcgtctttttaacctcagaaaatttctcaatctatgtgatttgtgtaatactaatgagctttgggcaataaatacgggatttaaagca

SEQ ID NO: 181462 - DNA, 840 bp, Homo sapiens
  Payload ID: 15740
  Gene Symbol: SFXN5
  Gene Name: sideroflexin 5
  ENST ID: ENST00000410065
  CDS Start-End: 20-781
attgcgggcgtcagtggccatggcggatacagcgactacagcatcggcggcggcggctagtgccgctagcgcctcgagcgatgcacctcctttccaactgggcaaaccccgcttccagcagacgtccttctatggccgcttcaggcacttcttggatatcatcgaccctcgcacactctttgtcactgagagacgtctcagagaggctgtgcagctgctggaggactataagcatgggaccctgcgcccgggggtcaccaatgaacagctctggagtgcacagaaaatcaagcaggctattctacatccggacaccaatgagaagatcttcatgccatttagaatgtcaggttatattccttttgggacgccaattgtagtcggtcttctcttgcccaaccagacactggcatccactgtcttctggcagtggctgaaccagagccacaatgcctgtgtcaactatgcaaaccgcaatgcgaccaagccttcacctgcatccaagttcatccagggatacctgggagctgtcatcagcgccgtctccattgctgtgggccttaatgtcctggttcagaaagccaacaagttcaccccagccacccgccttctcatccagaggtttgtgccgttccctgctgtaggacggctctcctgcaggcacgcccccggctgctcctccctgtgcaaagcctcgtgtgcctggcagccttcggcctggccctgccgctggccatcagcctcttcccgcaaatgtcagagattgaaacatcccaattagagccggagatagcccaggccacgagcagccggacagtggtgtacaacaaggggttgtga

SEQ ID NO: 181463 - DNA, 489 bp, Homo sapiens
  Payload ID: 15740
  Gene Symbol: SFXN5
  Gene Name: sideroflexin 5
  ENST ID: ENST00000442582
  CDS Start-End: 21-489
gattgcgggcgtcagtggccatggcggatacagcgactacagcatcggcggcggcggctagtgccgctagcgcctcgagcgatgcacctcctttccaactgggcaaaccccgcttccagcagacgtccttctatggccgcttcaggcacttcttggatatcatcgaccctcgcacactctttgtcactgagagacgtctcagagaggctgtgcagctgctggaggactataagcatgggaccctgcgcccgggggtcaccaatgaacagctctggagtgcacagaaaatcaagcaggttatattccttttgggacgccaatttcggtcttctcttgcccaaccagacactggcatccactgtcttctgtggctgaaccagagccacaatgcctgtgtcaactatgcaaaccgcaatgcgaccaagccttcacctgcatccaagttcatccagggatacctgggagctgtcatcagcgccgtctccattg

SEQ ID NO: 181464 - DNA, 2975 bp, Homo sapiens
  Payload ID: 15740
  Gene Symbol: SFXN5
  Gene Name: sideroflexin 5
  ENST ID: ENST00000450185
  CDS Start-End: 5-271
ggccatggcggatacagcgactacagcatcggcggcggcggctagtgccgctagcgcctcgagcgatgcacctcctttccaactgggcaaaccccgcttccagcagacgtccttctatggccgcttcaggcacttcttggatatcatcgaccctcgcacactctttgtcactgagatggagtcttgcactgtcccccaggctcactgcaacccctgcctcctgggttcagagacgtctcagagaggctgtgcagctgctggaggactataagcatgggaccctgcgcccgggggtcaccaatgaacagctctggagtgcacagaaaatcaagcaggttatattccttttgggacgccaattgtagtcggtcttctcttgcccaaccagacactggcatccactgtcttctggcagtggctgaaccagagccacaatgcctgtgtcaactatgcaaaccgcaatgcgaccaagccttcacctgcatccaagttcatccagggatacctgggagctgtcatcagcgccgtctccattgctgtgagtactccctcccctgctccttcttggctctgctgctctggggccaccccgctcagcattgcaggtggatgcttgtctgagggccaggccaggcaaggatttgggagacaggtttctgtgggtggaggagtcaggacaggctttccaagccgagaagaggctccagtagacagagcacaacctggtgctccctgtaatggagagcaggtggggaggtgaggttgtgcctgggggcactgaggcaggacatctgtcttgagtggggctgcggttgcccagcactctgctcggaagagctgctcctcatgctcggtaacgtggctggagcgagcggggtggggggatgcctctgaatgactctgcaaggcctgcccatgtgcctgctcccctgagctcttgctcagctgccggggcactgcttttccctctctatggccttactggtgtcacacgtccagctcttcctgaagacctgtcagtgcccgaagccaggggcgttaggctcactctgagtctccacagtactttgaggccagagcagctactcagtaggggaggttcagagactgagcgtgagggtacggcaggtgtggctccctgcttcccagaggaggccaggggcaagtgacacagtcagggccctgggccagagccagagtggacgctcaagctgccaggaccttctgcatgcttgtcccacccctgagcccgcccctgtacctacgtctggctgtctctggatccccactaggatggccttctatagccgactccagagggcgaagggccccttcacaactctgtcatttcatccattacacaatacattaatgtaactggtaagaaaaaaaaaattagaaaatgaaaaccaaacaacattcacatagctgagcacagtggggcacacctgtagtcccagctactcaggaggctgaggtaggaggatcattgagcccaggtgttggagtctgtagtgtgctatgattgcagctgtgaacagccactgcactccaacctgggcaacatagcaagaccccatttaaaaaaacaaaaggccgggtgcagtggctcacgcctgtaatcccaacactttggaaggccaaggcgggaagatcacctgagatcaggagttcaagaccagcctggccaacatggtgaaacccctgtctctactaaaaaaaatacaaaaattagtctgcatggtggtgggcacctgtaatcctagctccttgggaggctgaggcaggagaatcgcttgaacctgggaggcagaagttgcagtgagccgagatcacgccactgcactccagcctgggcgacagagtgagactccatctccagaaaaaaaaaaaataaataaataataaaaaatttaagaaattaaaaaaccccaaaaccattcagctgggcaagctggtgtgcccctgtaatcccagctactcaggaggctgagttgggaggattgcttatggccatgttgggcagcatagcaagatcttatctctaatgaaaaagaaaacattcacatataatgaagaattcacatacaataaccttttggtaaaaccccctttgctcatctttccagtgccattaagtaaatactgtataataactgttcacggctgtataattacccattgtaccatacgccacaatttaattcaccattcttctaaaggagggacttggggttgtcctgaaatggcctcatttatttcactcccacatagaccaagtcatctccaaatagctgtgaagtgggatgtcccatttcatgcccaagatctctttcccaaatccttatgtcttcacaaaagcaagaagtgagacattcaggtggctcaccaagagactgctgacctgccacccagcttgtcctgcagcccagcaggagacttcatttgggagtcagacaaattgggggtccctgatactggggacttggtgggtgaaggccaaaggctcccctgagtgggagaaagaactcttgtcacctcctccttgttccttgtgatgagaggagctgatggtctgcttagcttagcagctcaaaaatccccttcctttttttgagactcaggggcaaggtgagaggaggaggctacatagggaaggatgctgagtggccttgaatggaaaggcctgagtgaaggggatcattgtcctggtggacttccttcacctgcaggcctggggctcagagaacaagaatcagcttctcagcctgagtaacatagcaaaaccccatctctacaaaaaatacaaaaaaaattaggtgtggtggtgcacacctgtagtcccagctacctgggaggctgaggtgggagaatcatttgagcctggaaggtcgaggctgcagtgagccacgattgtgcccctgcactccagactgggcgacagagcaaaaccctgtctcaaaaaaaaaaaaaaa

SEQ ID NO: 181465 - DNA, 915 bp, Homo sapiens
  Payload ID: 15740
  Gene Symbol: SFXN5
  Gene Name: sideroflexin 5
  ENST ID: ENST00000411783
  CDS Start-End: 1-757
ggcggctagtgccgctagcgcctcgagcgatgcacctcctttccaactgggcaaaccccgcttccagcagacgtccttctatggccgcttcaggcacttcttggatatcatcgaccctcgcacactctttgtcactgagagacgtctcagagaggctgtgcagctgctggaggactataagcatgggaccctgcgcccgggggtcaccaatgaacagctctggagtgcacagaaaatcaagcaggctattctacatccggacaccaatgagaagatcttcatgccatttagaatgtcaggttatattccttttgggacgccaattgtagtcggtcttctcttgcccaaccagacactggcatccactgtcttctggcagtggctgaaccagagccacaatgcctgtgtcaactatgcaaaccgcaatgcgaccaagccttcacctgcatccaagttcatccagggatacctgggagctgtcatcagcgccgtctccattgctgtgggccttaatgtcctggttcagaaagccaacaagttcaccccagccacccgccttctcatccagaggtttgtgccgttccctgctgtaggccctgctggagacggcgctgacgcgagtggtcctgcccatgcccatcctggtgctacccccgatcgtcatgtccatgctggagaaattgaaacatcccaattagagccggagatagcccaggccacgagcagccggacagtggtgtacaacaaggggttgtgagtgtggtcagcggcctggggacggagcactgtgcagccggggagctgaggggcagggccgtagactcacggctgcacctgcagggagcagcacgccaaccccagcagtcctgggccccctgggagagtgctcaacctacagtggagggagactgaccc

SEQ ID NO: 181466 - DNA, 1708 bp, Homo sapiens
  Payload ID: 15741
  Gene Symbol: SIGLECL1
  Gene Name: SIGLEC family like 1
  Uniprot ID: Q8N7X8
  ENST ID: ENST00000316401
  CDS Start-End: 382-975
agataatgttaacaatgtgatttagagtggaagcaataccagatagtctaacaatgtgatttagaataggggctttggatcaaatggtatcagctcaacttcaggaggagctggatgctaagatccaccatgagggaagtcaccatgttacacgatggaggcccaataaaaacactggacacaaggcttgggtgaacaggccttcacgatgaccagagacagaagcccctgacttggctaaagatacttctgctctccccatccccacatcctctttcagttacgcatcacctcactccttctgaaccatatggttctgatgtcagagccagtgtagtaaagagcttctgctgttcctgagaactgttgctgctggaagtgatgcttccactgctacagctggtacctgctaagctgctcaactcctcttgctccttggagaagacactgcagtgcagctgttccttccatgggattcccacaccctctgtgcagtggtggatgggaggagtccccgtgggtgtggatggcatggatggcagcctccaagtgacttccaccatgcttggcccctgggctaacagcaccatcagcctaactgaagagccagaaatgggcatgagacttctctgtgaggggaagaaccaaaacggaacccatgctttgagcatcctactgatgtcaagaaagagttctttggctgcccaggccttcgtgaaagggctgatccagggtgctatctatgcgggaattgtaattgcgctgctcttcctctgcctcctccctctcatagtgaaacatatcagaaagaagcaggcgaagaaagctgcagcgatcagagcaaaaaagagctctaaagtcagagcaagccaagaacttgagatgtctctgaagcctgaggaaccaggaaaacccgtagtcgccacattttctgagagccggatattggaaaagcaagataaacgagccagctaagcctgtggaacatgcctcatacctggagtcgccattatccctggaattacaaagatctgcaaaatttatagcgctcacagaaaccctggaggctgtaataaacctggagccccctggactctcctcagctcacaaaaccctctcaattcctacacatcccttaacactcattctccattgaataggtggttactcttagacctagtcttagaacctctgaagacacactttgtaatttgttgtttggctaaatgagaagaaatctgtgccaccctgggaaggtgtcaaaagaaggaaaaatacatgtgacaatatgaatcaagtccatcagcaagttacttttgagcgcctactgtgtgtcagtgcctgagatacacctacaagagcgccaggctttcaagccttcatatctggatagaatcccaacttcagtgcttggtggctgtctatctttggacaagatctttcattccccatcctttgaacatcacatgacccatatctgggtggagaatgggtgaaaagtactgttcagagatgcaggtgagaaaaaacatgacgatgggccctgaatgccaagattcattggagctttggagctttatcttgtaggaccttatcctgactcccttagaatgtaagttccaagagaacagggactttgtctgccttgttttctacttttatcaccagcacccagaatgatgcctaaaatacaataagatctcaagaa

SEQ ID NO: 181467 - DNA, 660 bp, Homo sapiens
  Payload ID: 15741
  Gene Symbol: SIGLECL1
  Gene Name: SIGLEC family like 1
  ENST ID: ENST00000597610
  CDS Start-End: 240-660
aaagaatctgcttcgaaagggatccatggggctttgcgcaaggatacaagtgaacaggccttcacgatgaccagagacagaagcccctgacttggctaaagatacttctgctctccccatccccacatcctctttcagttacgcatcacctcactccttctgaaccatatggttctgatgtcagagccagtgtagtaaagagcttctgctgttcctgagaactgttgctgctggaagtgatgcttccactgctacagctggtacctgctaagctgctcaactcctcttgctccttggagaagacactgcagtgcagctgttccttccatgggattcccacaccctctgtgcagtggtggatgggaggagtccccgtgggtgtggatggcatggatggcagcctccaagtgacttccaccatgcttggcccctgggctaacagcaccatcagcctaactgaagagccagaaatgggcatgagacttctctgtgaggggaagaaccaaaacggaacccatgctttgagcatcctactgatgtcaagaaagagttctttggctgcccaggccttcgtgaaagggctgatccagggtgctatctatgcgggaattgtaattgcgctgctcttcctctgcctcctccctctcatagtgaaacata

SEQ ID NO: 181468 - DNA, 912 bp, Homo sapiens
  Payload ID: 15741
  Gene Symbol: SIGLECL1
  Gene Name: SIGLEC family like 1
  ENST ID: ENST00000601727
  CDS Start-End: 659-912
atgcactcacctaaggatgcgagctagcaggtcttgcagcggctatcacgcccctcacgccgctatctctgtgcagccgactgaggatccctagtcgcataaggctgtgcctggcctgttggcgtccctggcagttgttgggttctggcggttgttgggtccctggcagttgttggcggttgttgggttccttcattgaaactgcactaactgggcttccagtcagcgtcagtcagcggatccttgggccgtggggcagccgcaggtcggttaggccaccagggcggctctcgtgccagtgaggcccctgagagccctttggtcagacagaggctaaatctgaacagtcaggcggtgagattaagcatagtcagggagttcgccaggagccagcgttcctcagcctccaccacgtcagtcacctggtcagccagagggcagctggggcgacatccatctaccaagaaggtgaacaggccttcacgatgaccagagacagaagcccctgacttggctaaagatacttctgctctccccatccccacatcctctttcagttacgcatcacctcactccttctgaaccatatggttctgatgtcagagccagtgtagtaaagagcttctgctgttcctgagaactgttgctgctggaagtgatgcttccactgctacagctggtacctgctaagctgctcaactcctcttgctccttggagaagacactgcagtgcagctgttccttccatgggattcccacaccctctgtgcagtggtggatgggaggagtccccgtgggtgtggatggcatggatggcagcctccaagtgacttccaccatgcttggcccctgggctaacagcaccatcagcctaactgaagagccagaaatgggcatgagacttctctgtga

SEQ ID NO: 181469 - DNA, 503 bp, Homo sapiens
  Payload ID: 15741
  Gene Symbol: SIGLECL1
  Gene Name: SIGLEC family like 1
  ENST ID: ENST00000596117
  CDS Start-End: 465-503
attgaaactgcactaactgggcttccagtcagcgtcagtcagcggatccttgggccgtggggcagccgcaggtcggttaggccaccagggcggctctcgtgccagtgaggcccctgagagccctttggtcagacagaggctaaatctgaacagtcaggcggtgagattaagcatagtcagggagttcgccaggagccagcgttcctcagcctccaccacgtcagtcacctggtcagccagagggcagctggggcgacatccatctaccaagaaggtgaacaggccttcacgatgaccagagacagaagcccctgacttggctaaagatacttctgctctccccatccccacatcctctttcagttacgcatcacctcactccttctgaaccatatggttctgatgtcagagccagtgtagtaaagagcttctgctgttcctgagaactgttgctgctggaagtgatgcttccactgctacagctgggtggaaaagacaattca

SEQ ID NO: 181470 - DNA, 870 bp, Homo sapiens
  Payload ID: 15741
  Gene Symbol: SIGLECL1
  Gene Name: SIGLEC family like 1
  ENST ID: ENST00000597824
  CDS Start-End: 163-474
cagaagcccctgacttggctaaagatacttctgctctccccatccccacatcctctttcagttacgcatcacctcactccttctgaaccatatggttctgatgtcagagccagtgtagtaaagagcttctgctgttcctgagaactgttgctgctggaagtgatgcttccactgctacagctgggaaagagttctttggctgcccaggccttcgtgaaagggctgatccagggtgctatctatgcgggaattgtaattgcgctgctcttcctctgcctcctccctctcatagtgaaacatatcagaaagaagcaggcgaagaaagctgcagcgatcagagcaaaaaagagctctaaagtcagagcaagccaagaacttgagatgtctctgaagcctgaggaaccaggaaaacccgtagtcgccacattttctgagagccggatattggaaaagcaagataaacgagccagctaagcctgtggaacatgcctcatacctggagtcgccattatccctggaattacaaagatctgcaaaatttatagcgctcacagaaaccctggaggctgtaataaacctggagccccctggactctcctcagctcacaaaaccctctcaattcctacacatcccttaacactcattctccattgaataggtggttactcttagacctagtcttagaacctctgaagacacactttgtaatttgttgtttggctaaatgagaagaaatctgtgccaccctgggaaggtgtcaaaagaaggaaaaatacatgtgacaatatgaatcaagtccatcagcaagttacttttgagcgcctactgtgtgtcagtgcctgagatacacctacaagagcgccaggctt

SEQ ID NO: 181471 - DNA, 1516 bp, Homo sapiens
  Payload ID: 15741
  Gene Symbol: SIGLECL1
  Gene Name: SIGLEC family like 1
  Uniprot ID: Q8N7X8
  ENST ID: ENST00000614422
  CDS Start-End: 192-785
ggtgaacaggccttcacgatgaccagagacagaagcccctgacttggctaaagatacttctgctctccccatccccacatcctctttcagttacgcatcacctcactccttctgaaccatatggttctgatgtcagagccagtgtagtaaagagcttctgctgttcctgagaactgttgctgctggaagtgatgcttccactgctacagctggtacctgctaagctgctcaactcctcttgctccttggagaagacactgcagtgcagctgttccttccatgggattcccacaccctctgtgcagtggtggatgggaggagtccccgtgggtgtggatggcatggatggcagcctccaagtgacttccaccatgcttggcccctgggctaacagcaccatcagcctaactgaagagccagaaatgggcatgagacttctctgtgaggggaagaaccaaaacggaacccatgctttgagcatcctactgatgtcaagaaagagttctttggctgcccaggccttcgtgaaagggctgatccagggtgctatctatgcgggaattgtaattgcgctgctcttcctctgcctcctccctctcatagtgaaacatatcagaaagaagcaggcgaagaaagctgcagcgatcagagcaaaaaagagctctaaagtcagagcaagccaagaacttgagatgtctctgaagcctgaggaaccaggaaaacccgtagtcgccacattttctgagagccggatattggaaaagcaagataaacgagccagctaagcctgtggaacatgcctcatacctggagtcgccattatccctggaattacaaagatctgcaaaatttatagcgctcacagaaaccctggaggctgtaataaacctggagccccctggactctcctcagctcacaaaaccctctcaattcctacacatcccttaacactcattctccattgaataggtggttactcttagacctagtcttagaacctctgaagacacactttgtaatttgttgtttggctaaatgagaagaaatctgtgccaccctgggaaggtgtcaaaagaaggaaaaatacatgtgacaatatgaatcaagtccatcagcaagttacttttgagcgcctactgtgtgtcagtgcctgagatacacctacaagagcgccaggctttcaagccttcatatctggatagaatcccaacttcagtgcttggtggctgtctatctttggacaagatctttcattccccatcctttgaacatcacatgacccatatctgggtggagaatgggtgaaaagtactgttcagagatgcaggtgagaaaaaacatgacgatgggccctgaatgccaagattcattggagctttggagctttatcttgtaggaccttatcctgactcccttagaatgtaagttccaagagaacagggactttgtctgccttgttttctacttttatcaccagcacccagaatgatgcctaaaatacaataagatctcaag

SEQ ID NO: 181472 - DNA, 1656 bp, Homo sapiens
  Payload ID: 15742
  Gene Symbol: SIGMAR1
  Gene Name: sigma non-opioid intracellular receptor 1
  Uniprot ID: Q99720
  ENST ID: ENST00000277010
  CDS Start-End: 75-746
ctccgaggccgtgagcgcaaagcctcaggccccggctccctcctgagctgcgccgtgccaggccgcccgccgggatgcagtgggccgtgggccggcggtgggcgtgggccgcgctgctcctggctgtcgcagcggtgctgacccaggtcgtctggctctggctgggtacgcagagcttcgtcttccagcgcgaagagatagcgcagttggcgcggcagtacgctgggctggaccacgagctggccttctctcgtctgatcgtggagctgcggcggctgcacccaggccacgtgctgcccgacgaggagctgcagtgggtgttcgtgaatgcgggtggctggatgggcgccatgtgccttctgcacgcctcgctgtccgagtatgtgctgctcttcggcaccgccttgggctcccgcggccactcggggcgctactgggctgagatctcggataccatcatctctggcaccttccaccagtggagagagggcaccaccaaaagtgaggtcttctacccaggggagacggtagtacacgggcctggtgaggcaacagctgtggagtgggggccaaacacatggatggtggagtacggccggggcgtcatcccatccaccctggccttcgcgctggccgacactgtcttcagcacccaggacttcctcaccctcttctatactcttcgctcctatgctcggggcctccggcttgagctcaccacctacctctttggccaggacccttgaccagccaggcctgaaggaagacctgcggatagacaggagcgggcaggcccgcacatatccacttgctggagcccatgtttacagacagggacatacaccatgcagatcctgagttcctgctgtatgagcagggatatccatgcttatgtatccaaacacagagacccatgggaacaaatgagacacatatagatactgagacctgtgtgtacagtaggaccatgcactcacacccatctggagagggagcccccggtataccaagggagccagttgtgttcagacacacacatcacagcttgactcactaactgaggcctttccatagctccacagcttcccacctcctccccaccaaaccggggttctagagttaaggatgggggagggtattatactgcctcagtctgactcctcaacccagcagcaatttgaggggatgagggggaagaggagctgccttttggaggcccccttcacctgcagctatgatgcccttccccttctcccctgtcctcaccatatgccttatccccattctactcccctgctatgcaagtgcccctgtggcttgtccccaaccccctcagcaacaaagctcagctggggaacgagagtaatttgaagaatgcttgaagtcagcgtcttccattccagaaagacccccattcttcctttgggggtatgatgtggaagctggtttcagcccaggacccaccactgaggagaggatctagacaggtgggcctaattccaaggggcccttcctggcctggagaaggccttttacacacacacaacacatacacacacacacacacacacacatatcacagttttcacacagcccctgctgcattctctgtccatctgtctgtttctattaataaagatttgttgatctgttcca

SEQ ID NO: 181473 - DNA, 1743 bp, Homo sapiens
  Payload ID: 15742
  Gene Symbol: SIGMAR1
  Gene Name: sigma non-opioid intracellular receptor 1
  ENST ID: ENST00000378892
  CDS Start-End: 429-833
ctcctgagctgcgccgtgccaggccgcccgccgggatgcagtgggccgtgggccggcggtgggcgtgggccgcgctgctcctggctgtcgcagcggtgctgacccaggtcgtctggctctggctgggtacgcagagcttcgtcttccagcgcgaagagatagcgcagttggcgcggcagtacgctggtgagcgggcagagggcagggaggggagcggccggcctgggagcggagcctagggttccgaaggcgccatccccggacctaggaccggtgccagccctgactccgccgcccctctgcctccgccagggctggaccacgagctggccttctctcgtctgatcgtggagctgcggcggctgcacccaggccacgtgctgcccgacgaggagctgcagtgggtgttcgtgaatgcgggtggctggatgggcgccatgtgccttctgcacgcctcgctgtccgagtatgtgctgctcttcggcaccgccttgggctcccgcggccactcggggcgctactgggctgagatctcggataccatcatctctggcaccttccaccagtggagagagggcaccaccaaaagtgaggtcttctacccaggggagacggtagtacacgggcctggtgaggcaacagctgtggagtgggggccaaacacatggatggtggagtacggccggggcgtcatcccatccaccctggccttcgcgctggccgacactgtcttcagcacccaggacttcctcaccctcttctatactcttcgctcctatgctcggggcctccggcttgagctcaccacctacctctttggccaggacccttgaccagccaggcctgaaggaagacctgcggatagacaggagcgggcaggcccgcacatatccacttgctggagcccatgtttacagacagggacatacaccatgcagatcctgagttcctgctgtatgagcagggatatccatgcttatgtatccaaacacagagacccatgggaacaaatgagacacatatagatactgagacctgtgtgtacagtaggaccatgcactcacacccatctggagagggagcccccggtataccaagggagccagttgtgttcagacacacacatcacagcttgactcactaactgaggcctttccatagctccacagcttcccacctcctccccaccaaaccggggttctagagttaaggatgggggagggtattatactgcctcagtctgactcctcaacccagcagcaatttgaggggatgagggggaagaggagctgccttttggaggcccccttcacctgcagctatgatgcccttccccttctcccctgtcctcaccatatgccttatccccattctactcccctgctatgcaagtgcccctgtggcttgtccccaaccccctcagcaacaaagctcagctggggaacgagagtaatttgaagaatgcttgaagtcagcgtcttccattccagaaagacccccattcttcctttgggggtatgatgtggaagctggtttcagcccaggacccaccactgaggagaggatctagacaggtgggcctaattccaaggggcccttcctggcctggagaaggccttttacacacacacaacacatacacacacacacacacacacacatatcacagttttcacacagcccctgctgcattctctgtccatctgtctgtttctattaataaagatttgttgatctgttcca

SEQ ID NO: 181474 - DNA, 840 bp, Homo sapiens
  Payload ID: 15742
  Gene Symbol: SIGMAR1
  Gene Name: sigma non-opioid intracellular receptor 1
  Uniprot ID: Q99720
  ENST ID: ENST00000477726
  CDS Start-End: 113-691
ggcggtggcgggggagcgcttcgtgggcagccggcgggctccgaggccgtgagcgcaaagcctcaggccccggctccctcctgagctgcgccgtgccaggccgcccgccgggatgcagtgggccgtgggccggcggtgggcgtgggccgcgctgctcctggctgtcgcagcggtgctgacccaggtcgtctggctctggctgggtacgcagagcttcgtcttccagcgcgaagagatagcgcagttggcgcggcagtacgctgggctggaccacgagctggccttctctcgtctgatcgtggagctgcggcggctgcacccaggccacgtgctgcccgacgaggagctgcagtgggtgttcgtgaatgcgggtggctggatgggcgccatgtgccttctgcacgcctcgctgtccgagtatgtgctgctcttcggcaccgccttgggctcccgcggccactcgggggagacggtagtacacgggcctggtgaggcaacagctgtggagtgggggccaaacacatggatggtggagtacggccggggcgtcatcccatccaccctggccttcgcgctggccgacactgtcttcagcacccaggacttcctcaccctcttctatactcttcgctcctatgctcggggcctccggcttgagctcaccacctacctctttggccaggacccttgaccagccaggcctgaaggaagacctgcggatagacaggagcgggcaggcccgcacatatccacttgctggagcccatgtttacagacagggacatacaccatgcagatcctgagttcctgctgtatgagcagggatatccatgcttatgt

SEQ ID NO: 181475 - DNA, 1582 bp, Homo sapiens
  Payload ID: 15742
  Gene Symbol: SIGMAR1
  Gene Name: sigma non-opioid intracellular receptor 1
  Uniprot ID: Q99720
  ENST ID: ENST00000353468
  CDS Start-End: 48-368
ggccccggctccctcctgagctgcgccgtgccaggccgcccgccgggatgcagtgggccgtgggccggcggtgggcgtgggccgcgctgctcctggctgtcgcagcggtgctgacccaggtcgtctggctctggctgggtacgcagagcttcgtcttccagcgcgaagagatagcgcagttggcgcggcagtacgctgggctggaccacgagctggccttctctcgtctgatcgtggagctgcggcggctgcacccaggccacgtgctgcccgacgaggagctgcagtgggtgttcgtgaatgcgggtggctggatgggcgccatgtgccttctgcacgcctcgctgtccgaggcgctactgggctgagatctcggataccatcatctctggcaccttccaccagtggagagagggcaccaccaaaagtgaggtcttctacccaggggagacggtagtacacgggcctggtgaggcaacagctgtggagtgggggccaaacacatggatggtggagtacggccggggcgtcatcccatccaccctggccttcgcgctggccgacactgtcttcagcacccaggacttcctcaccctcttctatactcttcgctcctatgctcggggcctccggcttgagctcaccacctacctctttggccaggacccttgaccagccaggcctgaaggaagacctgcggatagacaggagcgggcaggcccgcacatatccacttgctggagcccatgtttacagacagggacatacaccatgcagatcctgagttcctgctgtatgagcagggatatccatgcttatgtatccaaacacagagacccatgggaacaaatgagacacatatagatactgagacctgtgtgtacagtaggaccatgcactcacacccatctggagagggagcccccggtataccaagggagccagttgtgttcagacacacacatcacagcttgactcactaactgaggcctttccatagctccacagcttcccacctcctccccaccaaaccggggttctagagttaaggatgggggagggtattatactgcctcagtctgactcctcaacccagcagcaatttgaggggatgagggggaagaggagctgccttttggaggcccccttcacctgcagctatgatgcccttccccttctcccctgtcctcaccatatgccttatccccattctactcccctgctatgcaagtgcccctgtggcttgtccccaaccccctcagcaacaaagctcagctggggaacgagagtaatttgaagaatgcttgaagtcagcgtcttccattccagaaagacccccattcttcctttgggggtatgatgtggaagctggtttcagcccaggacccaccactgaggagaggatctagacaggtgggcctaattccaaggggcccttcctggcctggagaaggccttttacacacacacaacacatacacacacacacacacacacacatatcacagttttcacacagcccctgctgcattctctgtccatctgtctgtttctattaataaagatttgttgatctgttcca

SEQ ID NO: 181476 - DNA, 1082 bp, Homo sapiens
  Payload ID: 15743
  Gene Symbol: SPCS1
  Gene Name: signal peptidase complex subunit 1
  ENST ID: ENST00000233025
  CDS Start-End: 206-715
ggagacgcgggggcgccggcggccgttgggccgcgcaagtactgtcaaggacagttttcgggacgggggacgcggctccaggcacccaacagcactgacggcgaacacttcacgggcgcgcgatgcctcgacaaggcggccgccaccaccacctcagctgccctcgcgggcagcacggcgcggcaaaagcgcacgtcgcctagcgatggcgcggggcggggacacgggctgtaccggcccgtcggagacttccgcttccggggccgccgccatcgctctcccgggcttagaaggcccggctactgacgcgcagtgccagaccttacccctcacggtccttaagtctcggtcgccctcgcctcgcagcctgccacccgcgctcagctgcccgcctcctcagccagccatgctggagcatctgagctcgctgcccacgcagatggattacaagggccagaagctagctgaacagatgtttcagggaattattcttttttctgcaatagttggatttatctacgggtacgtggctgaacagttcgggtggactgtctatatagttatggccggatttgctttttcatgtttgctgacacttcctccatggcccatctatcgccggcatcctctcaagtggttacctgttcaagaatcaagcacagacgacaagaaaccaggggaaagaaaaattaagaggcatgctaaaaataattgaggttttcatgattcagcacctgcttttgtttctgtgagatgagctaaattgctttcataccccagataagagctaaaaccacctaatgctcttatggcacagctgtgtatagatttagttctctttatacttcatttctagcccagttgggttttgatttatataagtagtttagaccttctcttcataatcttgctctgagatggggaacagaacacacaagtatgaagtttctttcaggtgtaaataatgaaaaataaatgcctcataaatgatagtacaatgtaactatcaaagttttataattcattatgagttaaccattttaatgtttccaattaaacctcatagtgcaagttctttgtct

SEQ ID NO: 181477 - DNA, 822 bp, Homo sapiens
  Payload ID: 15743
  Gene Symbol: SPCS1
  Gene Name: signal peptidase complex subunit 1
  ENST ID: ENST00000423431
  CDS Start-End: 235-477
ggcacaaacaaggtgccgtgaatatttgctggttgcatgaatgaggacagcagtcccaccctgtcccgggagtgcctagaattccactgtttgtggccaacccagaatacataacctgggggccggagagccagctgggacccagaggcccgggttcctcagaacggtttctctccaaaacgtgggcatcccacctggctgacggattacaagggccagaagctagctgaacagatgtttcagggaattattcttttttctgcaatagttggatttatctacgggtacgtggctgaacagttcgggtggactgtctatatagttatggccggatttgctttttcatgtttgctgacacttcctccatggcccatctatcgccggcatcctctcaagtggttacctgttcaagaatcaagcacagacgacaagaaaccaggggaaagaaaaattaagaggcatgctaaaaataattgaggttttcatgattcagcacctgcttttgtttctgtgagatgagctaaattgctttcataccccagataagagctaaaaccacctaatgctcttatggcacagctgtgtatagatttagttctctttatacttcatttctagcccagttgggttttgatttatataagtagtttagaccttctcttcataatcttgctctgagatggggaacagaacacacaagtatgaagtttctttcaggtgtaaataatgaaaaataaatgcctcataaatgatagtacaatgtaactatcaaagttttataattcattatgagttaaccattttaatgtttccaattaaacc

SEQ ID NO: 181478 - DNA, 832 bp, Homo sapiens
  Payload ID: 15743
  Gene Symbol: SPCS1
  Gene Name: signal peptidase complex subunit 1
  Uniprot ID: Q9Y6A9
  ENST ID: ENST00000602728
  CDS Start-End: 170-478
cccgtcggagacttccgcttccggggccgccgccatcgctctcccgggcttagaaggcccggctactgacgcgcagtgccagaccttacccctcacggtccttaagtctcggtcgccctcgcctcgcagcctgccacccgcgctcagctgcccgcctcctcagccagccatgctggagcatctgagctcgctgcccacgcagatggattacaagggccagaagctagctgaacagatgtttcagggaattattcttttttctgcaatagttggatttatctacgggtacgtggctgaacagttcgggtggactgtctatatagttatggccggatttgctttttcatgtttgctgacacttcctccatggcccatctatcgccggcatcctctcaagtggttacctgttcaagaatcaagcacagacgacaagaaaccaggggaaagaaaaattaagaggcatgctaaaaataattgaggttttcatgattcagcacctgcttttgtttctgtgagatgagctaaattgctttcataccccagataagagctaaaaccacctaatgctcttatggcacagctgtgtatagatttagttctctttatacttcatttctagcccagttgggttttgatttatataagtagtttagaccttctcttcataatcttgctctgagatggggaacagaacacacaagtatgaagtttctttcaggtgtaaataatgaaaaataaatgcctcataaatgatagtacaatgtaactatcaaagttttataattcattatgagttaaccattttaatgtttccaattaaacctcatagtgc

SEQ ID NO: 181479 - DNA, 4254 bp, Homo sapiens
  Payload ID: 15743
  Gene Symbol: SPCS1
  Gene Name: signal peptidase complex subunit 1
  ENST ID: ENST00000619898
  CDS Start-End: 411-920
aggccccggagcccagcccgttgtctggccgcccgcgttccctgcacgctgggccgagcacacttgccctctagctccgtggcagccgcgcagccccactacgcccagccagcccgcagcggtaaccgctagagcgtcgcgccaagcaggcgccgcggggcagccctgccgccggggtcctcgcagggaaaaaggccgtcgccatggagacgcgggggcgccggcggccgttgggccgcgcaagtactgtcaaggacagttttcgggacgggggacgcggctccaggcacccaacagcactgacggcgaacacttcacgggcgcgcgatgcctcgacaaggcggccgccaccaccacctcagctgccctcgcgggcagcacggcgcggcaaaagcgcacgtcgcctagcgatggcgcggggcggggacacgggctgtaccggcccgtcggagacttccgcttccggggccgccgccatcgctctcccgggcttagaaggcccggctactgacgcgcagtgccagaccttacccctcacggtccttaagtctcggtcgccctcgcctcgcagcctgccacccgcgctcagctgcccgcctcctcagccagccatgctggagcatctgagctcgctgcccacgcagatggattacaagggccagaagctagctgaacagatgtttcagggaattattcttttttctgcaatagttggatttatctacgggtacgtggctgaacagttcgggtggactgtctatatagttatggccggatttgctttttcatgtttgctgacacttcctccatggcccatctatcgccggcatcctctcaagtggttacctgttcaagaatcaagcacagacgacaagaaaccaggggaaagaaaaattaagaggcatgctaaaaataattgaggttttcatgattcagcacctgcttttgtttctgtgagatgagctaaattgctttcataccccagataagagctaaaaccacctaatgctcttatggcacagctgtgtatagatttagttctctttatacttcatttctagcccagttgggttttgatttatataagtagtttagaccttctcttcataatcttgctctgagatggggaacagaacacacaagtatgaagtttctttcaggtgtaaataatgaaaaataaatgcctcataaatgatagtacaatgtaactatcaaagttttataattcattatgagttaaccattttaatgtttccaattaaacctcatagtgcaagttctttgtctaaagggtcttctgttgattattctgcaaggaagataattaataaaagcctaagttagaagttcgtgcttctggccaggtgcagtggctctcacctataatcccagcacttgaggaggctaaggcaggaggatgacttgagcccaggagtttgagacatttcatggtatgtaattaatagttgtcattagaacattagttccatgagaacggggactttgttttgctcactgctgtctacccagtacatagaagagtacacgatgcattgttaagtacttaagatttattgaatgagaactgcattgtacaatatggtgccactagacacgtctatttaattaaaattaaaatataaaactctaaaactagccatgattcaaaggttcaatagctatatgtgactagtggctaccatataaaacatttccatcacaaagttccatttatcagatcttatatagaaccttgaataaaatttaatagacaagtgattttgtatttaacatttcacctttattgaatgcctataaggccatttgaataacggatcatgtacaaagcaacaggaaaaaaaaaactgcaagcagtaaaggttgtgcaggtgatattcagtaacactgcagtgtagccagagcaaggacataaaacttccttagctttgtaagtctgtggaaatcaaaacttctaaaagagaaaaccgaaatcagaattactgacactttaggccaggcatggtgcctcaagcctgtaatcccagcatttagggaggccaaggcaggcagatcacctgaggtcaggagttcaagaccagcctggccaacatggtgaaactccatctctactaaaaataacgaaaatcagccaggcatggtggtgtgtgcctgtaatcccagctactcgggaggctgagggaggggaacttgaacccaggaggcgtaggctgcagtgagccaagatcgcaccactgtactccagcctgggcaacaagaagactccatctcaaaaaaaaaaaaaaaagaatgattgacattttagaaccaatgccaaaagagtaacacatcaaagtctctgaactgtggccaaaggtatattcggaagaaaattcacagtcttaaagatgagtttttaaattaatttaggaagatgaattaagcactcaagtaaaaacgataaaagtgggaagaaaagatgtttaaacaaaataaaaatatacagtatggtaattaataagaaagtatgggggaagtcaggtgtggtggttcatgcctataatcccagcactttcagaggccgatgcaggaggactgcttgaatgcagtttgagaccagcctgggcaacacagacttcctctccacaaaaaattttaaaaattagccaggtgtggtggtgcatgcctgtggtcctagctacttgaggggctgaggtgggaggatcacttaagcccaggaggtcaaggctgcagtgagctatgatcacctcactgcactccaggctgggtgacagagcaagaccctgtctcaaaaaaaaaaaaaaaaaaaaaagatatgggtgagattcctttaattctaataaaatacctactttataccaatacattagaaaaattaagtaaaactgatgactctccagaacgatgtggatttccaaaacatgcacggaaaggtgaatagctcaaggataccaagtttgccaaagatttgttcccaactgggcattgggacttgatggttttgcaagttgagttctagcaaacccttcaaagtgaaaataagagttatcagaaaccaggctgtgagcactgtaaaagggcaggaagtattgttttattcaccactatatccccagctcctggcagagaacctggcacacagtaaactctaaataaaaatctgttaagtgtgccgggcgcggtggctcacgcctgtaatcccagcactttgggaggccgaggcgggcagatcacgaggtcaggagattgagaccatcctggctaacacggtgaaaccctgtctctactaaaaaaatacaaaaaaattagccgggcatggtggcgggcaactgtagtcccagctactcgagaggatgaggtaggagaatggagtgaacctgggaggcggagcttgcagtgatctgagattgggccactgcacttcagcctgggtgacagagcaagactgtgtcttaaaaaaaaaaaaaaattgttaagtggctgtaaagggaacatttcattagagtatttgtgtgtgtgtgtaattttcaaagatagatatatttttagttatagaaactgaaaacagggctgggcacagtggctcattcctgtaatcctggcactttgggaggctgaggtgagtggattgcttgagcccaggagttctgagatcagcctgggcaatgtggtgtaaccctgtctctacaaaaaatacaaaaactagccaggtgtggtggcacacgcctgtggtctcagctactagggaggctcaggcaggaataccacttgagccccagaagtggaggttgcagtgagttgagatcatgccactgcactccagcctgactgacagagtgaaactctgtctcaaaaaaaaaacacctgaaaacatttctggagcaatatttatttttagagtccctcgaatacagaagtgaaaatgtactattcaagacttgtatttaacttcataaaatttctttcctagatgggtattacctcttattaaacaactaataaaatatgtgctatataatcatacatttaaaacatggaaagacaactaatatcttacagtacatgaagacaaacttcaggagacaaacattaaatatatccaaaaactaaatggacctggactttgcttacaaattgcttaaatggaaatgaaatttgtgtttaagaaatgttttcactgatggaaaaataaatctaacaaaaccattatgtaaaaacatactgatttacaaagcc

SEQ ID NO: 181480 - DNA, 2708 bp, Homo sapiens
  Payload ID: 15744
  Gene Symbol: SPCS2
  Gene Name: signal peptidase complex subunit 2
  Uniprot ID: Q15005
  ENST ID: ENST00000263672
  CDS Start-End: 40-720
agacaagtcggaggggagggagacgcagaggcggacaagatggcggcggcagctgtacagggcgggagaagcggtggtagcggaggctgtagtggggctggtggtgcttccaactgcgggacaggaagtggccgtagcggcttgttggataagtggaagatagatgataagcctgtaaaaattgacaagtgggatggatcagctgtgaaaaactctttggatgattctgccaaaaaggtacttctggaaaaatacaaatatgtggagaattttggtctaattgatggtcgcctcaccatctgtacaatctcctgtttctttgccatagtggctttgatttgggattatatgcacccctttccagagtccaaacccgttttggctttgtgtgtcatatcctattttgtgatgatggggattctgaccatttatacctcatataaggagaagagcatctttctcgtggcccacaggaaagatcctacaggaatggatcctgatgatatttggcagctgtcctccagtcttaaaaggtttgatgacaaatacaccttgaagctgaccttcatcagtgggagaacaaagcagcagcgggaagccgagttcacaaagtccattgctaagttttttgaccacagtgggacactggtcatggatgcatatgagcctgaaatatccaggctccatgacagtcttgccatagaaagaaaaataaagtagccaattctaaaagtagccctctttctcctggatcttgctgaattagtggcttggggggtgggggagataaaaagaacttaaaatgggtaaagtaagaaatgttaaaaagtccctgttttgtcctgaaattttagtctattctgggtaaataggattttctgacacagatatgagaagttgtagctctgatgtctagctgtagtctccttgatctgctgattgcattattttaatttgcttttctgggaaagcagttttgctaaaagctgtacagactttttcttttgtacctagcagtactttatatagtatagctttgggccatgtagcattttaagactcaattttaaaaaattattaatctgttgctgactcttaattcctatttcaatatgtgtttccttgaagaattcaggatacaacttcttgtgtatgacagctttccttcacacactatttttgtgggtgtgtatatatctgatttgggaagaatttaaaaaacacatagctttttaatttgtttgaaacagactttctgcctgttacatttttgcttttaaccaattaaagaagccaatggcattttagttttatattgtgttttccactagtatatccctgttgatttgtttgtgccttttattaactgccattttctaaaatttttttcaataaaaggaaggaagatgtgaaaaaaatggagtcatagttttgatggagagaacagagaaacaagtgttaacatctttctactataggtttttttcatttttaggctattttacttgtcaaaggcccctgagaacctgtagctaaggaactcttagctttccagtgataataacaataataacaacattctgtacttactttgtgccagaaatgctccaagtactttacatgtgttaataatgctcacagcaatcctaagaggcaggtgctgttattatccccattttacacatgaggaaactgagatacaaaagttaaataattgtcacacagctagtgatagaactgggattcaaacctggggagtccggcttcagagtttgtggtcctgcagagacaaaacagccgcttttccagtattttcccagtatggtcagagaagacctgggtgcttgccaagatcctttgacctttaggaatatttccctacagccttacaaaacatcaattttggctgagcctagtacccaacactatattcagtttgtaagaaattaccattatcacatttcctgtttgtcttggagaggttgtcctatctcgcaccacatggtagggaattgtgaacaacactggacagaaagttaaagccttggattctgtactcttcattcctgtaaaccttgggtaagtttcggaattctctgtgagcttcttaaagtttttgaaagcatgtaaccggataagtgtatttttacaatggaggagttacagtcatcttggtatttgtgggagattggttccaggatccccaagcataccaaaatccaaggatgctcaagtcccttatataaaatggtatagcatttgcatataacctacacacatcctcccatatacttttaatcacctctggattacctataatacctaatataatgtaaatgctatgtaaatagttatactgcattggttttttaatttatattttttgttattttttaaaatatatttttaatccatggttggttaaatctgtagatatagagggccaactgtactgttagacacaagggtctcgaggcttgcagatagagactgaataaccctctccatgatgatcccttagagttcccccactgtgcctttttctttacatgtgcatgcaaacatgtgtctccacatacattttttttaacaaaaattgaattatgttgatatatgtcctgtaatttgtgttttaaacttaatatatcttaggcattttccctgtgtgtgtgtataatgcagctattaaaaatgagtctgaggccagg

SEQ ID NO: 181481 - DNA, 612 bp, Homo sapiens
  Payload ID: 15744
  Gene Symbol: SPCS2
  Gene Name: signal peptidase complex subunit 2
  ENST ID: ENST00000530257
  CDS Start-End: 26-499
ggagggagacgcagaggcggacaagatggcggcggcagctgtacagggcgggagaagcggtggtagcggaggctgtagtggggctggtggtgcttccaactgcgggacaggaagtggccgtagcggcttgttggataagtggaagatagatgataagcctgtaaaaattgacaagtgggatggatcagctgtgaaaaactctttggatgattctgccaaaaaggagaagagcatctttctcgtggcccacaggaaagatcctacaggaatggatcctgatgatatttggcagctgtcctccagtcttaaaaggtttgatgacaaatacaccttgaagctgaccttcatcagtgggagaacaaagcagcagcgggaagccgagttcacaaagtccattgctaagttttttgaccacagtgggacactggtcatggatgcatatgagcctgaaatatccaggctccatgacagtcttgccatagaaagaaaaataaagtagccaattctaaaagtagccctctttctcctggatcttgctgaattagtggcttggggggtgggggagataaaaagaacttaaaatgggtaaagtaagaaatgttaaaaagtccc

SEQ ID NO: 181482 - DNA, 772 bp, Homo sapiens
  Payload ID: 15744
  Gene Symbol: SPCS2
  Gene Name: signal peptidase complex subunit 2
  ENST ID: ENST00000526361
  CDS Start-End: 204-467
gggagacgcagaggcggacaagatggcggcggcagctgtacagggcgggagaagcggtggtagcggaggctgtagtggggctggtggtgcttccaactgcgggacaggaagtggccgtagcggcttgttggataagtggaagatagatgataagcctgtaaaaattgacaagtgggatggatcagctgtgaaaaactctttggatgattctgccaaaaaggaaagatcctacaggaatggatcctgatgatatttggcagctgtcctccagtcttaaaaggtttgatgacaaatacaccttgaagctgaccttcatcagtgggagaacaaagcagcagcgggaagccgagttcacaaagtccattgctaagttttttgaccacagtgggacactggtcatggatgcatatgagcctgaaatatccaggctccatgacagtcttgccatagaaagaaaaataaagtagccaattctaaaagtagccctctttctcctggatcttgctgaattagtggcttggggggtgggggagataaaaagaacttaaaatgggtaaagtaagaaatgttaaaaagtccctgttttgtcctgaaattttagtctattctgggtaaataggattttctgacacagatatgagaagttgtagctctgatgtctagctgtagtctccttgatctgctgattgcattattttaatttgcttttctgggaaagcagttttgctaaaagctgtacagactttttcttttgtacctagcagtactttat

SEQ ID NO: 181483 - DNA, 498 bp, Homo sapiens
  Payload ID: 15744
  Gene Symbol: SPCS2
  Gene Name: signal peptidase complex subunit 2
  ENST ID: ENST00000526883
  CDS Start-End: 1-498
atcacaaccctacgcacgcttggagcctgcccttgccctcatcacacttcaaacctggacccggtcctctttagaacttcttcttttctcgcaagtgttctggtcctggtcgccacacctttttcgtggaagatagatgataagcctgtaaaaattgacaagtgggatggatcagctgtgaaaaactctttggatgattctgccaaaaaggtacttctggaaaaatacaaatatgtggagaattttggtctaattgatggtcgcctcaccatctgtacaatctcctgtttctttgccatagtggctttgatttgggattatatgcacccctttccagagtccaaacccgttttggctttgtgtgtcatatcctattttgtgatgatggggattctgaccatttatacctcatataaggagaagagcatctttctcgtggcccacaggaaagatcctacaggaatggatcctgatgatatttggcagctgtcctccagt

SEQ ID NO: 181484 - DNA, 839 bp, Homo sapiens
  Payload ID: 15744
  Gene Symbol: SPCS2
  Gene Name: signal peptidase complex subunit 2
  ENST ID: ENST00000532972
  CDS Start-End: 22-795
ggagacgcagaggcggacaagatggcggcggcagctgtacagggcgggagaagcggtggtagcggaggctgtagtggggctggtggtgcttccaactgcgggacaggaagtggccgtagcggcttgttggataagagacaagctctcactatattgcccaggctggactcgagctcctgggctcaagctgttctgccacctcagcctcccaagtatctgggatggcagtggaagatagatgataagcctgtaaaaattgacaagtgggatggatcagctgtgaaaaactctttggatgattctgccaaaaaggtacttctggaaaaatacaaatatgtggagaattttggtctaattgatggtcgcctcaccatctgtacaatctcctgtttctttgccatagtggctttgatttgggattatatgcacccctttccagagtccaaacccgttttggctttgtgtgtcatatcctattttgtgatgatggggattctgaccatttatacctcatataaggagaagagcatctttctcgtggcccacaggaaagatcctacaggaatggatcctgatgatatttggcagctgtcctccagtcttaaaaggtttgatgacaaatacaccttgaagctgaccttcatcagtgggagaacaaagcagcagcgggaagccgagttcacaaagtccattgctaagttttttgaccacagtgggacactggtcatggatgcatatgagcctgaaatatccaggctccatgacagtcttgccatagaaagaaaaataaagtagccaattctaaaagtagccctctttctcctggatcttgctgaatt

SEQ ID NO: 181485 - DNA, 2711 bp, Homo sapiens
  Payload ID: 15744
  Gene Symbol: SPCS2
  Gene Name: signal peptidase complex subunit 2
  ENST ID: ENST00000610881
  CDS Start-End: 40-723
agacaagtcggaggggagggagacgcagaggcggacaagatggcggcggcagctgtacagggcgggagaagcggtggtagcggaggctgtagtggggctggtggtgcttccaactgcgggacaggaagtggccgtagcggcttgttggataagtggaagatagatgataagcctgtaaaaattgacaagtgggatggatcagctgtgaaaaactctttggatgattctgccaaaaaggtacttctggaaaaatacaaatatgtggagaattttggtctaattgatggtcgcctcaccatctgtacaatctcctgtttctttgccatagtggctttgatttgggattatatgcacccctttccagagtccaaacccgttttggctttgtgtgtcatatcatcctattttgtgatgatggggattctgaccatttatacctcatataaggagaagagcatctttctcgtggcccacaggaaagatcctacaggaatggatcctgatgatatttggcagctgtcctccagtcttaaaaggtttgatgacaaatacaccttgaagctgaccttcatcagtgggagaacaaagcagcagcgggaagccgagttcacaaagtccattgctaagttttttgaccacagtgggacactggtcatggatgcatatgagcctgaaatatccaggctccatgacagtcttgccatagaaagaaaaataaagtagccaattctaaaagtagccctctttctcctggatcttgctgaattagtggcttggggggtgggggagataaaaagaacttaaaatgggtaaagtaagaaatgttaaaaagtccctgttttgtcctgaaattttagtctattctgggtaaataggattttctgacacagatatgagaagttgtagctctgatgtctagctgtagtctccttgatctgctgattgcattattttaatttgcttttctgggaaagcagttttgctaaaagctgtacagactttttcttttgtacctagcagtactttatatagtatagctttgggccatgtagcattttaagactcaattttaaaaaattattaatctgttgctgactcttaattcctatttcaatatgtgtttccttgaagaattcaggatacaacttcttgtgtatgacagctttccttcacacactatttttgtgggtgtgtatatatctgatttgggaagaatttaaaaaacacatagctttttaatttgtttgaaacagactttctgcctgttacatttttgcttttaaccaattaaagaagccaatggcattttagttttatattgtgttttccactagtatatccctgttgatttgtttgtgccttttattaactgccattttctaaaatttttttcaataaaaggaaggaagatgtgaaaaaaatggagtcatagttttgatggagagaacagagaaacaagtgttaacatctttctactataggtttttttcatttttaggctattttacttgtcaaaggcccctgagaacctgtagctaaggaactcttagctttccagtgataataacaataataacaacattctgtacttactttgtgccagaaatgctccaagtactttacatgtgttaataatgctcacagcaatcctaagaggcaggtgctgttattatccccattttacacatgaggaaactgagatacaaaagttaaataattgtcacacagctagtgatagaactgggattcaaacctggggagtccggcttcagagtttgtggtcctgcagagacaaaacagccgcttttccagtattttcccagtatggtcagagaagacctgggtgcttgccaagatcctttgacctttaggaatatttccctacagccttacaaaacatcaattttggctgagcctagtacccaacactatattcagtttgtaagaaattaccattatcacatttcctgtttgtcttggagaggttgtcctatctcgcaccacatggtagggaattgtgaacaacactggacagaaagttaaagccttggattctgtactcttcattcctgtaaaccttgggtaagtttcggaattctctgtgagcttcttaaagtttttgaaagcatgtaaccggataagtgtatttttacaatggaggagttacagtcatcttggtatttgtgggagattggttccaggatccccaagcataccaaaatccaaggatgctcaagtcccttatataaaatggtatagcatttgcatataacctacacacatcctcccatatacttttaatcacctctggattacctataatacctaatataatgtaaatgctatgtaaatagttatactgcattggttttttaatttatattttttgttattttttaaaatatatttttaatccatggttggttaaatctgtagatatagagggccaactgtactgttagacacaagggtctcgaggcttgcagatagagactgaataaccctctccatgatgatcccttagagttcccccactgtgcctttttctttacatgtgcatgcaaacatgtgtctccacatacattttttttaacaaaaattgaattatgttgatatatgtcctgtaatttgtgttttaaacttaatatatcttaggcattttccctgtgtgtgtgtataatgcagctattaaaaatgagtctgaggccagg

SEQ ID NO: 181486 - DNA, 4571 bp, Homo sapiens
  Payload ID: 15745
  Gene Symbol: SPCS3
  Gene Name: signal peptidase complex subunit 3
  Uniprot ID: P61009
  ENST ID: ENST00000503362
  CDS Start-End: 114-656
gcgctcccggaacgcgcgcaccgcagacggcgcggatcgcagggagccggtccgccgccggaacgggagcctgggtgtgcgtgtggagtccggactcgtgggagacgatcgcgatgaacacggtgctgtcgcgggcgaactcactgttcgccttctcgctgagcgtgatggcggcgctcaccttcggctgcttcatcaccaccgccttcaaagacaggagcgtcccggtgcggctgcacgtctcgcggatcatgctaaaaaatgtagaagatttcactggacctagagaaagaagtgatctgggatttatcacatttgatataactgctgatctagagaatatatttgattggaatgttaagcagttgtttctttatttatcagcagaatattcaacaaaaaataatgctctgaaccaagttgtcctatgggacaagattgttttgagaggtgataatccgaagctgctgctgaaagatatgaaaacaaaatattttttctttgacgatggaaatggtctcaagggaaacaggaatgtcactttgaccctgtcttggaacgtcgtaccaaatgctggaattctacctcttgtgacaggatcaggacacgtatctgtcccatttccagatacatatgaaataacgaagagttattaaattattctgaatttgaaacaacatatttttatacttaatgaattgtatctcattaatctcttcccttacatcttcatgtattgttggtttgttttttggttttgggtttttttttttttttttttggtataagaactaacatcaaaaggcctgtttaaagggaaaggttaatgggctacttaatattatgaacaaaacaaaaaaacaaggctgccacagtggaatattatcttacaagaataagaactacataaaacagatttgtaaaaaatacatatttgaagtattccctgtatttccattattctttatggaatataaagtaagcatgaaaggtagttaaaactttcaggtgcctgtagagtcataataactgtattttatgccttgcattcacgcaaattcacattggatgtgatttaaaagtagacattctctttttcctcttttaggatatgtttgattactggaaaattaatatggttatttgttagaagtctggtttataaaaaagccaaaagtgatggaatttattccatttgtcttaggaaggcccataatacttgtttttcttacatgtgactagcaactttctccacttaaagactaaatacctctttatatgatgtaaattattctaattcattttaaaatcttttaggtcagcaaaatgtgtgtcttcagtgctttctctaaaaacgttcctttatagctttgtacttttttttttagcgttgccattgaaagttaaaatgtttgcatggtttaccctctgagttatgtttcttctagtgagcatgcctgctgtcactaagtgaattatttactactttttgtaggtctatattttaataattattgggataataataattgtggtatgctttccatttacaaaccactcatatactttagtgtatgtcatcctcaataatctaatgaggtaagtagtataagtgttagctctttgcagataagaaactgaaacccagaagtttattgaattgcttcattgttacctagccagcaaggagtggaattaaaacttgaactcagatcttctaattttctgagctcatcctttctcttatacctcagattgcagactaatcaaattttacttaaaaccttcctgatatttttgttaccctggacaccctttctattctagaaaaggtttcccattttatatggaagtgactaattttcaagctgccaacaacttatatcgaggtaatattttattctctgaataaattcatttcacttatattaaaagcataaggaaatctacatgtatgtaaaaataacttagaaattcagtacataatacatgattgaatacatgatcgtatttaacatgttttttttttctgcagtggacaaataaacatcctcaaagtagcaactgcaaatcagttacccttagaaaagcaagaccaaacactgtagttacactattagcagtgaccaaaaagggctaatattttctaagaatagtttaaattacagacatttgttatatttaccttatgtgaaatacatcactatttaattacattaattttaacatctgttgtgtggagttgtatagttcatgcaaaagcctgtgggtatgggtttttcaaaccagcagaaaggtcaaaggtacctgaatgctaaactgcctggctcccagctttttcattaaacttttcagggtcttggtttctttatctgtaaaatgacagagttggaccagttaactttaatggccatccttttacaccacacaagttgataaaatttatctgttcagcaaagagattgaacaaaaaagcacgttagtaatatgaagacaggaaaacgaatgaaagtctaacacataactcatattgatttactttatttctgttagattttacactctgaaaatttcacctcatttagtttgtacaaatactagacatggaaacttaaaatgtgcaggtgtcaaagcttaaaaatcaggtgtgtcctctttaaaggcatgtgcgataagcctgcagtcttaaccagacctggtaccagtttaacagttcatgatacttctgtgatgagtggatctgttagtctggtagagattaatgttgaaatttacttgaattacagttatttgacaagcccactttttttggagtttggtgaggaagataagtaaaaatgcccaactagtacaatgtggagaaagttttctgtttgcttgactaagggaaattgctcagaaaaagaatgctccaacatgggaataaggaccttcagtctcaggaactcatttttgggtgcagtttctacatttaaaaaattgacttgtgttcagtttgataaccagttcatttgctttagtctcagtgttttaaagaagtctcataatgttctacaaagacacaaagcttcaggcttatacaaaactgagtatgattagaaatacctgagcccagaaatgattctgagaaaagagaataatttgaagacacttatttaaaagtaattatggttagaaatgaattaatttaaaaatgtgttcacatatccctttctctaacagtttaacctagacaaacatctgtatcagtatttttttattcccctgattgattacatttggtttctttattctgaaaggaaaataacaaaaacttcagaaattcctaagggtgtaataagaaagtgggttttgagtttcctttcctggaattattttacagttctttggtgggtctcgtcagccaattcatagctgggctttaagattatcatcttagagatgatagatgggctttttaaagatttcatcttagagatgaaaagctgggctttttctctaagatgataatcttaaagcccagctattaattgataatgaacatttttcactatttttttttctatctgaagcttagagatctagagctttggatctttcgggtatatgtcaatggaggtattattttataatactttgcattgacatgaagtgggttcatgggggaaaaccatgagctgtgaacattggtagcaaacaagcatatattcatttcaaaactttccttgcttttagcagagagaagcctgtatatgttacatgtgtgactttcagtagtttaaagagatgtttcaaaaaattgttgcatgtttttgatgcaatttgggaaattgtttacttcacaatgtagtcattcataaaaaaattcatgaaaatactgaacatatgtttgaggatttttcttttcctttttaaatttttttattttttctgagacggagatctgctcttacgcccaggctagagtgaagtggcgcgatcttggcttactgcaacctccaccccccaggttcaagcgattctcctgcctcagcctccggagtagctgggattacaggcgcccgccaccacgtccggctaatttttgtattttcagtagagacggggttttgctatgttggccaggctggtctcaaactcctgacctcaagtgatccacctgcctcggcctcccaaagtgttaggataacaggtgtgagccaccgtgcccggctgaagatttttcttaattgcaataaatattcagcattttttctaatgaaaatgaattttgtttaccagtaaaagtatgcattttaaaagactttcagatttatgctttttacgtgaagctgctaaactaaaagtaaatggaagaaaccaagtctagtaggttttttctttttttttgtgggggtgggatgggggaggttagttacacttaaaatatcttctccagagactgtatgctcctatactagactgtaagctctttgagggcagtctgtcagatttatctttgtatcttccccagcgcctagtgtagtgccttgcacataataggcgcccaataaatattgatgaagaatgaa

SEQ ID NO: 181487 - DNA, 7372 bp, Homo sapiens
  Payload ID: 15746
  Gene Symbol: SPPL2A
  Gene Name: signal peptide peptidase like 2A
  Uniprot ID: Q8TCT8
  ENST ID: ENST00000261854
  CDS Start-End: 276-1838
gtagcgccgggacgccgggacgcctggataccgggagagcgctgggactctccgagcccggcgcgggggtttccgcatcttacgggcggggccggaagaggaagtcgcgctgctgtggcggccgctgtagcagcggcggtccagtcgtagcccggccgcccgcgcctgtccggtccggtccggccacggaggcagcgcagcggcgggactccgagcctaccccgccgagtgagctgcgccgcaccgtgccgtcccacccggcacccaccagtccgatggggccgcagcggcggctgtcccctgccggggccgccctactctggggcttcctgctccagctgacagccgctcaggaagcaatcttgcatgcgtctggaaatggcacaaccaaggactactgcatgctttataacccttattggacagctcttccaagtaccctagaaaatgcaacttccattagtttgatgaatctgacttccacaccactatgcaacctttctgatattcctcctgttggcataaagagcaaagcagttgtggttccatggggaagctgccattttcttgaaaaagccagaattgcacagaaaggaggtgctgaagcaatgttagttgtcaataacagtgtcctatttcctccctcaggtaacagatctgaatttcctgatgtgaaaatactgattgcatttataagctacaaagactttagagatatgaaccagactctaggagataacattactgtgaaaatgtattctccatcgtggcctaactttgattatactatggtggttatttttgtaattgcggtgttcactgtggcattaggtggatactggagtggactagttgaattggaaaacttgaaagcagtgacaactgaagatagagaaatgaggaaaaagaaggaagaatatttaacttttagtcctcttacagttgtaatatttgtggtcatctgctgtgttatgatggtcttactttatttcttctacaaatggttggtttatgttatgatagcaattttctgcatagcatcagcaatgagtctgtacaactgtcttgctgcactaattcataagataccatatggacaatgcacgattgcatgtcgtggcaaaaacatggaagtgagacttatttttctctctggactgtgcatagcagtagctgttgtttgggctgtgtttcgaaatgaagacaggtgggcttggattttacaggatatcttggggattgctttctgtctgaatttaattaaaacactgaagttgcccaacttcaagtcatgtgtgatacttctaggccttctcctcctctatgatgtattttttgttttcataacaccattcatcacaaagaatggtgagagtatcatggttgaactcgcagctggaccttttggaaataatgaaaagttgccagtagtcatcagagtaccaaaactgatctatttctcagtaatgagtgtgtgcctcatgcctgtttcaatattgggttttggagacattattgtaccaggcctgttgattgcatactgtagaagatttgatgttcagactggttcttcttacatatactatgtttcgtctacagttgcctatgctattggcatgatacttacatttgttgttctggtgctgatgaaaaaggggcaacctgctctcctctatttagtaccttgcacacttattactgcctcagttgttgcctggagacgtaaggaaatgaaaaagttctggaaaggtaacagctatcagatgatggaccatttggattgtgcaacaaatgaagaaaaccctgtgatatctggtgaacagattgtccagcaataatattatgtggaactgctataatgtgtcattgattttctacaaatagacttcgactttttaaattgacttttgaattgacaatctgaaagagtcttcaatgatatgcttgcaaaaatatatttttatgagctggtactgacagttacatcataaataactaaaacgctttgcttttaatgttaaagttgtgccttcacattaaataaaacatatggtctgtgtagtttccgagatgtactatatacagtatatttttctaaaaaaaaatgccttgacccacccctatacttttttttaacgaaatctgtttctttcagctctgatggtagatacaagtagttactatttctgaatgggttttactgtaaagaattatgcaaattggccaggcgcggtggctcacgcctgtaatcccaacactttgggaggccaaggcgggcggatcacgaggtcaggagatcgagaccatcctggctaacacggtgaaacccctctctactaaaaataccaaaaattagctgggcgtggtggagggtgcctgtagtcccagctactgggaaggctgagacaggagaatggcgtgaacccgggaagtggagcttgcagtgagccaagatcacgccactgcactccagcctgggcgacagagtgagactccatcccaaaaaaaaagatttatgcaaattatatctgctctgtagaaataactgtttaacaccatgcaagaaggcggttcaacggtgaaaatttggaccttatatcactgcagaggttagaaatacataattttggaaatataagtgcatatttttgtagtatttttttaaacccaatcctttcataaacttgagaactgaaattacttcagactgcacgtgtattatattaagaacatttttccagatatagagaaacataatatatagaactagtcactaaaaggagacagacactgaaatctagttttcattggtttgacagccttttttttttaaatgtagcttaaatttcagtactaacattcagtttcactttggtatttctgatctttgcaatttggttctgttaatgttaaggtttgattttttaaaaaaattatttttcttaagaaattatgtattaatacatatggctcatcgttgaatacagcattcctaacattatcccacattcccccactcccacccgttatctttttttcttcctgatgcccaccccttttcccataggtaatgattcttaatcttggtggaggatgtacaaagtgcggttcagagaaaagaattggcaacaacagcaagagacttggtgttagtctcagtttaattacaatacaaggaagagttgagtaatttgccgcatctcaagaccttgtatctcagttttctttttttttttttttttttttttgagacggagtctcgctctgtcgcccaggctggagtgcagtggcgggatctcggctcactgcaagctccgcctcccgggttcacgccattctcctgcctcagcctcccaagtagctaggactacaggcgcccgccactacgcccggctattttttgtagttttagtagagacggggtttcaccgttttagccgggatggtctcgatctcctgacctcgtgatccgcccgcctcggcctcccaaagtgctgggattacaggcgtgagccaccgcgcccggccatatctcagttttctaatctgtaaaatgagtaggttagaccagctaatcactctggtaccttccaacttgaaaaaagttttttccccattctttggtaaattttagatgtggcctgaacattctcctggaagtcagaggtcaaattatctttccattttcttttattttagtaagaatttcgcaaatgacaagtgataacaaaggcagcaggatttttcatttctctgtaaataatgtataaaatatgtgaacagaactatatctttcatctaaggccagttcaatttattaaaaataaaactaatgccttttaaaattgatcagacctttgatacttgaactaaattttgcattagagactttttaaaaattgttcgcttttgctgaataaattgcaaatagagaagcttcattgacagtcagtccctctctgcttaatgcagttatgggtcctttcgtttatggcaaatgacttacctgacaagagttaattttgcctccattgtatcaagtttgaatattttccaagaaatctgatttatttggcagactctgagagagagaacagattaagtgccgttttaaaactctgtattttcatttataataataaaatatttgccaaaatacagctgttttgtaaaattatctgcaccctcatccaagctttatatttaatagccttaatcacattttatgaagaatgttaaagaaaattttttttttactacatcgaaatgagataattaatttcttttttttttttttggaaatggagtctccctctgtcacccaggctggagtgcagtagcaagatcttggctcactacaacctctgcctcctggttcaagcaattttcctgcctcagcctcccaagtagacgggattacaggtgcgtgccaccacacctggctaatttttgtatttttagtagagacggggtttcaccttgttggtcaggctggtcttgagctcctgacctcatgatctgcccgcctcagactccccaagtgctgggattgcaggcatgagccaccgcgcctggcaaaataagataatttctcaaaataatttggtttcatataactggagtagtaattaatattttaacttcatcaactagatgtatctcctcagtagcatagtaactggtacatccagaaatctgaaatccgagttacttgatacaaattctactttatctaaccattagttattaaggaggtaaaatcttgttctaatttgctattaaaatcttattggttaaatagaaataagaaaaagtataattaagtttcttcatcctcaatgtcaactttatattgtaattaaatgtgtagcaaccaagctgacaatagtgattaagaaattaaagtacagaaatattttatttggggactcaaaatgaacaaaagatagataagattaaaatttcacttaaaaagctgccatctcttcctctcttgccctcccaccaccaataactttaaggggaagagaagctggttttttccctaaacatgtctttaaaataatgatacactgtatttattaattcttgatgcaaaaaaaaaaaagttagaaaatccctttgaacatttttgtggcttatcaacagaaatcactatctcaaattgtaatgtagattacttttgtctcagtttagtttagcaaaaataaatgtgaggcttgtggggaaagaccttgatattctaatacattatattttcttctagcttgtagatttttttttttttttttttttgagacagagtttcgctctttttgcccaggctggagtgcaatggcatgatatcagctcactgcaatctccgactcccgggttcaagcaattctcctgactcagcctcctgagtagctgggattataggcatgtgccaccacacccggctaatatagtatttttagtagagacggggtttctccatgttgatcaggctggtctcgaactcccaacctgaggtgatccgcccgcctcagcctcctaaagtgctgggattacaggcatgagccaccgtgcctggcacttgtagatttttttttagattagcaattccttagtagaatctgcaatttatttctcttttaaagagaattttaacccatctgctattggcattcttatattttacttgtccatagagattttagtgaattgatacatttataataaatacaaatgagctttccagttttctttgctctttcaatttatgctttagtataagcaaaaattactatttttacatttttaaaaattgtgggtacatgtaggtgtatatatttatggagtgcatgagatgttttgatacaggtatgcaatgtgaaataagcggatcatggagaatggggtatccattccctcaagcatttatcctttgagttatagacatattttacatttgaataaaaaatatttgaactaaggccgggtgcggtggctcacacctgtaatcccagcactttgggaggccaaggcgggtggatcatgaggtcaggagtttgagaccagcctgaccaacatggtgaaaccccgtctctactaaaaatacaaaaattagctgggtgtggtggggctcgcctgtaaccccagctactcaggagactgaggcaggagaatcgcttgaacctgggaggtggaggttgcagtgagtcgagatcacaccactgcactccagcctgggcgacagagcgagactccatctcaaaaaaaaaaaaaaaaaaaaaaaatatatatatgtatatatatatatatatatatgtatatatgaactaatttatttaggcttaatctctaaaatttcagcctgatcttaaccaatgaaatttcaaaaacaaaaactgtacttcagtctacaattgaatggaattcagtgtagaccagtacaatggaatgtactggctgagatgggagggtcccttgagcccaggagtttgaggctgtagtgagctgtgattgtgtctgtgaatagtgactgcactccagcctaggtgacatagcaagatgccatctcaaagaaatatagatatataacataaaataaataactttatacatttcctggaggaaaagtactctgtaaattcaagagatctgaatcaaattactcaaccttttggaatttgatcctctactgtaatactcatatgctagattactgaattttcagagtgaaaaaaaattgacagggtaatatataggccatattatagtgaagatcataagtataaatgtcctcgtttaatctttccatattgaggacagcctctgcatataaaaatgttcattgggagaaaaattatttttaaaactaaatttttatagtagtcctccattactggcaattaaggagcaacccacaaaatgtcattatgtggttctttgattaggcataaaaagtattgcaaacagcttttctattcctttggaatatgaatctttttaatgtctaaagttaacctgcaacattttctagtaggacaagtcaatgtaaattaggtaatttttgcctgttttataccttctgttgcattttgttcaaatgaaaacattttttaaaacatgattgaatttttacttctcagataattggtttgagtgtggaatttcttttttaacactttgatatgtaagttagtgtaaattaatacttttataacactactaggctttatatttttatggaatgttttaaaatttgaaatttttgaagtgttaatttagcagtactttatcattatgtgccaatactgacaagaaaaacaattttttatgtatttaatatactatggtattcaataaattctattttaaaataaaa

SEQ ID NO: 181488 - DNA, 1422 bp, Homo sapiens
  Payload ID: 15746
  Gene Symbol: SPPL2A
  Gene Name: signal peptide peptidase like 2A
  ENST ID: ENST00000558934
  CDS Start-End: 1-1070
tggcattaggtggatactggagtggactagttgaattggaaaacttgaaagcagtgacaactgaagatagagaaatgaggaaaaagaaggaagaatatttaacttttagtcctcttacagttgtaatatttgtggtcatctgctgtgttatgatggtcttactttatttcttctacaaatggttggtttatgttatgatagcaattttctgcatagcatcagcaatgagtctgtacaactgtcttgctgcactaattcataagataccatatggacaatgcacgattgcatgtcgtggcaaaaacatggaagtgagacttatttttctctctggactgtgcatagcagtagctgttgtttgggctgtgtttcgaaatgaagacaggtgggcttggattttacaggatatcttggggattgctttctgtctgaatttaattaaaacactgaagttgcccaacttcaagtcatgtgtgatacttctaggccttctcctcctctatgatgtattttttgttttcataacaccattcatcacaaagaatggtgagagtatcatggttgaactcgcagctggaccttttggaaataatgaaaagaatgatggaaacttggtggaagccactggtcaaccctcagctccccatgagaaattgccagtagtcatcagagtaccaaaactgatctatttctcagtaatgagtgtgtgcctcatgcctgtttcaatattgggttttggagacattattgtaccaggcctgttgattgcatactgtagaagatttgatgttcagactggttcttcttacatatactatgtttcgtctacagttgcctatgctattggcatgatacttacatttgttgttctggtgctgatgaaaaaggggcaacctgctctcctctatttagtaccttgcacacttattactgcctcagttgttgcctggagacgtaaggaaatgaaaaagttctggaaaggtaacagctatcagatgatggaccatttggattgtgcaacaaatgaagaaaaccctgtgatatctggtgaacagattgtccagcaataatattatgtggaactgctataatgtgtcattgattttctacaaatagacttcgactttttaaattgacttttgaattgacaatctgaaagagtcttcaatgatatgcttgcaaaaatatatttttatgagctggtactgacagttacatcataaataactaaaacgctttgcttttaatgttaaagttgtgccttcacattaaataaaacatatggtctgtgtagtttccgagatgtactatatacagtatatttttctaaaaaaaaatgccttgacccacccctatacttttttttaacgaaatctgtttctttcagctctgatggtagatacaagtagttactatttctga

SEQ ID NO: 181489 - DNA, 564 bp, Homo sapiens
  Payload ID: 15746
  Gene Symbol: SPPL2A
  Gene Name: signal peptide peptidase like 2A
  ENST ID: ENST00000558414
  CDS Start-End: 116-564
attagaatgtgtgatttctttgaaagactgttttgctgactctccagtttaagggacagccgctcaggaagcaatcttgcatgcgtctggaaatggcacaaccaaggactactgcatgctttataacccttattggacagctcttccaagtaccctagaaaatgcaacttccattagtttgatgaatctgacttccacaccactatgcaacctttctgatattcctcctgttggcataaagagcaaagcagttgtggttccatggggaagctgccattttcttgaaaaagccagaattgcacagaaaggaggtgctgaagcaatgttagttgtcaataacagtgtcctatttcctccctcaggtaacagatctgaatttcctgatgtgaaaatactgattgcatttataagctacaaagactttagagatatgaaccagactctaggagataacattactgtgaaaatgtattctccatcgtggcctaactttgattatactatggtggttatttttgtaattgcggtgttcactgtggcattaggtggatactggagtggact

SEQ ID NO: 181490 - DNA, 495 bp, Homo sapiens
  Payload ID: 15747
  Gene Symbol: SPPL2B
  Gene Name: signal peptide peptidase like 2B
  ENST ID: ENST00000612623
  CDS Start-End: 1-495
gggcaccgtcgccatcggcggctactgggccgggagtcgggacgtgaagaagtacatgaagcacaagcgcgacgatgggcccgagaagcaggaggacgaggcggtggacgtgacgccggtgatgacctgcgtgtttgtggtgatgtgctgctccatgctggtgctgctctactatttctacgatctcctcgtgtacgtggtcatcgggatcttctgcctggcctccgccaccggcctctacagctgcctggcgccctgtgtgcggcggctgcccttcggcaagtgcaggatccccaacaacagcctgccctacttccacaagcgcccgcaggcccgtatgctgctcctggcgctcttctgcgtggccgtcagcgtggtgtggggcgtcttccgcaacgaggaccagtgggcctgggtcctccaggatgccctgggcatcgccttctgcctctacatgctgaagaccatccgtctgcccaccttcaaggcctgcac

SEQ ID NO: 181491 - DNA, 3456 bp, Homo sapiens
  Payload ID: 15747
  Gene Symbol: SPPL2B
  Gene Name: signal peptide peptidase like 2B
  Uniprot ID: Q8TCT7
  ENST ID: ENST00000613503
  CDS Start-End: 81-1859
tgcgcggcgcatgcgtggcccggggtctcggggcgttgctgggaaacatctgccgttggttgcggcgggcaccggccgacatggcggcagcggtggcggctgcgctggcgcggcttttggcggcctttctgctcctcgcggcccaggtggcctgtgagtacggcatggtgcacgtggtctcccaggccgggggccccgaaggcaaagactactgcatcctctacaacccgcagtgggcccatcttccgcacgacctcagcaaggcatctttcctgcagctgcgcaactggacggcctccctgctctgctccgcagccgacctccccgcccgtggcttcagcaaccagatcccgctggtggcgcgggggaactgcaccttctatgagaaagtgaggctggcccagggcagcggagcacgcgggctgctcatcgtcagcagggagaggctggtccccccggggggtaataagacgcagtatgatgagattggcattcccgtggccctgctcagctacaaagacatgctggacatcttcacgcgtttcggccgcacggtgagggcggcgctgtatgcgcctaaggagccggtgctggactacaacatggtcatcatcttcatcatggctgtgggcaccgtcgccatcggcggctactgggccgggagtcgggacgtgaagaaaaggtacatgaagcacaagcgcgacgatgggcccgagaagcaggaggacgaggcggtggacgtgacgccggtgatgacctgcgtgtttgtggtgatgtgctgctccatgctggtgctgctctactatttctacgatctcctcgtgtacgtggtcatcgggatcttctgcctggcctccgccaccggcctctacagctgcctggcgccctgtgtgcggcggctgcccttcggcaagtgcaggatccccaacaacagcctgccctacttccacaagcgcccgcaggcccgtatgctgctcctggcgctcttctgcgtggccgtcagcgtggtgtggggcgtcttccgcaacgaggaccagtgggcctgggtcctccaggatgccctgggcatcgccttctgcctctacatgctgaagaccatccgtctgcccaccttcaaggcctgcacgctgctgctgctggtgctgttcctctacgacatcttcttcgtgttcatcacgcccttcctgaccaagagtgggagcagcatcatggtggaggtggccactgggccctcggactcagccacccgtgagaagctgcccatggtcctgaaggtgcccaggctgaactcctcacctctggccctgtgtgaccggcccttctccctcctgggtttcggagacattttggtgccagggctgctggtggcctactgccacaggtttgacatccaggtacagtcctccagggtatacttcgtggcctgcaccatcgcctatggcgttggcctccttgtgacattcgtggcactggccctgatgcagcgtggccagcccgctctcctctacctggtgccctgcacgctggtgacgagctgcgctgtggcgctctggcgccgggagctgggcgtgttctggacgggcagcggctttgcgaaagtcctacctccatctccgtgggccccagcaccagccgacggcccgcagcctcccaaagactctgccacgccactctccccgcagccgcccagcgaagaaccagccacatccccctggcctgctgagcagtccccaaaatcacgcacgtccgaggagatgggggctggagcccccatgcgggagcctgggagcccagctgaatccgagggccgggaccaggcccagccgtccccggtaacccagcctggcgcctcggcctaggggaggggtgagacgctcgctgccgtgcccgccacaccaagatgttggggctgcctggcgcccactggagacagacagacagacgcctgtcccccgggaccgaggcctgtgccgtccccacccgccccaacatggtgctcatccttgccgagacccctgcggtctgtgcccgcgcccagcccagctgccccggctgcacgcctgctgctcccagctcgcccggctgccacaagctctctgcgggtccatcctccccaccggggtccgtcctcgcaggccctgcccggcctctctgcagaccctcaagcgtcgtctgcatgagtgagcaggcgtgggtggactctggccgcggccacacttggtgctcaccagctgcttcggccttcaggtgacctccctccccacggcatcctgctctccgggtggaagagcagctttctgtctcccagaaggcatcgcttttccctcttgagcagatcggagcccctgggaggtttggaagctgcctccaagcctaggacacggaccagtggccggggcggcctctggcccctgacgctggctgagacaggcccgtggggcggggttttggggcgtgaacaaggctggcagtaagtggacaagctgctcccctggctaaggccctgccctgccctcagccagaggtgcctggccatgcctgcacactcctccccattttaataaatggtcgcaacttctagaagtcctgctggtgccacctggtggggtggacgtctctcagactgcccttctgacaagcaggggtgggcgccaggcaggctgggtcaggccctcaggggtccctggagccctgggagggagggactgggtcgtgggaggtcctggtagctcccggcacccaacctcgcttcccgtgtgggccccgtgttgcttttctgctgagaggggcttgggcctcggttctccctgtggcagcggcattggtgcctgggttcttaaccctctggacccagcagctaggagcttctggaacccacgaggacatctgccactggcatggtctactcactgatggggtcctcctgactccagggcagagacgtccgtgcgggaactgaccgaggcgtggccccaggccccggcatcctcccctcgctgcacgtggtcacttccgaagcagcgctccctgtggccgcagagacagagcccgcaccctggctgtctgtggtgcctgggccccagctcccgcccgccacccgccctgttgagtgcggcctccagactcgagtccagaatctgtttctgtcaagtcagtcgtccccagctgcacacggggactgctgagcgctgcgctctcacgggtctgttccggacagagggtggcaggggtgagccctgatcccttacaaaaaataccagcttcccagggagtaatggcgccttcactgaagccattttgtacatggggacggggtggggacgtctcttttttggtgttggacgtttgaccagtggggaggggttcagaggcggcggtcctgtccttggctccgtctgtccgtgtggccttgctgccattccgtctgatcattaaacacagcttttgatacatatg

SEQ ID NO: 181492 - DNA, 2583 bp, Homo sapiens
  Payload ID: 15747
  Gene Symbol: SPPL2B
  Gene Name: signal peptide peptidase like 2B
  Uniprot ID: Q8TCT7
  ENST ID: ENST00000610743
  CDS Start-End: 18-1553
ggcgggcaccggccgacatggcggcagcggtggcggctgcgctggcgcggcttttggcggcctttctgctcctcgcggcccaggtggcctgtgagtacggcatggtgcacgtggtctcccaggccgggggccccgaaggcaaagactactgcatcctctacaacccgcagtgggcccatcttccgcacgacctcagcaaggcatctttcctgcagctgcgcaactggacggcctccctgctctgctccgcagccgacctccccgcccgtggcttcagcaaccagatcccgctggtggcgcgggggaactgcaccttctatgagaaagtgaggctggcccagggcagcggagcacgcgggctgctcatcgtcagcagggagaggctggtccccccggggggtaataagacgcagtatgatgagattggcattcccgtggccctgctcagctacaaagacatgctggacatcttcacgcgtttcggccgcacggtgagggcggcgctgtatgcgcctaaggagccggtgctggactacaacatggtcatcatcttcatcatggctgtgggcaccgtcgccatcggcggctactgggccgggagtcgggacgtgaagaaaaggtacatgaagcacaagcgcgacgatgggcccgagaagcaggaggacgaggcggtggacgtgacgccggtgatgacctgcgtgtttgtggtgatgtgctgctccatgctggtgctgctctactatttctacgatctcctcgtgtacgtggtcatcgggatcttctgcctggcctccgccaccggcctctacagctgcctggcgccctgtgtgcggcggctgcccttcggcaagtgcaggatccccaacaacagcctgccctacttccacaagcgcccgcaggcccgtatgctgctcctggcgctcttctgcgtggccgtcagcgtggtgtggggcgtcttccgcaacgaggaccagtgggcctgggtcctccaggatgccctgggcatcgccttctgcctctacatgctgaagaccatccgtctgcccaccttcaaggcctgcacgctgctgctgctggtgctgttcctctacgacatcttcttcgtgttcatcacgcccttcctgaccaagagtgggagcagcatcatggtggaggtggccactgggccctcggactcagccacccgtgagaagctgcccatggtcctgaaggtgcccaggctgaactcctcacctctggccctgtgtgaccggcccttctccctcctgggtttcggagacattttggtgccagggctgctggtggcctactgccacaggtttgacatccaggtacagtcctccagggtatacttcgtggcctgcaccatcgcctatggcgttggcctccttgtgacattcgtggcactggccctgatgcagcgtggccagcccgctctcctctacctggtgccctgcacgctggtgacgagctgcgctgtggcgctctggcgccgggagctgggcgtgttctggacgggcagcggctttgcggtgaataccagtttgctctgactgtgagaaatactcgcctagtgagccctaactagagttaaaaaagtcctacctccatctccgtgggccccagcaccagccgacggcccgcagcctcccaaagactctgccacgccactctccccgcagccgcccagcgaagaaccagccacatccccctggcctgctgagcagtccccaaaatcacgcacgtccgaggagatgggggctggagcccccatgcgggagcctgggagcccagctgaatccgagggccgggaccaggcccagccgtccccggtaacccagcctggcgcctcggcctaggggaggggtgagacgctcgctgccgtgcccgccacaccaagatgttggggctgcctggcgcccactggagacagacagacagacgcctgtcccccgggaccgaggcctgtgccgtccccacccgccccaacatggtgctcatccttgccgagacccctgcggtctgtgcccgcgcccagcccagctgccccggctgcacgcctgctgctcccagctcgcccggctgccacaagctctctgcgggtccatcctccccaccggggtccgtcctcgcaggccctgcccggcctctctgcagaccctcaagcgtcgtctgcatgagtgagcaggcgtgggtggactctggccgcggccacacttggtgctcaccagctgcttcggccttcaggtgacctccctccccacggcatcctgctctccgggtggaagagcagctttctgtctcccagaaggcatcgcttttccctcttgagcagatcggagcccctgggaggtttggaagctgcctccaagcctaggacacggaccagtggccggggcggcctctggcccctgacgctggctgagacaggcccgtggggcggggttttggggcgtgaacaaggctggcagtaagtggacaagctgctcccctggctaaggccctgccctgccctcagccagaggtgcctggccatgcctgcacactcctccccattttaataaatggtcgcaacttctagaa

SEQ ID NO: 181493 - DNA, 496 bp, Homo sapiens
  Payload ID: 15747
  Gene Symbol: SPPL2B
  Gene Name: signal peptide peptidase like 2B
  ENST ID: ENST00000586332
  CDS Start-End: 52-297
ggggcgttgctgggaaacatctgccgttggttgcggcgggcaccggccgacatggcggcagcggtggcggctgcgctggcgcggcttttggcggcctttctgctcctcgcggcccaggtggcctgtgagtacggcatggtgcacgtggtctcccaggccgggggccccgaaggcaaagactactgcatcctctacaacccgcagtgggcccatcttccgcacgacctcagcaaggcaatgcctggccgtggtggggctgcggtggggacccacttggtcttgctgagtgatctgtgacggctcgcggggtggctcaggtatcaggggacagccatgtctgtgaggactccggccccgctcagatgaggcagcccagcccgtcgcccagggtccggctgtgggagctgcagtagggatggctctgcctaggtgggccgaggccgtgcggggctttagtctttcctgcagctgcgcaactggacggcctccctgctct

SEQ ID NO: 181494 - DNA, 2459 bp, Homo sapiens
  Payload ID: 15747
  Gene Symbol: SPPL2B
  Gene Name: signal peptide peptidase like 2B
  Uniprot ID: Q8TCT7
  ENST ID: ENST00000618220
  CDS Start-End: 15-974
gggcaccggccgacatggcggcagcggtggcggctgcgctggcgcggcttttggcggcctttctgctcctcgcggcccaggtggcctgtgagtacggcatggtgcacgtggtctcccaggccgggggccccgaaggcaaagactactgcatcctctacaacccgcagtgggcccatcttccgcacgacctcagcaaggcatctttcctgcagctgcgcaactggacggcctccctgctctgctccgcagccgacctccccgcccgtggcttcagcaaccagatcccgctggtggcgcgggggaactgcaccttctatgagaaagtgaggctggcccagggcagcggagcacgcgggctgctcatcgtcagcagggagaggctggtccccccggggggtaataagacgcagtatgatgagattggcattcccgtggccctgctcagctacaaagacatgctggacatcttcacgcgtttcggccgcacggtgagggcggcgctgtatgcgcctaaggagccggtgctggactacaacatggtcatcatcttcatcatggctgtgggcaccgtcgccatcggcggctactgggccgggagtcgggacgtgaagaaaaggtacatgaagcacaagcgcgacgatgggcccgagaagcaggaggacgaggcggtggacgtgacgccggtgatgacctgcgtgtttgtggtgatgtgctgctccatgctggtgctgctctactatttctacgatctcctcgtgtacgtggtcatcgggatcttctgcctggcctccgccaccggcctctacagctgcctggcgccctgtgtgcggcggctgcccttcggcaagtgcaggatccccaacaacagcctgccctacttccacaagcgcccgcaggcccgtatgctgctcctggcgctcttctgcgtggccgtcagcgtggtgtggggcgtcttccgcaacgaggaccagtaagtgctgcttcccccgggccccggcgggcagcggagtcctcgggtgcaccagggctcctggggccctgactccctgccctccctggaggccgccccagcctggagctgcttcagcaccgcgtgatgaagagccctggccccgggctgctctgacagggctgcgagggcgtttcacctggggtttgtccgggtgtcatgggaaccctgactggaatccgggaggagaggccggagcccctgtggccaggagccacgtcctccagcctggatgggactcctttgtggggcatcgctgcccagggccacagtctgtcccccgctgtccctttcctggcacccacgtgcacgccgcaggttcgaggcccagggtgtgggcaccagggcacccggtcctcttggtcatgactgctgcggcttctgagcagtggtggaggtggggcaggcactgctccccccacgctcacctcccacgtggcctggacttgtggctgcctcccgctggccgggcctcccccatgaggccgagtgcctggtgccgtgttgggaggacagagctggcccgtccccgcccggtccccaccgctgtcgctgataccatctggcacttcctcccagccttcctgaggcagccaagtacgcttggctttggtgtgtattggagccacggcacgtttaactggcagaaggaagatgtgaaaatattttgaatcctttgtacacaaagagaaaatgaatcttttcagttatttccaagccaggaaactcgctccgtcacatgaagttagagcaggcctcagtcagctgggcgcaggggctcacgcctgggatcccagcatttggtaggccaaggcaggacgatcactttgcccaggagttcaagaccagcctgggcaacaagcgagacgccctatttaagaaataatataaaatcagaaaaaataactggccgcagttctctgggtgcttgaagtacgtggcgcctggaattggctgtaccagcgtctcccatggaggcctctgctgttagcagccgccccgccctggagatgtttttatcccattttcaaatgaagcctttgatgtttgagacgctgaggaacgctggggaactcgtccagcaagtgacaggcagagcctgcattgggggcaggggccagcggggaggggactctggggcttcgtggggccaggagagagccgaagttgcggctggctgcaggggccgtggccttgtgcaggaggcagttctgtgctttgccccagggcaccaaccgcatggcagccccacccactgtggacccagaggttctttgaggaaacctggtgtggcacaagttttaatttaataaacagtttgggcacgggggctcatgcctgtaatcccagcactttgggaggtgaggcgggcagatcacttgaggtcaggagtttgagaccagcctggccaacatgacaaaaccccatctctactaaaaatacaaaaaaa

SEQ ID NO: 181495 - DNA, 1559 bp, Homo sapiens
  Payload ID: 15747
  Gene Symbol: SPPL2B
  Gene Name: signal peptide peptidase like 2B
  ENST ID: ENST00000614794
  CDS Start-End: 234-1109
gttggttgcggcgggcaccggccgacatggcggcagcggtggcggctgcgctggcgcggcttttggcggcctttctgctcctcgcggcccagtagagacgaggtttcaccatgttggtcaggctggtctcgaacttcagacctcaggtgatccacctgcttcggccacccaaagtgctgggatgacaggcgtgagccaccgtgcccggccccgaggtggcctgtgagtacggcatggtgcacgtggtctcccaggccgggggccccgaaggcaaagactactgcatcctctacaacccgcagtgggcccatcttccgcacgacctcagcaaggcatctttcctgcagctgcgcaactggacggcctccctgctctgctccgcagccgacctccccgcccgtggcttcagcaaccagatcccgctggtggcgcgggggaactgcaccttctatgagaaagtgaggctggcccagggcagcggagcacgcgggctgctcatcgtcagcagggagaggctggtccccccggggggtaataagacgcagtatgatgagattggcattcccgtggccctgctcagctacaaagacatgctggacatcttcacgcgtttcggccgcacggtgagggcggcgctgtatgcgcctaaggagccggtgctggactacaacatggtcatcatcttcatcatggctgtgggcaccgtcgccatcggcggctactgggccgggagtcgggacgtgaagaaaaggtacatgaagcacaagcgcgacgatgggcccgagaagcaggaggacgaggcggtggacgtgacgccggtgatgacctgcgtgtttgtggtgatgtgctgctccatgctggtgctgctctactatttctacgatctcctcgtgtacgtggtcatcgggatcttctgcctggcctccgccaccggcctctacagctgcctggcgccctgtgtgcggcggctgcccttcggcaagtgcaggatccccaacaacagcctgccctacttccacaagcgcccgcaggcccgtatgctgctcctggcgctcttctgcgtggccgtcagcgtggtgtggggcgtcttccgcaacgaggaccagtaagtgctgcttcccccgggccccggcgggcagcggagtcctcgggtgcaccagggctcctggggccctgactccctgccctccctggaggccgccccagcctggagctgcttcagcaccgcgtgatgaagagccctggccccgggctgctctgacagggctgcgagggcgtttcacctggggtttgtccgggtgtcatgggaaccctgactggaatccgggaggagaggccggagcccctgtggccaggagccacgtcctccagcctggatgggactcctttgtggggcatcgctgcccagggccacagtctgtcccccgctgtccctttcctggcacccacgtgcacgccgcaggttcgaggcccagggtgtgggcaccagggcacccggtcctcttggtcatgactgctgcggcttctgagcagtggtggaggtggggcaggcactgctc

SEQ ID NO: 181496 - DNA, 1017 bp, Homo sapiens
  Payload ID: 15747
  Gene Symbol: SPPL2B
  Gene Name: signal peptide peptidase like 2B
  ENST ID: ENST00000621568
  CDS Start-End: 38-457
aaacatctgccgttggttgcggcgggcaccggccgacatggcggcagcggtggcggctgcgctggcgcggcttttggcggcctttctgctcctcgcggcccaggtggcctgtgagtacggcatggtgcacgtggtctcccaggccgggggccccgaaggcaaagactactgcatcctctacaacccgcagtgggcccatcttccgcacgacctcagcaaggcatctttcctgcagctgcgcaactggacggcctccctgctctgctccgcagccgacctccccgcccgtggcttcagcaaccagatcccgctggtggcgcgggggaactgcaccttctatgagaaagtgaggctggcccagggcagcggagcacgcgggctgctcatcgtcagcagggagaggctgctacaaagacatgctggacatcttcacggcagcgtttcggccgcacggtgagggcggcgctgtatgcgcctaaggagccggtgctggactacaacatggtcatcatcttcatcatggctgtgggcaccgtcgccatcggcggctactgggccgggagtcgggacgtgaagaaaaggtacatgaagcacaagcgcgacgatgggcccgagaagcaggaggacgaggcggtggacgtgacgccggtgatgacctgcgtgtttgtggtgatgtgctgctccatgctggtgctgctctactatttctacgatctcctcgtgtacgtggtcatcgggatcttctgcctggcctccgccaccggcctctacagctgcctggcgccctgtgtgcggcggctgcccttcggcaagtgcaggatccccaacaacagcctgccctacttccacaagcgcccgcaggcccgtatgctgctcctggcgctcttctgcgtggccgtcagcgtggtgtggggcgtcttccgcaacgaggaccagtgggcctgggtcctccaggatgccctgggcatcgccttctgcctctacatgctgaagaccatccgtctgcccaccttcaag

SEQ ID NO: 181497 - DNA, 2238 bp, Homo sapiens
  Payload ID: 15748
  Gene Symbol: SPPL2C
  Gene Name: signal peptide peptidase like 2C
  Uniprot ID: Q8IUH8
  ENST ID: ENST00000329196
  CDS Start-End: 73-2127
aaagggccacgcctgcccctgggaggggtattgggctgccgcccgcagatgttgcagtaggaactgaagaagatggcgtgcctgggcttcctcctccccgtgggcttcctcctcctcatcagcaccgtggccgggggaaagtacggcgtggcccacgtggtgtcggagaattggagcaaggactactgtatcctgttcagctccgactacatcaccctcccccgggacctgcaccacgccccactcctgcccctgtatgatggcaccaaggcaccctggtgcccgggtgaggattccccccaccaggcccagctccgctcccccagccagcggcccctccgccagaccactgccatggtcatgaggggtaactgcagcttccacacgaaaggctggctggctcagggccaaggtgcccacgggctgctcatcgtgagccgggtcagtgaccaacagtgctcagacaccaccctggcaccccaggatccccgccagcccctggcagacctcaccatccctgtggctatgctccactatgctgacatgctggacatcctcagccacactcgtggggaggccgtcgtccgcgtggccatgtacgcacccccagagcccatcatcgactacaacatgctggtcatcttcatcctggctgtgggcacagtggctgcaggcggctactgggccggcctgaccgaagccaaccggctacagcggcgccgtgcccgaagaggaggggggtctggtggtcaccatcagctgcaggaagctgcagcagctgagggagcccagaaggaagataatgaggacatcccagtggacttcacgccggccatgacaggcgtggtggtcaccctgtcctgctcgctcatgctgctgctctacttcttctatgaccactttgtctatgtcaccattgggatctttggcctgggtgctggcattggcctctacagctgcctgtcacccctggtgtgccgcctgtccctgcggcaataccagaggcctccgcacagcctctgggcctctctgccgctgcctctgctgctgctggcgagcctgtgcgcaaccgtgatcatcttctgggtggcctaccgcaatgaggaccgctgggcgtggctcctgcaggacacactgggcatttcctactgcctgttcgtcctgcaccgtgtgcggctgcccactctcaagaactgctcctccttcctgctggccctgctggcctttgatgtcttctttgtcttcgtcacccccttcttcaccaaaaccggtgagagcatcatggcgcaggttgccttgggccctgcagagtcttcaagccatgagaggctgcccatggtactcaaagtgccccggctaagagtctccgccttgaccctgtgcagccagcccttctccatccttggcttcggtgacattgtggtccccggcttcctggttgcttactgttgccgctttgatgtgcaagtctgctcccgtcagatctacttcgtggcctgcaccgtggcctatgctgtgggcctgctggtcacattcatggccatggtcctcatgcagatgggccaacctgccttgctctacctagtgtccagcaccctgctcaccagcctggctgtggctgcctgccgccaagagctcagcctcttctggactggccagggcagagctaagatgtgtgggctcggctgtgccccttcagctggctctaggcagaagcaggagggcgcagcagatgcccacacagccagcacacttgagagaggcaccagccgaggagcaggggacttagacagcaaccctggagaagacaccactgagattgtcaccatatctgagaatgaagccaccaatccagaggaccgcagtgatagctccgagggctggagtgacgcccacttggatcctaatgagctgcccttcatcccccctggggcctcggaggagctgatgccactgatgccaatggccatgctgatcccactcatgcccctgatgcccccgccctcagagctgggccatgtccatgcccaggcccaggcccacgagactggcctgccctgggcgggactccacaagaggaagggtttgaaagtaagaaagagcatgtcgacccaggctcccttgtgaactggaggcactgggacacacgcctctcaaagggctggtggaacattgcagagcaaagccatgcatggcaacaagaaatcagggtatcaaagagatttcatatctacccaa

SEQ ID NO: 181498 - DNA, 2238 bp, Homo sapiens
  Payload ID: 15748
  Gene Symbol: SPPL2C
  Gene Name: signal peptide peptidase like 2C
  ENST ID: ENST00000610319
  CDS Start-End: 73-2127
aaagggccacgcctgcccctgggaggggtattgggctgccgcccgcagatgttgcagtaggaactgaagaagatggcgtgcctgggcttcctcctccccgtgggcttcctcctcctcatcagcaccgtggccgggggaaagtacggcgtggcccacgtggtgtcggagaattggagcaaggactactgtatcctgttcagctccgactacatcaccctcccccgggacctgcaccacgccccactcctgcccctgtatgatggcaccaaggcaccctggtgcccgggtgaggattccccccaccaggcccagctccgctcccccagccagcggcccctccgccagaccactgccatggtcatgaggggtaactgcagcttccacacgaaaggctggctggctcagggccaaggtgcccacgggctgctcatcgtgagccgggtcagtgaccaacagtgctcagacaccaccctggcaccccaggatccccgccagcccctggcagacctcaccatccctgtggctatgctccactatgctgacatgctggacatcctcagccacactcgtggggaggccgtcgtccgcgtggccatgtacgcacccccagagcccatcatcgactacaacatgctggtcatcttcatcctggctgtgggcacagtggctgcaggcggctactgggccggcctgaccgaagccaaccggctacagcggcgccgtgcccgaagaggaggggggcctggtggtcaccatcagctgcaggaagctgcagcagctgagggagcccagaaggaagataatgaggacatcccagtggacttcacgccggccatgacaggcgtggtggtcaccctgtcctgctcgctcatgctgctgctctacttcttctatgaccactttgtctatgtcaccattgggatctttggcctgggtgctggcattggcctctacagctgcctgtcacccctggtgtgccgcctgtccctgcggcaataccagaggcctccgcacagcctctgggcctctctgccgctgcctctgctgctgctggcgagcctgtgcacaaccgtgatcatcttctgggtggcctaccgcaatgaggaccgctgggcgtggctcctgcaggacacactgggcatttcctactgcctgttcgtcctgcaccgtgtgcggctgcccactctcaagaactgctcctccttcctgctggccctgctggcctttgatgtcttctttgtcttcgtcacccccttcttcaccaaaaccggtgagagcatcatggcgcaggttgccttgggccctgcagagtcttcaagccatgagaggctgcccatggtactcaaagtgccccggctaagagtctccgccttgaccctgtgcagccagcccttctccatccttggcttcggtgacattgtggtccccggcttcctggttgcttactgttgcccctttgatgtgcaagtctgctcccgtcaggtctacttcgtggcctgcactgtggcctatgctgtgggcctgctggtcacattcatggccatggtcctcatgcagatgggccaacctgccttgctctacctagtgtccagcaccctgctcaccagcctggctgtggctgcctgccgccaagagctcagcctcttctggactggccagggcagagctaagatgtgtgggctcggctgtgccccttcggctggctctaggcagaagcaggagggcgcagcagacgcccacacagccagcacacttgagagaggcaccagccgaggagcaggggacttagacagcaaccctggagaagacaccactgagattgtcaccatatctgagaatgaagccaccaatccagaggaccgcagtgatagccccgagggctggagtgacgcccacttggatcctaatgagctgcccttcatcccccctagggcctcggaggagctgatgccactgatgccaatggccatgctgatcccactcatgcccctgatgccccggccctcagagctgggccacgtccatgcccaagcccaggcccacgagactggcctgccctgggcgggactccacaagaggaagggtttgaaagtaagaaagagcatgtcgacccaggctcccttgtgaactggaggccctgggacacacgcctctcaaagggctggtggaacattgcagagcaaagccatgcatggcaacaagaaatcagggcatcaaagagatttcatatctacccaa

SEQ ID NO: 181499 - DNA, 2238 bp, Homo sapiens
  Payload ID: 15748
  Gene Symbol: SPPL2C
  Gene Name: signal peptide peptidase like 2C
  ENST ID: ENST00000621383
  CDS Start-End: 73-2127
aaagggccacgcctgcccctgggaggggtattgggctgccgcccgcagatgttgcagtaggaactgaagaagatggcgtgcctgggcttcctcctccccgtgggcttcctcctcctcatcagcaccgtggccgggggaaagtacggcgtggcccacgtggtgtcggagaattggagcaaggactactgtatcctgttcagctccgactacatcaccctcccccgggacctgcaccacgccccactcctgcccctgtatgatggcaccaaggcaccctggtgcccgggtgaggattccccccaccaggcccagctccgctcccccagccagcggcccctccgccagaccactgccatggtcatgaggggtaactgcagcttccacacgaaaggctggctggctcagggccaaggtgcccacgggctgctcatcgtgagccgggtcagtgaccaacagtgctcagacaccaccctggcaccccaggatccccgccagcccctggcagacctcaccatccctgtggctatgctccactatgctgacatgctggacatcctcagccacactcgtggggaggccgtcgtccgcgtggccatgtacgcacccccagagcccatcatcgactacaacatgctggtcatcttcatcctggctgtgggcacagtggctgcaggcggctactgggccggcctgaccgaagccaaccggctacagcggcgccgtgcccgaagaggaggggggtctggtggtcaccatcagctgcaggaagctgcagcagctgagggagcccagaaggaagataatgaggacatcccagtggacttcacgccggccatgacaggcgtggtggtcaccctgtcctgctcgctcatgctgctgctctacttcttctatgaccactttgtctatgtcaccattgggatctttggcctgggtgctggcattggcctctacagctgcctgtcacccctggtgtgccacctgtccctgcggcaataccagaggcctccgcacagcctctgggcctctctgccgctgcctctgctgctgctggcgagcctgtgcgcaaccgtgatcatcttctgggtggcctaccgcaatgaggaccgctgggcgtggctcctgcaggacacactgggcatttcctactgcctgttcgtcctgcaccgtgtgcggctgcccactctcaagaactgctcctccttcctgctggccctgctggcctttgatgtcttctttgtcttcgtcacccccttcttcaccaaaaccggtgagagcatcatggcgcaggttgccttgggccctgcagagtcttcaagccatgagaggctgcccatggtactcaaagtgccccggctaagagtctccgccttgaccctgtgcagccagcccttctccatccttggcttcggtgacattgtggtccccggcttcctggttgcttactgttgccgctttgatgtgcaagtctgctcccgtcagatctacttcgtggcctgcaccgtggcctatgctgtgggcctgctggtcacattcatggccatggtcctcatgcagatgggccaacctgccttgctctacctagtgtccagcaccctgctcaccagcctggctgtggctgcctgccgccaagagctcagcctcttctggactggccagggcagagctaagatgtgtgggctcggctgtgccccttcggctggctctaggcagaagcaggagggcgcagcagatgcccacacagccagcacacttgagagaggcaccagccgaggagcaggggacttagacagcaaccctggagaagacaccactgagattgtcaccatatctgagaatgaagccaccaatccagaggaccgcagtgatagctccgagggctggagtgacgcccacttggatcctaatgagctgcccttcatcccccctggggcctcggaggagctgatgccactgatgccaatggccatgctgatcccactcatgcccctgatgcccccgccctcagagctgggccatgtccatgcccaggcccaggcccacgagactggcctgccctgggcgggactccacaagaggaagggtttgaaagtaagaaagagcatgtcgacccaggctcccttgtgaactggaggcactgggacacacgcctctcaaagggctggtggaacattgcagagcaaagccatgcatggcaacaagaaatcagggcatcaaagagatttcatatctacccaa

SEQ ID NO: 181500 - DNA, 4148 bp, Homo sapiens
  Payload ID: 15749
  Gene Symbol: SPPL3
  Gene Name: signal peptide peptidase like 3
  Uniprot ID: Q8TCT6
  ENST ID: ENST00000353487
  CDS Start-End: 505-1659
gcccccgcccctcctcccctcggcgggtgtgatcgagtggcctcgcctcatcgcctagcgcccccctcagtcgccgccgcctccgcccgccggccatgtcccccggccgccgccgccgccgcccgagcgcggcgctcccgcggccccgcgcgcagtgagcgcgggcccgtcttgccgttcgcccgccccagggcccccttgttctccgcgccgccgccgccgccatgttgggtttggagctgcagcggagccgccgccgccgccgcgggtgagggaggccgagagcggagcccgccccgccccggggcccagggagcggggccgcttcggagcccggcctctccccgccagccgccttcccggcccgccgtgcagccagcgagccagcgagcgagcaagcaagcaagcaccggaccccggccgcgccttcagctacggcccgagcgagcccgccgccgccgggcccggccacagcctgcagcggagcccacgagaggcagcgccatggcggagcagacctactcgtgggcctattccctggtggattccagtcaagtgtctacatttctgatttccattcttcttatagtctatggtagtttcaggtcccttaatatggactttgaaaatcaagataaggagaaagacagtaatagttcttctgggtctttcaatggcaacagcaccaataatagcatccaaacaattgactctacccaggctctgttccttccaattggagcatctgtctctcttttagtaatgttcttcttctttgactcagttcaagtagtttttacaatatgtacagcagttcttgcaacgatagcttttgcttttcttctcctcccgatgtgccagtatttaacaagaccctgctcacctcagaacaagatttcctttggttgctgtggacgtttcactgctgctgagttgctgtcattctctctgtctgtcatgctcgtcctcatctgggttctcactggccattggcttctcatggatgcactggccatgggcctctgtgtcgccatgatcgcctttgtccgcctgccgagcctcaaggtctcctgcctgcttctctcagggcttctcatctatgatgtcttttgggtatttttctcagcctacatcttcaatagcaacgtcatggtgaaggtggccactcagccggctgacaatccccttgacgttctatcccggaagctccacctggggcccaatgttgggcgtgatgttcctcgcctgtctctgcctggaaaactggtcttcccaagctccactggcagccacttctccatgttgggcatcggagacatcgttatgcctggtctcctactatgctttgtccttcgctatgacaactacaaaaagcaagccagtggggactcctgtggggcccctggacctgccaacatctccgggcgcatgcagaaggtctcctactttcactgcaccctcatcggatactttgtaggcctgctcactgctactgtggcgtctcgcattcaccgggccgcccagcccgcccttctctatttggtgccatttactttattgccactcctcacgatggcctatttaaagggcgacctccggcggatgtggtctgagcctttccactccaagtccagcagctcccgattcctggaagtatgatggatcacgtggaaagtgaccagatggccgtcatagtccttttctctcaactcatggtttgtttcctcttagagctggcctggtactcagaaatgtacctgtgtttaaggaactgccgtgtgactggatttggcatttaaagggagctcgtttgcaggagagaggtgctggagccctgtttggttccttctcttcctgcggatgtagaggtggggccccttccaagagggacaggcctctccccagcgcgccttcctcccacgtttttatggatctgcaccagactgttaccttctgggggagatggagatttgactgtttaaaaactgaaaacagcgaggagtctttctagaacttttgaacactaaaaggatgaaaaaaattagcaaaccgaagtttcttcaatgacccctcgagaactttgggaccagtttcctataggggactcagtttcagagaactgagacagaagctcttctgtcgttatattcttctttcctttttttggatttattaaatattttctgtggtgtgaagtgacttattaaatccacagacattgagtgacttcttacaacatccacataagaatttgttgtaatgagttcatgtccacccagatgttgtgttggcagtgaacaagggcacggtttttatacatacgtacatatatatatataaacacacacatagatatatatgaataaacaaaaatgaaatcctgctaagatcacgctgtgtagctgacaggggcttgctgtcgttttgagcatgtcgagcagtttactgtggcttccttgtatatggataagctgctgtccttccccttcacaactgaccccgcagttacaaactagtatagcatttgtgctgattgatgatagactcatggacttcaggagcccttacttggttttgatcagtgtagcaaattagggatgaagagttcaaaccttttggccctttctttcttttctaggcttctccctcgcagggtgttccgtagtttcttctcgagccaatgcatgtattatagcagcaggtgtctttgtgctttctcatcatagtaacgtactacttgtaaatacatttttctattttctatttttttgtatttttttttttgacattttgtttcattggtgtgctgtatattttccatgccctcactcctttaagaaaaaaaaaaaggaaaaaagcaacacaatcctgtccttgctgttgtgattatagtcttggtttacctgtggtgacaaccgggtgttggggacacatgtcaaatgcccctctgagatgggccctaaattccagtaactggggaaagaaccagctgctgtgtcctgagagcctggccctgtgctgtggtctctgctgcaagcccagatttctgggagtaactagtgttaggtctgctgacctttacctaagcagcccctgcctggtaagaaggtgcccattgttcagaggcaaagagaagcctgcggttggcatgaggatgcctgacaacaaaggctggagaagggccctgagttccagcctctccccaagggtccccgccccagtggctgcctctgtcttgacctgtgtaatgaattagtgtgctgtgtcactgtggcttgaagtcactgtggatcgagctcacagggggcacccatcctgttgtcaacagagtctgaagcagtcagggtgttggattcctctgttgttgtcatcaattcctgctgaggggtttctggggttttgtttttaataaatgactcctttgtagcctttgtcacataatcttcactttggttgttggtaccaaacagagctcccagccatctcctccctgttctggaagactgatgggaagactctgtctgtccccagacctggtcatctgcagctctggcccagtcatagatacatcaaagaactgaagcttctgctgtccacagaactcaaaactgcctctgcattgggtgaagactaaaaatccacttgcggactctcccttccttccttctcagccctcgaggatgcatatagctaattaagcaggcccagagacagagaggggggctccaaaatgactcggattaagggcaagtgccagtgatgggtagaaataacgttatccttcatgcctgtaatcccagcactttgggaggccgaggcaggtggatcacaaggttgggagctcgagaccagcctggccaacatggtgaaaccccgtctctactaaaaacacaaaaattagctgggcatggtggcaggcgcctgtaatcccagctatttgggaggctgaggcagaagaatcgcttgaacctggaaggcggaggttgcagtgagcagagattgcgccactgcactcaagtctgggcgacagggtgagactccatctcaaaaaaaaaaaaaaaaaggaaatgttatcctggcagtgggtcattttaatttttctgtctttgttttcataagaaaattaaattccagacagaaggaacgtc

SEQ ID NO: 181501 - DNA, 636 bp, Homo sapiens
  Payload ID: 15749
  Gene Symbol: SPPL3
  Gene Name: signal peptide peptidase like 3
  ENST ID: ENST00000543608
  CDS Start-End: 144-636
agtggagcggccgccgcttggctctgggacagggagcgcagggagagttggtgagggcctattccctggtggattccagtcaagtgtctacatttctgatttccattcttcttatagtctatggtagtttcaggtcccttaatatggactttgaaaatcaagataaggagaaagacagtaatagttcttctgggtctttcaatggcaacagcaccaataatagcatccaaacaattgactctacccaggctctgttccttccaattggagcatctgtctctcttttagtaatgttcttcttctttgactcagttcaagtagtttttacaatatgtacagcagttcttgcaacgatagcttttgcttttcttctcctcccgatgtgccagtatttaacaagaccctgctcacctcagaacaagatttcctttggttgctgtggacgtttcactgctgctgagttgctgtcattctctctgtctgtcatgctcgtcctcatctgggttctcactggccattggcttctcatggatgcactggccatgggcctctgtgtcgccatgatcgcctttgtccgcctgccgagcctcaaggtctcctgcctgcttctctcagggcttctcatctatgatgtct

SEQ ID NO: 181502 - DNA, 508 bp, Homo sapiens
  Payload ID: 15749
  Gene Symbol: SPPL3
  Gene Name: signal peptide peptidase like 3
  ENST ID: ENST00000543854
  CDS Start-End: 202-508
agtggagcggccgccgcttggctctgggacagggagcgcagggagagttggtgagggcctattccctggtggattccagtcaagtgtctacatttctgatttccattcttcttatagtctatggtagtttcaggcatccaaacaattgactctacccaggctctgttccttccaattggagcatctgtctctcttttagtaatgttcttcttctttgactcagttcaagtagtttttacaatatgtacagcagttcttgcaacgatagcttttgcttttcttctcctcccgatgtgccagtatttaacaagaccctgctcacctcagaacaagatttcctttggttgctgtggacgtttcactgctgctgagttgctgtcattctctctgtctgtcatgctcgtcctcatctgggttctcactggccattggcttctcatggatgcactggccatgggcctctgtgtcgccatgatcgcctttgtccgcctgccgagcctcaaggtct

SEQ ID NO: 181503 - DNA, 763 bp, Homo sapiens
  Payload ID: 15749
  Gene Symbol: SPPL3
  Gene Name: signal peptide peptidase like 3
  ENST ID: ENST00000536996
  CDS Start-End: 215-763
gtgtttcctgggcaggaggactcgaaggggtggagagaggcaggccagggcaaagaggccctggatggttgaaagaatagaaaactcagtggtcaagaaatggggaaaatgaaaatgttttactagggcctattccctggtggattccagtcaagtgtctacatttctgatttccattcttcttatagtctatggtagtttcaggtcccttaatatggactttgaaaatcaagataaggagaaagacagtaatagttcttctgggtctttcaatggcaacagcaccaataatagcatccaaacaattgactctacccaggctctgttccttccaattggagcatctgtctctcttttagtaatgttcttcttctttgactcagttcaagtagtttttacaatatgtacagcagttcttgcaacgatagcttttgcttttcttctcctcccgatgtgccagtatttaacaagaccctgctcacctcagaacaagatttcctttggttgctgtggacgtttcactgctgctgagttgctgtcattctctctgtctgtcatgctcgtcctcatctgggttctcactggccattggcttctcatggatgcactggccatgggcctctgtgtcgccatgatcgcctttgtccgcctgccgagcctcaaggtctcctgcctgcttctctcagggcttctcatctatgatgtcttttgggtatttttctcagcctacatcttcaatagcaacgtcatggtgaaggtggcc

SEQ ID NO: 181504 - DNA, 531 bp, Homo sapiens
  Payload ID: 15749
  Gene Symbol: SPPL3
  Gene Name: signal peptide peptidase like 3
  ENST ID: ENST00000540091
  CDS Start-End: 333-531
attccttgagaggatcagctaagatggagagagtatttgtggtggacttgttgactttgaagaacctcctgtaggccatctagatggagaaaatcaataggcagttagaaaaatggaaacggggaattcaggagatgcaggctttacctcatcaccgagcaaaaccagtaaaatactattagagattgaaatgtaactggataaaagtctgattattgagacttttgccattggcacagatctgggcctattccctggtggattccagtcaagtgtctacatttctgatttccattcttcttatagtctatggtagtttcaggtcccttaatatggactttgaaaatcaagataaggagaaagacagtaatagttcttctgggtctttcaatggcaacagcaccaataatagcatccaaacaattgactctacccaggctctgttccttccaattggagcatctgtctctcttttagtaatgttcttcttctttgactcagttcaagtagtttttacaatatgtacagcag

SEQ ID NO: 181505 - DNA, 663 bp, Homo sapiens
  Payload ID: 15749
  Gene Symbol: SPPL3
  Gene Name: signal peptide peptidase like 3
  ENST ID: ENST00000543181
  CDS Start-End: 308-663
taaggatattgtttttcaagatactatcaacatagaagagatcttttaagagggagaagagtttttcaatcaaggaaatgaaaccagtaaaacattttctcaagatttttctgactataaaatgttaagcttccttcgttttgttgtaagagtgacagcacagtgggtcagaggatagatcttagacttcatcgtcagaattcttgatcatctataactggcctattccctggtggattccagtcaagtgtctacatttctgatttccattcttcttatagtctatggtagtttcaggtcccttaatatggactttgaaaatcaagataaggagaaagacagtaatagttcttctgggtctttcaatggcaacagcaccaataatagcatccaaacaattgactctacccaggctctgttccttccaattggagcatctgtctctcttttagtaatgttcttcttctttgactcagttcaagtagtttttacaatatgtacagcagttcttgcaacgatagcttttgcttttcttctcctcccgatgtgccagtatttaacaagaccctgctcacctcagaacaagatttcctttggttgctgtggacgtttcactgctgctgagttgctgtcattctctctgtctgtcatgctcgtcctcat

SEQ ID NO: 181506 - DNA, 2258 bp, Homo sapiens
  Payload ID: 15750
  Gene Symbol: SCUBE1
  Gene Name: signal peptide, CUB domain, EGF-like 1
  ENST ID: ENST00000290460
  CDS Start-End: 63-1106
ggccggtcggtcgggtccccgcgccccgcacgcccgcacgcccagcggggcccgcattgagcatgggcgcggcggccgtgcgctggcacttgtgcgtgctgctggccctgggcacacgcgggcggctggccgggggcagcgggctcccagggtcagtcgacgtggatgagtgctcagagggcacagatgactgccacatcgatgccatctgtcagaacacgcccaagtcctacaaatgcctctgcaagccaggctacaagggggaaggcaagcagtgtgaagacattgacgagtgtgagaatgactactacaatgggggctgtgtccacgagtgcatcaacatcccggggaactacaggtgtacctgctttgatggcttcatgctggcacacgatggacacaactgcctggatgtggacgagtgtcaggacaataatggtggctgccagcagatctgcgtcaatgccatgggcagctacgagtgtcagtgccacagtggcttcttccttagtgacaaccagcatacctgcatccaccgctccaatgagggtatgaactgcatgaacaaagaccatggctgtgcccacatctgccgggagacgcccaaaggtggggtggcctgcgactgcaggcccggctttgaccttgcccaaaaccagaaggactgcacactaacctgtaattatggaaacggaggctgccagcacagctgtgaggacacagacacaggccccacgtgtggttgccaccagaagtacgccctccactcagacggtcgcacgtgcatcgagaaggatgaggctgcaattgagcgctctcagttcaatgccacgtcagtagctgatgtggacaagcgggtgaaacggcggctactcatggagacgtgcgcagtcaataacggaggctgcgaccggacatgcaaggacacagccactggcgtgcgatgcagctgccccgttggattcacactgcagccggacgggaagacatgcaaaggtcagcatgtggagctgtgtgggtgcccctgcctgtactggcctggccaagagcctccgtgtgcttgcatagccgggcccagggctgggctgaacgggggccacgtgtagctgtgggaaaggacacgtggcaatcatttgctttgctgttggagaggccaggaagagggagggctggccagcagcagggtccccagcagagttcgagagaacacaggtcccacggcacatcagcaggttcctgggccaaaaaggcactgatgtcagagaatttggctgcacgctgggttaaacagttaagccagcgtctctactgtgggacttcctgggccctcagtgatagtgtggcttcccaaggcgcgtagaatgtagcgcgtttccgaaccccttgacctttggttgcagtgggtcttgcagagctgatggggacagtctggtgttgggccatctgggacacacaggtctactcatgccaggaaaaataaggacagtgtgtcactactaggggggcgaggctagggggatcccatctgaaaagataaggactcaggacttctgcttgccatcagaaaatgaggagtcaggaagacctgagagtgactggttgaaggaaggagggacagggctggcctgctggtggctggcagtgagggaaggcagaggtgtatcctcccacttgtcccctgagtcaccccacaaagacttactgagtacctcctgggttgaggggaccctcaggaaacaggaagcccagggagctgggagaggagagctgggtgggctctcgagacagccctgcagatgaggaggtccagctacccccaaaggacagacggagccccaagaagctgtgggccctggggcagggtgttaggcctgagtgccggagccctctgtgcagaagggtgaggggcagtgctcagtgcccccagcatcactccagaccaccctccaaacgcccccaccccagcgctgggcagtacccccacactctgccaggaagggagagcctagagagcagggcgtggaggggagaggaactggaacttccaaagtcccatcggggaaaatattgaaagtggaggttagggtgacttaaaatagcttgaggtggactttttttaagcctgtaaaaataaatgtatttttgtacagtgtatgacttcttccttgccaacttgctgggaagaaccgagtgattattgacagaaataacagtgcttccgcctgtttatttgaaaataaagcccttctgtggccacc

SEQ ID NO: 181507 - DNA, 9808 bp, Homo sapiens
  Payload ID: 15750
  Gene Symbol: SCUBE1
  Gene Name: signal peptide, CUB domain, EGF-like 1
  Uniprot ID: Q8IWY4
  ENST ID: ENST00000360835
  CDS Start-End: 128-3094
ggctgggcggctcgggagcccgagcggtggcggagcggcgagcagcgagcagcgcctgcgggagcggccggtcggtcgggtccccgcgccccgcacgcccgcacgcccagcggggcccgcattgagcatgggcgcggcggccgtgcgctggcacttgtgcgtgctgctggccctgggcacacgcgggcggctggccgggggcagcgggctcccagggtcagtcgacgtggatgagtgctcagagggcacagatgactgccacatcgatgccatctgtcagaacacgcccaagtcctacaaatgcctctgcaagccaggctacaagggggaaggcaagcagtgtgaagacattgacgagtgtgagaatgactactacaatgggggctgtgtccacgagtgcatcaacatcccggggaactacaggtgtacctgctttgatggcttcatgctggcacacgatggacacaactgcctggatgtggacgagtgtcaggacaataatggtggctgccagcagatctgcgtcaatgccatgggcagctacgagtgtcagtgccacagtggcttcttccttagtgacaaccagcatacctgcatccaccgctccaatgagggtatgaactgcatgaacaaagaccatggctgtgcccacatctgccgggagacgcccaaaggtggggtggcctgcgactgcaggcccggctttgaccttgcccaaaaccagaaggactgcacactaacctgtaattatggaaacggaggctgccagcacagctgtgaggacacagacacaggccccacgtgtggttgccaccagaagtacgccctccactcagacggtcgcacgtgcatcgagacgtgcgcagtcaataacggaggctgcgaccggacatgcaaggacacagccactggcgtgcgatgcagctgccccgttggattcacactgcagccggacgggaagacatgcaaagacatcaacgagtgcctggtcaacaacggaggctgcgaccacttctgccgcaacaccgtgggcagcttcgagtgcggctgccggaagggctacaagctgctcaccgacgagcgcacctgccaggacatcgacgagtgctccttcgagcggacctgtgaccacatctgcatcaactccccgggcagcttccagtgcctgtgtcaccgcggctacatcctctacgggacaacccactgcggagatgtggacgagtgcagcatgagcaacgggagctgtgaccagggctgcgtcaacaccaagggcagctacgagtgcgtctgtcccccggggaggcggctccactggaacgggaaggattgcgtggagacaggcaagtgtctttctcgcgccaagacctccccccgggcccagctgtcctgcagcaaggcaggcggtgtggagagctgcttcctttcctgcccggctcacacactcttcgtgccagactcggaaaatagctacgtcctgagctgcggagttccagggccgcagggcaaggcgctgcagaaacgcaacggcaccagctctggcctcgggcccagctgctcagatgcccccaccacccccatcaaacagaaggcccgcttcaagatccgagatgccaagtgccacctccggccccacagccaggcacgagcaaaggagaccgccaggcagccgctgctggaccactgccatgtgactttcgtgaccctcaagtgtgactcctccaagaagaggcgccgtggccgcaagtccccatccaaggaggtgtcccacatcacagcagagtttgagatcgagacaaagatggaagaggcctcagacacatgcgaagcggactgcttgcggaagcgagcagaacagagcctgcaggccgccatcaagaccctgcgcaagtccatcggccggcagcagttctatgtccaggtctcaggcactgagtacgaggtagcccagaggccagccaaggcgctggaggggcagggggcatgtggcgcaggccaggtgctacaggacagcaaatgcgttgcctgtgggcctggcacccacttcggtggtgagctcggccagtgtgtgtcatgtatgccaggaacataccaggacatggaaggccagctcagttgcacaccgtgccccagcagcgacgggcttggtctgcctggtgcccgcaacgtgtcggaatgtggaggccagtgttctccaggcttcttctcggccgatggcttcaagccctgccaggcctgccccgtgggcacgtaccagcctgagcccgggcgcaccggctgcttcccctgtggagggggtttgctcaccaaacacgaaggcaccacctccttccaggactgcgaggctaaagtgcactgctcccccggccaccactacaacaccaccacccaccgctgcatccgctgccccgtcggcacctaccagcccgagtttggccagaaccactgcatcacctgtccgggcaacaccagcacagacttcgatggctccaccaacgtcacacactgcaaaaaccagcactgcggcggcgagcttggtgactacaccggctacatcgagtcccccaactaccctggcgactacccagccaacgctgaatgcgtctggcacatcgcgcctcccccaaagcgcaggatcctcatcgtggtccctgagatcttcctgcccatcgaggatgagtgcggcgatgttctggtcatgaggaagagtgcctctcccacgtccatcaccacctatgagacctgccagacctacgagaggcccatcgccttcacctcccgctcccgcaagctctggatccagttcaaatccaatgaaggcaacagcggcaaaggcttccaagtgccctatgtcacctacgatgaggactaccagcaactcatagaggacatcgtgcgcgatgggcgcctgtacgcctcggagaaccaccaggaaattttgaaagacaagaagctgatcaaggccctcttcgacgtgctggcgcatccccagaactacttcaagtacacagcccaggaatccaaggagatgttcccacggtccttcatcaaactgctgcgctccaaagtgtctcggttcctgcggccctacaaataaccggggggagcggccctgcctgggggtggcctggtccgcggagggtgcacctgccctccacagtgggagctgcatgggcctccacaccaccttgggaaccccatggcactgcccttcagggaagccgaccagcccatggagaccgagcccaggcacccttcggacccgctgcccctgtgggagcaccctgcttcaggaagcctccctccctccctctgcctcccttccccaggacaccaagagcgccctctcctgagccctggcagaccgactgcaggtagcaggattgcaggaccctctgcctggcctggcgtttcaggagagaggggaagtggggcctgtgctctgggaggcgtggtcatccgagacaggagtccaggggagagaggaggggacaaaggcgccgtctgggggaggtcgatgagcctgtgctggcatccgcgggccccacgctttgccaactcctccagccacaggcaaggccacggctccgggctgttgcgctctaagggttctgtgattggatggaacagagctgctggggaggagactggaagtttctgcattccttcaacagaacatttaatgaagtactctatatatatatataaatatatatataaatatatatatatacttctatttgtgggtactttaggaaaatgccctttggtcactgtaaatatgaattgtgaccccatcccttcccgcatgagcccagtgagtcccagcagctatcagcctccctgaacgattaaacagctcctcccagcatttgcatttgcccttctgtttctgtgaggccggcagcccttggggctggggagagcacagcttgccttggacttgcttctgaacacgaattcttcgagaactaggctcagatgctctgctggagtgttggcctcaccccagtccccttgccagcaacatcactgcccttggacgagactcagtggaagacacttcccctcggacccgttcccaggaggtgcaggggcccagcaataaacggcgaaaggggccttggctcttgccctgtggcagtgaccttggggtccgtactatgcccaggtgtcagcaggaaacaaggccttgctcacaggagcacaggctgtaccaccacaaggagcctcagagcggccagtgaggaaaggggagagagcagagcttgctgtcagaggccaggctcccagtgcagcctcctcttgctacgccatgccacccccattcacagggaaacctctttccttcctataaaggaaagaggttgaattgactcacatttccacatggcttgggaggcctcaggaaacttacaatcatggcggagggtgaaggggaagcaagcgccttcttcacaaggcagcaggagagagaagcaagcagggaaatgtcgggagaaagagagtctgggctgtgaccgagtgcatgtgtcccacccagccggaaggccagcgcctgggatggagccagcagaaccccatgccgaggtccaggaggccttgcctgctcttcatctgcctgcgagctgtaggacctgcatgggaaatggtctgtgtgtttcaggttaacaaatactgaaaatcccaaggaacctgggagaatctgaaaatgaactccagtcttcagctcgaagttgcctctagggttcctcctggtcacccccgggcccagcctggctggcgagaaacaaacacggtttgagaggctgtggcacactgaggaccacacagatggaggcagccaagtgaggtccctggaggttcagggcttggtgacgaggtaggccgtgatcacatattctacagtccaaaagagggcccggagctcagcaattactcacgccgtcacatgtgcccacagtagcgggctccgcggcgtggctcctgctgccatcagctgccttctctgctgaagtccaactcaagtcggagagagagtggagcctctgcacttggggagtaggtcagtgtcaactaacaagccctgccaggggccactgccgctcctctggtcacagtccacgcaggccagccctggtttctggaaagaggcctccctccctccctttgtggagccgtcagtcatccccaagatgagaggcgagcatcctgccgagtgagcctgcagcaacagctcctgaggaaggtgccgggaggggtgtcgcctcttcacgagtgttctccagagaatcagaacccagaggatacagacgtagatgtgtgaggggctgcattatgggaactggctcacagattctggaggccaacaagtcccacgatcggctgtctgcgattgggagaccaggagaagccacaccgtaactcagtctgagtccaaagcccgagaagccaggggccaccctgtgagtcccagcatccaaagccccgagaacgaggaagatggatgtcccagctcccaaagggaggattctcccttcctcctccttcttttctattggggccctcaacagattggatggagtggatgtcttcactcagtctgccaattcccatcctaacctcttctggaaacaccctagcatgttttcccagctagctgggtatccgttcacccaaccaagacgaccatgcaatcaaccatcacacttaaatgtttttgttttgttttttttgttttgttttttgttttctttttttgttttcttttttttttttttttttttttttgagatggagtctcgctctgtcacccaggctggagtgcagtggcgcgatcttggttcactgcaagctccgcctcccgggttcacgccattctcctgcctcagcctcccgagtagctgggactacaggcacccaccaccttgcccggctaatttttttgtatttttagtagagacagggtttcaccatattagccaggatggtctcgatctcctgacctcgtgatccgcccacctcggcctcccaaagtgctgggattacaggcgtgagccaccacgcccagccagggttttcttttttaatcctttccagaaacagaaagagctcttaacctctctgagctctttctgcaattcctttgggcgatttctgaaagttgccacccacgtactcacagatccactgcccgcctctcctcccctcatgttccaggactcaccaccgtggtcagaccatgcccagtgtgcccagggcaaagttggatgggcaggtgcagacgaggcccagccttcatcctgctttccctcgcaagcccttctatagctcccagcccacgggagaggccatgaggagcgcgaggtcgccagcagccccactgggcctcccacaccatctgagtgacttgaattccagggttgggctctgtcttgagtctccacatcagtctcacaccagggaacttgggggtcccccgttaaactacagctgaccctgggcctcagggcgggatggtcccaaggtgagctccgtggacagcaaagcgcatttcttccagttggcatgttgtcgaagccaatggcagcttgactgatgtgaggtggctattccacctggttcaagatggaggtgtagagaaaagggaagtggggaacaaggactgggccaggtaggacggatccacgtaacgaggcccaagaaaaaatggaagctgggggcagagagtccaggaggcccccatgctgtctgaggggaggccggcatagcccctcctcgactgtcgcctgagcagctgatgaggtccccagcgccgcacgctgtgctccagggagaggagccaagaagcaagcgggctgctgggagtccctgcactgccatctggccgggacggaggcgcctgcccggtctccaggctcctctgagcttgggtcagctcctaatggagcatggcaccccagggaaccagaggaactctgtgaagaaaggcatggaaaaccggggtgtctcccgcacagcttcccaggagtcaggtgggacccaggcgtggggggacctttctgccccacattcctggcattccccccaagtttatttctactttccagaaacaagccacgggaagggaaggaacctgcagcagggtttcgaagacagccaggccctccgtgattgagggctcatatagccgctgagggcagcctgcagccaggtggcctcacctgctgcccagaattaggctgtgccttttcccagtccttccccatgccagagcctctccccatctttccccgcgccagagcctcacagccacagccacaccaacctccctcctctcaagcagcagaatcagcctacgctccccagcctcagtgcccctgccccacacaggtcacgctggcaaggcgatgaccagtttccgaaacgctggatccccaagggtacagtgtggcccagtcctcccccacctccatggtggcccaggctgcagggctcacggtgggcccacggtggaggcctcaggcagctttctctccagctacccattggcttaggacacacagataaagtagagctgaaacacgggccaaaacatccccagacaaggatggcacaagaggccaaatttgaaggccttgggagagaagccatttcccctacctctaacgagcgtagttttctgtctgaatggccccccttttcatgcacgctcgttcttaagagacgcaccatccgcaggcagcgtctcagtgaagcctgtcccctgggcttgtccacggcaggaggcccctggcctgtttaagccataccgatgcttaatttacatttttggagttgaatattattccggtgcctccaccacccccagcagaaaaaataagatactgaaataagttgagtcatttcgcaaacatttactgagcacctcctgtgtgccaggctcctagaaagacagggagttggtgccctgcacagatgacaaactgccccagacagcagacagacaaacaaactgccccggacagcagacagacaaacagacacattgccctggacagcagagagacaaacagacacactgccccggacagcagacagacagacacgttgccccggacagcagacagaaaaactgccccggacagcagacagacagacaaactgccccagacagcagacagacaaactgccccggaaagcagacagcaaactgccccagacagcagacagacagacacacttccccagacagcagatagacagacaccctgccccagacagcagacaagctgccctggacagcctgctcaccttgcctgccacagtgcatgccccacagggagaagccttccttctcacccagggagtccagccattttcacctcccctggtccatgctcaggaagtctggtcaccctggcaaactgcacctgacattgaggtcccttttcaccaaagatgcacaaggtgtccatgccgagccgacatcattcaggccaagggcagaggatgtaatgaggggtggagtgaggatgtggagagagagcagagagcgcctcctattctaccgcggctgcctctgcccccacagcacccacagatccctggcccttccaggagtaagtcctgggcaggcagagctggggttggcctgatcccacctgccttgctcttggaaaggacatcaggtgtgggcaaagcatccttgaagcccagacaacacaggcatggcctgcgtgccctcccagcatctgctgcgatggcctcaaggcctctccagtcccctgctgcaccatgccactcagagcccctgagtgagccccctggaattgtctgcaccccccaagccccaacaggaagaagggaaaggtggggaagctgacgctcactcagtgcccactgggtgccaggctctgggctcaaccctctaatatccacacattccatccccccagccccatgtagatggtggggttaagaccattcttcagatgtggaaatgaaggctctgggagaccacaggacatgcccaaggcaaagagttggtagtccctggatttgggaatcaaactcaagcccatctaatccaagggtaggaaatgtctctaaaacgttgatcaatctgaagcttacagattggaaactgggccaggtcagccctggcggtggagtccagagacagagagaaggctgcagggaggggagagaacaggaggatcccgggccagggtgacttcagtgacattccttccctccttcacaagcacgaaaaactcgttcggagaaaagacagcttctgccttccctaccaggcggacagggtactcactgtgccgacgtgagcagacacagccagaggctcaagtgcccttgccgagtgtccccactgctcttggggaggccccggcacagccctgcagagatgcaagtaagagagtgcccagtgccctcggcagatgggtggcagaaagcaggaggaggaagagggagctgaccgatgccgggtgtcttactccgctgagatcagaacctccaacatgccgagcagacgcaggccacattgctcggggaacaggacaccagggcgctgtgctagcggcccgcagacttcacttctggctcctgtgagggcactgtattgtccagacgcttggcaacgactctgcctgcaagtggcaaataccaacataaccacatcttccttttagttgccacaaatattcagttttgttttatccatcatgtcccccatatgcatgtaatgaaacatttgtgaaaatcactttaataataaacaggaaatgaacct

SEQ ID NO: 181508 - DNA, 524 bp, Homo sapiens
  Payload ID: 15750
  Gene Symbol: SCUBE1
  Gene Name: signal peptide, CUB domain, EGF-like 1
  ENST ID: ENST00000449304
  CDS Start-End: 1-524
ccgggagacgcccaaaggtggggtggcctgcgactgcaggcccggctttgaccttgcccaaaaccagaaggactgcacactaacctgtaattatggaaacggaggctgccagcacagctgtgaggacacagacacaggccccacgtgtggttgccaccagaagtacgccctccactcagacggtcgcacgtgcatcgagaaggatgaggctgcaattgagcgctctcagttcaatgccacgtcagtagctgatgtggacaagcgggtgaaacggcggctactcatggagacgtgcgcagtcaataacggaggctgcgaccggacatgcaaggacacagccactggcgtgcgatgcagctgccccgttggattcacactgcagccggacgggaagacatgcaaagacatcaacgagtgcctggtcaacaacggaggctgcgaccacttctgccgcaacaccgtgggcagcttcgagtgcggctgccggaagggctacaagctgctcaccgacgagcgcacctgcc

SEQ ID NO: 181509 - DNA, 1119 bp, Homo sapiens
  Payload ID: 15750
  Gene Symbol: SCUBE1
  Gene Name: signal peptide, CUB domain, EGF-like 1
  ENST ID: ENST00000615096
  CDS Start-End: 23-1114
cccagcggggcccgcattgagcatgggcgcggcggccgtgcgctggcacttgtgcgtgctgctggccctgggcacacgcgggcggctggccgggggcagcgggctcccagggtcagtcgacgtggatgagtgctcagagggcacagatgactgccacatcgatgccatctgtcagaacacgcccaagtcctacaaatgcctctgcaagccaggctacaagggggaaggcaagcagtgtgaagacattgacgagtgtgagaatgactactacaatgggggctgtgtccacgagtgcatcaacatcccggggaactacaggtgtacctgctttgatggcttcatgctggcacacgatggacacaactgcctggatgtggacgagtgtcaggacaataatggtggctgccagcagatctgcgtcaatgccatgggcagctacgagtgtcagtgccacagtggcttcttccttagtgacaaccagcatacctgcatccaccgctccaatgagggtatgaactgcatgaacaaagaccatggctgtgcccacatctgccgggagacgcccaaaggtggggtggcctgcgactgcaggcccggctttgaccttgcccaaaaccagaaggactgcacactaacctgtaattatggaaacggaggctgccagcacagctgtgaggacacagacacaggccccacgtgtggttgccaccagaagtacgccctccactcagacggtcgcacgtgcatcgagacgtgcgcagtcaataacggaggctgcgaccggacatgcaaggacacagccactggcgtgcgatgcagctgccccgttggattcacactgcagccggacgggaagacatgcaaagacatcaacgagtgcctggtcaacaacggaggctgcgaccacttctgccgcaacaccgtgggcagcttcgagtgcggctgccggaagggctacaagctgctcaccgacgagcgcacctgccaggacatcgacgagtgctccttcgagcggacctgtgaccacatctgcatcaactccccgggcagcttccagtgcctcatcaaactgctgcgctccaaagtgtctcggttcctgcggccctacaaataaccggg

SEQ ID NO: 181510 - DNA, 3727 bp, Homo sapiens
  Payload ID: 15751
  Gene Symbol: SCUBE2
  Gene Name: signal peptide, CUB domain, EGF-like 2
  Uniprot ID: Q9NQ36
  ENST ID: ENST00000309263
  CDS Start-End: 74-3073
gcgcacacctccccgcgccgccgccgccaccgcccgcactccgccgcctctgcccgcaaccgctgagccatccatgggggtcgcgggccgcaaccgtcccggggcggcctgggcggtgctgctgctgctgctgctgctgccgccactgctgctgctggcgggggccgtcccgccgggtcggggccgtgccgcggggccgcaggaggatgtagatgagtgtgcccaagggctagatgactgccatgccgacgccctgtgtcagaacacacccacctcctacaagtgctcctgcaagcctggctaccaaggggaaggcaggcagtgtgaggacatcgatgaatgtggaaatgagctcaatggaggctgtgtccatgactgtttgaatattccaggcaattatcgttgcacttgttttgatggcttcatgttggctcatgacggtcataattgtcttgatgtggacgagtgcctggagaacaatggcggctgccagcatacctgtgtcaacgtcatggggagctatgagtgctgctgcaaggaggggtttttcctgagtgacaatcagcacacctgcattcaccgctcggaagagggcctgagctgcatgaataaggatcacggctgtagtcacatctgcaaggaggccccaaggggcagcgtcgcctgtgagtgcaggcctggttttgagctggccaagaaccagagagactgcatcttgacctgtaaccatgggaacggtgggtgccagcactcctgtgacgatacagccgatggcccagagtgcagctgccatccacagtacaagatgcacacagatgggaggagctgccttgagcgagaggacactgtcctggaggtgacagagagcaacaccacatcagtggtggatggggataaacgggtgaaacggcggctgctcatggaaacgtgtgctgtcaacaatggaggctgtgaccgcacctgtaaggatacttcgacaggtgtccactgcagttgtcctgttggattcactctccagttggatgggaagacatgtaaagatattgatgagtgccagacccgcaatggaggttgtgatcatttctgcaaaaacatcgtgggcagttttgactgcggctgcaagaaaggatttaaattattaacagatgagaagtcttgccaagatgtggatgagtgctctttggataggacctgtgaccacagctgcatcaaccaccctggcacatttgcttgtgcttgcaaccgagggtacaccctgtatggcttcacccactgtggagacaccaatgagtgcagcatcaacaacggaggctgtcagcaggtctgtgtgaacacagtgggcagctatgaatgccagtgccaccctgggtacaagctccactggaataaaaaagactgtgtggaagtgaaggggctcctgcccacaagtgtgtcaccccgtgtgtccctgcactgcggtaagagtggtggaggagacgggtgcttcctcagatgtcactctggcattcacctctcttcagatgtcaccaccatcaggacaagtgtaacctttaagctaaatgaaggcaagtgtagtttgaaaaatgctgagctgtttcccgagggtctgcgaccagcactaccagagaagcacagctcagtaaaagagagcttccgctacgtaaaccttacatgcagctctggcaagcaagtcccaggagcccctggccgaccaagcacccctaaggaaatgtttatcactgttgagtttgagcttgaaactaaccaaaaggaggtgacagcttcttgtgacctgagctgcatcgtaaagcgaaccgagaagcggctccgtaaagccatccgcacgctcagaaaggccgtccacagggagcagtttcacctccagctctcaggcatgaacctcgacgtggctaaaaagcctcccagaacatctgaacgccaggcagagtcctgtggagtgggccagggtcatgcagaaaaccaatgtgtcagttgcagggctgggacctattatgatggagcacgagaacgctgcattttatgtccaaatggaaccttccaaaatgaggaaggacaaatgacttgtgaaccatgcccaagaccaggaaattctggggccctgaagaccccagaagcttggaatatgtctgaatgtggaggtctgtgtcaacctggtgaatattctgcagatggctttgcaccttgccagctctgtgccctgggcacgttccagcctgaagctggtcgaacttcctgcttcccctgtggaggaggccttgccaccaaacatcagggagctacttcctttcaggactgtgaaaccagagttcaatgttcacctggacatttctacaacaccaccactcaccgatgtattcgttgcccagtgggaacataccagcctgaatttggaaaaaataattgtgtttcttgcccaggaaatactacgactgactttgatggctccacaaacataacccagtgtaaaaacagaagatgtggaggggagctgggagatttcactgggtacattgaatccccaaactacccaggcaattacccagccaacaccgagtgtacgtggaccatcaacccaccccccaagcgccgcatcctgatcgtggtccctgagatcttcctgcccatagaggacgactgtggggactatctggtgatgcggaaaacctcttcatccaattctgtgacaacatatgaaacctgccagacctacgaacgccccatcgccttcacctccaggtcaaagaagctgtggattcagttcaagtccaatgaagggaacagcgctagagggttccaggtcccatacgtgacatatgatgaggactaccaggaactcattgaagacatagttcgagatggcaggctctatgcatctgagaaccatcaggaaatacttaaggataagaaacttatcaaggctctgtttgatgtcctggcccatccccagaactatttcaagtacacagcccaggagtcccgagagatgtttccaagatcgttcatccgattgctacgttccaaagtgtccaggtttttgagaccttacaaatgactcagcccacgtgccactcaatacaaatgttctgctatagggttggtgggacagagctgtcttccttctgcatgtcagcacagtcgggtattgctgcctcccgtatcagtgactcattagagttcaatttttatagataatacagatattttggtaaattgaacttggtttttctttcccagcatcgtggatgtagactgagaatggctttgagtggcatcagcttctcactgctgtgggcggatgtcttggatagatcacgggctggctgagctggactttggtcagcctaggtgagactcacctgtccttctggggtcttactcctcctcaaggagtctgtagtggaaaggaggccacagaataagctgcttattctgaaacttcagcttcctctagcccggccctctctaagggagccctctgcactcgtgtgcaggctctgaccaggcagaacaggcaagaggggagggaaggagacccctgcaggctccctccacccaccttgagacctgggaggactcagtttctccacagccttctccagcctgtgtgatacaagtttgatcccaggaacttgagttctaagcagtgctcgtgaaaaaaaaaagcagaaagaattagaaataaataaaaactaagcacttctggaga

SEQ ID NO: 181511 - DNA, 2912 bp, Homo sapiens
  Payload ID: 15751
  Gene Symbol: SCUBE2
  Gene Name: signal peptide, CUB domain, EGF-like 2
  Uniprot ID: Q9NQ36
  ENST ID: ENST00000450649
  CDS Start-End: 19-2442
gcaaccgctgagccatccatgggggtcgcgggccgcaaccgtcccggggcggcctgggcggtgctgctgctgctgctgctgctgccgccactgctgctgctggcgggggccgtcccgccgggtcggggccgtgccgcggggccgcaggaggatgtagatgagtgtgcccaagggctagatgactgccatgccgacgccctgtgtcagaacacacccacctcctacaagtgctcctgcaagcctggctaccaaggggaaggcaggcagtgtgaggacatcgatgaatgtggaaatgagctcaatggaggctgtgtccatgactgtttgaatattccaggcaattatcgttgcacttgttttgatggcttcatgttggctcatgacggtcataattgtcttgatgtggacgagtgcctggagaacaatggcggctgccagcatacctgtgtcaacgtcatggggagctatgagtgctgctgcaaggaggggtttttcctgagtgacaatcagcacacctgcattcaccgctcggaagagggcctgagctgcatgaataaggatcacggctgtagtcacatctgcaaggaggccccaaggggcagcgtcgcctgtgagtgcaggcctggttttgagctggccaagaaccagagagactgcatcttgacctgtaaccatgggaacggtgggtgccagcactcctgtgacgatacagccgatggcccagagtgcagctgccatccacagtacaagatgcacacagatgggaggagctgccttgagcgagaggacactgtcctggaggtgacagagagcaacaccacatcagtggtggatggggataaacgggtgaaacggcggctgctcatggaaacgtgtgctgtcaacaatggaggctgtgaccgcacctgtaaggatacttcgacaggtgtccactgcagttgtcctgttggattcactctccagttggatgggaagacatgtaaagatattgatgagtgccagacccgcaatggaggttgtgatcatttctgcaaaaacatcgtgggcagttttgactgcggctgcaagaaaggatttaaattattaacagatgagaagtcttgccaagatgtggatgagtgctctttggataggacctgtgaccacagctgcatcaaccaccctggcacatttgcttgtgcttgcaaccgagggtacaccctgtatggcttcacccactgtggagacaccaatgagtgcagcatcaacaacggaggctgtcagcaggtctgtgtgaacacagtgggcagctatgaatgccagtgccaccctgggtacaagctccactggaataaaaaagactgtgtggcttcttgtgacctgagctgcatcgtaaagcgaaccgagaagcggctccgtaaagccatccgcacgctcagaaaggccgtccacagggagcagtttcacctccagctctcaggcatgaacctcgacgtggctaaaaagcctcccagaacatctgaacgccaggcagagtcctgtggagtgggccagggtcatgcagaaaaccaatgtgtcagttgcagggctgggacctattatgatggagcacgagaacgctgcattttatgtccaaatggaaccttccaaaatgaggaaggacaaatgacttgtgaaccatgcccaagaccaggaaattctggggccctgaagaccccagaagcttggaatatgtctgaatgtggaggtctgtgtcaacctggtgaatattctgcagatggctttgcaccttgccagctctgtgccctgggcacgttccagcctgaagctggtcgaacttcctgcttcccctgtggaggaggccttgccaccaaacatcagggagctacttcctttcaggactgtgaaaccagagttcaatgttcacctggacatttctacaacaccaccactcaccgatgtattcgttgcccagtgggaacataccagcctgaatttggaaaaaataattgtgtttcttgcccaggaaatactacgactgactttgatggctccacaaacataacccagtgtaaaacttcatccaattctgtgacaacatatgaaacctgccagacctacgaacgccccatcgccttcacctccaggtcaaagaagctgtggattcagttcaagtccaatgaagggaacagcgctagagggttccaggtcccatacgtgacatatgatgaggactaccaggaactcattgaagacatagttcgagatggcaggctctatgcatctgagaaccatcaggaaatacttaaggataagaaacttatcaaggctctgtttgatgtcctggcccatccccagaactatttcaagtacacagcccaggagtcccgagagatgtttccaagatcgttcatccgattgctacgttccaaagtgtccaggtttttgagaccttacaaatgactcagcccacgtgccactcaatacaaatgttctgctatagggttggtgggacagagctgtcttccttctgcatgtcagcacagtcgggtattgctgcctcccgtatcagtgactcattagagttcaatttttatagataatacagatattttggtaaattgaacttggtttttctttcccagcatcgtggatgtagactgagaatggctttgagtggcatcagcttctcactgctgtgggcggatgtcttggatagatcacgggctggctgagctggactttggtcagcctaggtgagactcacctgtccttctggggtcttactcctcctcaaggagtctgtagtggaaaggaggccacagaataagctgcttattctgaaacttcagcttcctctagcccggccctctctaagggagccctctgcactcgtgtgcaggctctgaccaggcagaacaggcaagagggga

SEQ ID NO: 181512 - DNA, 3148 bp, Homo sapiens
  Payload ID: 15751
  Gene Symbol: SCUBE2
  Gene Name: signal peptide, CUB domain, EGF-like 2
  ENST ID: ENST00000520467
  CDS Start-End: 72-2987
gcacacctccccgcgccgccgccgccaccgcccgcactccgccgcctctgcccgcaaccgctgagccatccatgggggtcgcgggccgcaaccgtcccggggcggcctgggcggtgctgctgctgctgctgctgctgccgccactgctgctgctggcgggggccgtcccgccgggtcggggccgtgccgcggggccgcaggaggatgtagatgagtgtgcccaagggctagatgactgccatgccgacgccctgtgtcagaacacacccacctcctacaagtgctcctgcaagcctggctaccaaggggaaggcaggcagtgtgaggacatcgatgaatgtggaaatgagctcaatggaggctgtgtccatgactgtttgaatattccaggcaattatcgttgcacttgttttgatggcttcatgttggctcatgacggtcataattgtcttgatgtggacgagtgcctggagaacaatggcggctgccagcatacctgtgtcaacgtcatggggagctatgagtgctgctgcaaggaggggtttttcctgagtgacaatcagcacacctgcattcaccgctcggaagagggcctgagctgcatgaataaggatcacggctgtagtcacatctgcaaggaggccccaaggggcagcgtcgcctgtgagtgcaggcctggttttgagctggccaagaaccagagagactgcatcttgacctgtaaccatgggaacggtgggtgccagcactcctgtgacgatacagccgatggcccagagtgcagctgccatccacagtacaagatgcacacagatgggaggagctgccttgagcgagaggacactgtcctggaggtgacagagagcaacaccacatcagtggtggatggggataaacgggtgaaacggcggctgctcatggaaacgtgtgctgtcaacaatggaggctgtgaccgcacctgtaaggatacttcgacaggtgtccactgcagttgtcctgttggattcactctccagttggatgggaagacatgtaaagatattgatgagtgccagacccgcaatggaggttgtgatcatttctgcaaaaacatcgtgggcagttttgactgcggctgcaagaaaggatttaaattattaacagatgagaagtcttgccaagatgtggatgagtgctctttggataggacctgtgaccacagctgcatcaaccaccctggcacatttgcttgtgcttgcaaccgagggtacaccctgtatggcttcacccactgtggagacaccaatgagtgcagcatcaacaacggaggctgtcagcaggtctgtgtgaacacagtgggcagctatgaatgccagtgccaccctgggtacaagctccactggaataaaaaagactgtgtggaagtgaaggggctcctgcccacaagtgtgtcaccccgtgtgtccctgcactgcggtaagagtggtggaggagacgggtgcttcctcagatgtcactctggcattcacctctcttcaggactgcaaggggcctactctgtcacctgtggctcttcctctcctctcaggaacaaacaacaaaaatcaaatgactctgcttttggggatgtcaccaccatcaggacaagtgtaacctttaagctaaatgaaggcaagtgtagtttgaaaaatgctgagctgtttcccgagggtctgcgaccagcactaccagagaagcacagctcagtaaaagagagcttccgctacgtaaaccttacatgcagctctggcaagcaagtcccaggagcccctggccgaccaagcacccctaaggaaatgtttatcactgttgagtttgagcttgaaactaaccaaaaggaggtgacagcttcttgtgacctgagctgcatcgtaaagcgaaccgagaagcggctccgtaaagccatccgcacgctcagaaaggccgtccacagggagcagtttcacctccagctctcaggcatgaacctcgacgtggctaaaaagcctcccagaacatctgaacgccaggcagagtcctgtggagtgggccagggtcatgcagaaaaccaatgtggtctgtgtcaacctggtgaatattctgcagatggctttgcaccttgccagctctgtgccctgggcacgttccagcctgaagctggtcgaacttcctgcttcccctgtggaggaggccttgccaccaaacatcagggagctacttcctttcaggactgtgaaaccagagttcaatgttcacctggacatttctacaacaccaccactcaccgatgtattcgttgcccagtgggaacataccagcctgaatttggaaaaaataattgtgtttcttgcccaggaaatactacgactgactttgatggctccacaaacataacccagtgtaaaaacagaagatgtggaggggagctgggagatttcactgggtacattgaatccccaaactacccaggcaattacccagccaacaccgagtgtacgtggaccatcaacccaccccccaagcgccgcatcctgatcgtggtccctgagatcttcctgcccatagaggacgactgtggggactatctggtgatgcggaaaacctcttcatccaattctgtgacaacatatgaaacctgccagacctacgaacgccccatcgccttcacctccaggtcaaagaagctgtggattcagttcaagtccaatgaagggaacagcgctagagggttccaggtcccatacgtgacatatgatgaggactaccaggaactcattgaagacatagttcgagatggcaggctctatgcatctgagaaccatcaggaaatacttaaggataagaaacttatcaaggctctgtttgatgtcctggcccatccccagaactatttcaagtacacagcccaggagtcccgagagatgtttccaagatcgttcatccgattgctacgttccaaagtgtccaggtttttgagaccttacaaatgactcagcccacgtgccactcaatacaaatgttctgctatagggttggtgggacagagctgtcttccttctgcatgtcagcacagtcgggtattgctgcctcccgtatcagtgactcattagagttcaatttttatagataatacagatattttggtaaattg

SEQ ID NO: 181513 - DNA, 537 bp, Homo sapiens
  Payload ID: 15751
  Gene Symbol: SCUBE2
  Gene Name: signal peptide, CUB domain, EGF-like 2
  ENST ID: ENST00000519202
  CDS Start-End: 1-359
ggtacattgaatccccaaactacccaggcaattacccagccaacaccgagtgtacgtggaccatcaacccaccccccaagcgccgcatcctgatcgtggtccctgagatcttcctgcccatagaggacgactgtggggactatctggtgatgcggaaaacctcttcatccaattctgtgacaacatatgaaacctgccagacctacgaacgccccatcgccttcacctccaggtcaaagaagctgtggattcagttcaagtccaatgaagggaacagcgctagagggttccaggtcccatacgtgacatatgatggtaagcacagcctgcagcacatggaaagagcgtctctgctttgaacagagccaacttcggagccagctggcaaactgctgacaagcacacatgctcagaaaggcaggcaagatgaggggaaaagacattgctgactcacaagtgccaaattttaacaggcatttggggacactgacaataggaggaaaagatgttttataaaatatattaaaagtgagcata

SEQ ID NO: 181514 - DNA, 514 bp, Homo sapiens
  Payload ID: 15751
  Gene Symbol: SCUBE2
  Gene Name: signal peptide, CUB domain, EGF-like 2
  ENST ID: ENST00000531429
  CDS Start-End: 1-514
agtgcagctgccatccacagtacaagatgcacacagatgggaggagctgccttgagcgagaggacactgtcctggaggtgacagagagcaacaccacatcagtggtggatggggataaacgggtgaaacggcggctgctcatggaaacgtgtgctgtcaacaatggaggctgtgaccgcacctgtaaggatacttcgacaggtgtccactgcagttgtcctgttggattcactctccagttggatgggaagacatgtaaagatattgatgagtgccagacccgcaatggaggttgtgatcatttctgcaaaaacatcgtgggcagttttgactgcggctgcaagaaaggatttaaattattaacagatgagaagtcttgccaagatgtggatgagtgctctttggataggacctgtgaccacagctgcatcaaccaccctggcacatttgcttgtgcttgcaaccgagggtacaccctgtatggcttcacccactgtggagaagtgaaggggct

SEQ ID NO: 181515 - DNA, 575 bp, Homo sapiens
  Payload ID: 15751
  Gene Symbol: SCUBE2
  Gene Name: signal peptide, CUB domain, EGF-like 2
  ENST ID: ENST00000519788
  CDS Start-End: 1-575
tgaaacggcggctgctcatggaaacgtgtgctgtcaacaatggaggctgtgaccgcacctgtaaggatacttcgacaggtgtccactgcagttgtcctgttggattcactctccagttggatgggaagacatgtaaagatattgatgagtgccagacccgcaatggaggttgtgatcatttctgcaaaaacatcgtgggcagttttgactgcggctgcaagaaaggatttaaattattaacagatgagaagtcttgccaagatgtggatgagtgctctttggataggacctgtgaccacagctgcatcaaccaccctggcacatttgcttgtgcttgcaaccgagggtacaccctgtatggcttcacccactgtggagacaccaatgagtgcagcatcaacaacggaggctgtcagcaggtctgtgtgaacacagtgggcagctatgaatgccagtgccaccctgggtacaagctccactggaataaaaaagactgtgtggtgaaggggctcctgcccacaagtgtgtcaccccgtgtgtccctgcactgcggtaagagtggtggaggagacggg

SEQ ID NO: 181516 - DNA, 536 bp, Homo sapiens
  Payload ID: 15751
  Gene Symbol: SCUBE2
  Gene Name: signal peptide, CUB domain, EGF-like 2
  ENST ID: ENST00000528651
  CDS Start-End: 1-337
gggagatttcactgggtacattgaatccccaaactacccaggcaattacccagccaacaccgagtgtacgtggaccatcaacccaccccccaagcgccgcatcctgatcgtggtccctgagatcttcctgcccatagaggacgactgtggggactatctggtgatgcggaaaacctcttcatccaattctgtgacaacatatgaaacctgccagacctacgaacgccccatcgccttcacctccaggtcaaagaagctgtggattcagttcaagtccaatgaagggaacagcgctagagggttccaggtcccatacgtgacatatgatgatgcctgaaataatgtcaaacaaacacccaagacaaggagttttagtatctcttggggtggacccaaatgcctcccacatggctctgctgagagagacagagagcctcatctacccaaaagcaaccaactggcaacctctcctatctggaatcaggaagaaagcaaaaagacactgagacttcaaaataaatatggctgttctcaac

SEQ ID NO: 181517 - DNA, 7356 bp, Homo sapiens
  Payload ID: 15752
  Gene Symbol: SCUBE3
  Gene Name: signal peptide, CUB domain, EGF-like 3
  Uniprot ID: Q8IX30
  ENST ID: ENST00000274938
  CDS Start-End: 1-2982
atgggctcggggcgcgtacccgggctctgcctgcttgtcctgctggtccacgcccgcgccgcccagtacagcaaagccgcgcaagatgtggatgagtgtgtggaggggactgacaactgccacatcgatgctatctgccagaacaccccgaggtcatacaagtgcatctgcaagtctggctacacaggggacggcaaacactgcaaagacgtggatgagtgcgagcgagaggataatgcaggttgtgtgcatgactgtgtcaacatccctggcaattaccggtgtacctgctatgatggattccacctggcacatgacggacacaactgtctggatgtggacgagtgtgccgagggcaacggcggctgtcagcagagctgtgtcaacatgatgggcagctatgagtgccactgccgggaaggcttcttcctcagcgacaaccagcatacctgtatccagcggccagaagaaggaatgaattgcatgaacaagaaccacggctgtgcccacatttgccgggagacacccaaggggggtattgcctgtgaatgccgtcctggctttgagcttaccaagaaccaacgggactgtaaattgacatgcaactatggtaacggcggctgccagcacacgtgtgatgacacagagcagggtccccggtgcggctgccatatcaagtttgtgctccataccgacgggaagacatgcatcgagacctgtgctgtcaacaacgggggctgtgacagtaagtgccatgatgcagcgactggtgtccactgcacctgccctgtgggcttcatgctgcagccagacaggaagacgtgcaaagatatagatgagtgccgcttaaacaacgggggctgtgaccatatttgccgcaacacagtgggcagcttcgaatgcagttgcaagaaaggctataagcttctcatcaatgagaggaactgccaggatatagacgagtgttcctttgatcgaacctgtgaccacatatgtgtcaacacaccaggaagcttccagtgtctctgccatcgtggctacctgttgtatggtatcacccactgtggggatgtggatgaatgcagcatcaaccggggaggttgccgctttggctgcatcaacactcctggcagctaccagtgtacctgcccagcaggccagggtcggctgcactggaatggcaaagattgcacagagccactgaagtgtcagggcagtcctggggcctcgaaagccatgctcagctgcaaccggtctggcaagaaggacacctgtgccctgacctgtccctccagggcccgatttttgccagagtctgagaatggcttcacggtgagctgtgggacccccagccccagggctgctccagcccgagctggccacaatgggaacagcaccaactccaaccactgccatgaggctgcagtgctgtccattaaacaacgggcctccttcaagatcaaggatgccaaatgccgtttgcacctgcgaaacaaaggcaaaacagaggaggctggcagaatcacagggccaggtggtgccccctgctctgaatgccaggtcaccttcatccaccttaagtgtgactcctctcggaagggcaagggccgacgggcccggacccctccaggcaaagaggtcacaaggctcaccctggaactggaggcagaggtcagagccgaagaaaccacagccagctgtgggctgccctgcctccgacagcgaatggaacggcggctgaaaggatccctgaagatgctcagaaagtccatcaaccaggaccgcttcctgctgcgcctggcaggccttgattatgagctggcccacaagccgggcctggtagccggggagcgagcagagccgatggagtcctgtaggcccgggcagcaccgtgctgggaccaagtgtgtcagctgcccgcagggaacgtattaccacggccagacggagcagtgtgtgccatgcccagcgggcaccttccaggagagagaagggcagctctcctgcgacctttgccctgggagtgatgcccacgggcctcttggagccaccaacgtcaccacgtgtgcaggtcagtgcccacctggccaacactctgtagatgggttcaagccctgtcagccatgcccacgtggcacctaccaacctgaagcaggacggaccctatgcttcccttgtggtgggggcctcaccaccaagcatgaaggggccatttccttccaagactgtgacaccaaagtccagtgctccccagggcactactacaacaccagcatccaccgctgtattcgctgtgccatgggctcctatcagcccgacttccgtcagaacttctgcagccgctgtccaggaaacacaagcacagactttgatggctctaccagtgtggcccaatgcaagaatcgtcagtgtggtggggagctgggtgagttcactggctatattgagtcccccaactacccgggcaactacccagctggtgtggagtgcatctggaacatcaaccccccacccaagcgcaagatccttatcgtggtaccagagatcttcctgccatctgaggatgagtgtggggacgtcctcgtcatgagaaagaactcatccccatcctccattaccacttatgagacctgccagacctacgagcgtcccattgccttcactgcccgttccaggaagctctggatcaacttcaagacaagcgaggccaacagcgcccgtggcttccagattccctatgttacctatgatgaggactatgagcagctggtagaagacattgtgcgagatggccggctctatgcctctgaaaaccaccaggagattttaaaggacaagaagctcatcaaggccttctttgaggtgctagcccacccccagaactacttcaagtacacagagaaacacaaggagatgctgccaaaatccttcatcaagctgctccgctccaaagtttccagcttcctgaggccctacaaatagtaaccctaggctcagagacccaattttttaagcccccagactccttagccctcagagccggcagccccctaccctcagacaaggaactctctcctctctttttggagggaaaaaaaaaatatcactacacaaaccaggcactctccctttctgtctttctagtttcctttccttgtctctctctgcctgcctctctactgttcccccttttctaacacactacctagaaaagccattcagtactggctctagtccccgtgagatgtaaagaaacagtacagccccttccactgcccattttaccagctcacattcccgaccccatcagcttggaagggtgctagaggcccatcaaggaagtgggtctggtgggaaacggggaggggaaagaagggcttctgccattatagggttgtgccttgctagtcaggggccaaaatgtcccctggctctgctccctagggtgattctaacagcccagggtcctgccaaagaagcctttgatttacaggcttaatgccagcaccagtcctctggggcacatggtttgagctctggacttcccacatggccagctttcttgtctatacagatcctctctttctttccctacgtctgcctggggtctactccataagggtttacaaatggcccacaacactgagttagtggacaccggctaaatgaggaagagcagcaggcattgtcatggtgaatgccccgctgtagctccctgagagaaagactgtaactctgcaggacagaaacaaggttttaaagcattgccaaaaaaaagaaaacagaaagaaaaaatgtatcatctaaaggactagacacagaacaattggaagtcaacttcaaacactaatcccttttcttgtcttccctggcccagccacctcctcagccccatgtgatgctccctgggggagccctactccccttgctacatgttgtccttaaacatggttattgacctgaagccagcctaggccttgccctacagttgtttttcccttgtagccccagctggcttgtgggcttcaccaaagaggaccccactctgaagccagcctggagccacctacctctggcctcaggctgtgggcagcaaaaggaatgtgtgtgcacttggcgagcctcctgcccaccctgtccacacctaataagtgcaatcattttgagtctttctatgttgtctagacggaggggtttttgttttctgggtttgttttttgtttttgtttcttcttcctctattagcaaaaccctatttatagctgcccaagagaaaagagtgtatgtttggagtggaagaaaatcggttttgaatctcatgaaccttgagtgctggagcatctgatctgtctctatgccaccactggccacctagagcccttggctgtggtaatccagggtaattgcgcagaggcatctgatgtgtaggaaagtaattctggggatttgatggagcagaaaggagagagacctatgtttgctaaaccaatcttgctatccctatgcctctccatggagtcagtgtggacctcatgattatagaggccaatggaactggtcagtgattctctaccccaagtagggaaaacctccatcttttccctgtcttcatcctgttatcccctggtgtacacatggaagaggaccaggacataccacctggggatgggctgactcagggtcccgaggccagagacaaagctgtgggagccaagaataagacagaaggcatcagatatttgcctggctctggtcacttccctttgaagttgacttcaagcttagcttcctcaactactgtttttcagaaggaagaaagaatcaaatggaagaagaatcaagtccatgcccaagcccaaagcctgcacacattctgcccttaatccaagtgttgcctataaaattattttctgttttctcactctagttcccccaaagctgtagtcccaatcaatcaaaggctaccaactgagtcctcaggttcatttcttttttttttttttttctttttaactctcctggtaactcacagaacagctcaggttcatttctaggtgactgtcctaggctactgctcccccaggagactcaacactaaataaaggagtctgactccctgccctcccatcagtagcattcatcagccaaaacggccatagcagtaggtagccaatgacacagctagattccctgacaaccattagccaacatcatggtccttgtgggtagagtgtctggctacctttgtctttctgggtcaaggagggccactgtaaagatgcaaaatggctgcttccaaacaagggaaatggtcatttagtatgagtgtctctgtacttcccaggaagcaccatgaaaactgctttaatcaactctgactatcctaattctccaccagaagctaggataactttctttctttctttctttttttttttttttttttttgagatggagtctcgctctgtcacccaggctggagtgtaatggtgctatctcggcctactgcaacctccgcctcccaggctcaagcaattctgcctcggcctcccaagtagctgggattacaggcatgcgccaccgcgcccagctaatttttgtatttttagtagagatggggtttcaccatgttgcccgggctggtcttgaactcttgacctcaggtgatccacccgcctcagtctcccaaagtgctgggattacaggcatgagccaccgcgcccagcctaggataactttctgattcctctctgccagccgttttgcgtctcttggaaagccaaacggtgaccatgcttcttaatttatgccttcagggtctggcttctcctttctcccttcctttcctgtcacaccatgcatacatacatacaaatacacatccttcaaccatttattccatggcttatgagacctgcaaatgagttccacagtacggaaggcatagaccactaggcttcttaattgatgtcaaggcagatcttggtgagcaggtaaaaacctgctattgtccaccaagtttaatttaggtcctccaagttggagggttaagaacccaggcaaagctgctgctgaatctatggaggaggctggccctgggacatcaaactaggggttaactggattgaatgaggagtcaacgctcagggacattctaggtctttacaggtcagacagaagagaggtttttaccattggagggaaatggaaagatggtataaataggatcccttcatgaagcaacccagaggcctctctgcagcgtgtagggtgtggggcgacagtattgtggggcttccattcatcttagtacaaaacctcacctgctctgagcctggaaatgggagggcttcacgcaccaagtaatgcacaccagaaaggcacttatatcctcagcaacatggcagttcctctttacttctctgcctccctctttctatattatcaggccatgcctattcctacaacctgagacaactcttggagtcagaagaaaactgaccagatcctggatctgagctgcctgctccaggcctagaaatccccaaaggctggcactgagctgtgactgctttaacagcccccaagatttggtcagtttgaggtggtggagactcagatttgttgctgaaagttcagtaacacagtcctggtctttggccctagagaaactttttatatgagaagtgttctctatatacatgtttgaggtgactctggaatggattatgaggtcatatctcaaaatgtcagaaaacgttatagagcactcgaacttttgtatttgctgcttaacctcaatattacagccacaaacaaggggtaccaagacaaagtataactgagcataagcagaaaatgttaaccctccaggtttctttcttaagcacaataaaagtgggagcgaacaacacaaggatatttttacatttgacccgtctcaaaagtagcacaccctatccttgtgccattatttgtacaaggaaatatatgattagaaggaatagaacccccagttgtcatcagcttttttagacaccacaggttgtagcagtttgaacaaactgaaaactttatacttctgtgtgagctgaactcaagtttcagaataatcatcgccatgtgggaggctttttgttaaatgcagaagaaatttcaaaatattgtatttatatctgccttccactgctgccaatttagtaagcatctcctatacaatcgacaataaacagcaaatgatgcagttcatagagtattttgcacttggggaaaaatatgtatctgaattgtaaaaagaaatgtttggattttgtatgtcttttttattattattaaaatactaaatgaaactcctca

SEQ ID NO: 181518 - DNA, 1077 bp, Homo sapiens
  Payload ID: 15753
  Gene Symbol: SRP14
  Gene Name: signal recognition particle 14kDa (homologous Alu RNA binding protein)
  Uniprot ID: P37108
  ENST ID: ENST00000267884
  CDS Start-End: 73-483
ccagcctaggccgaacttccggctctcactgctaggggcttaagcggagggagtcgagccagcgtcgccgcgatggtgttgttggagagcgagcagttcctgacggagctgaccagacttttccagaagtgccggacgtcgggcagcgtctatatcaccttgaagaagtatgacggtcgaaccaaacccattccaaagaagggtactgtggagggctttgagcccgcagacaacaagtgtctgttaagagctaccgatgggaagaagaagatcagcactgtggtgagctccaaggaagtgaataagtttcagatggcttattcaaacctccttagagctaacatggatgggctgaagaagagagacaaaaagaacaaaactaagaagaccaaagcagcagcagcagcagcagcagcagcacctgccgcagcagcaacagcaccaacaacagcagcaacaacagcagcaacagcagcacagtaaagggcatacatttcctgctttcaccaattaaccactgaattgctattttttccttttggccagatagctaggtttctggttcccccacagtaggtgttttcacataagattagggtccttttggaaagaatagttgcagtgtttataggatagttgtggtaagaatctagtttattttgcatttggctaattggtctgtgctgcatggttatatactcctggattatagattaaaagtctctgtagacatctctgtgaagagcaagctatcattaaacatgtctgtttatcagcactgtctctttattcctttcccaacccattttaatagttctggcaataactactaaatctagaatgatgtgattaatgaataggctttagctctataatatcttctaggttattagaattgaaacctgacagttttataaaaagtcatgttatctcatgagctgcttcccacctggctgtataattttatcatcatggttccccagtttcgatgagttctcacagtcaaatgagagtttgtttaaccaccttaggagaaacatactacaaagtcatcaagaataaaggttccaaagtaat

SEQ ID NO: 181519 - DNA, 468 bp, Homo sapiens
  Payload ID: 15753
  Gene Symbol: SRP14
  Gene Name: signal recognition particle 14kDa (homologous Alu RNA binding protein)
  ENST ID: ENST00000560773
  CDS Start-End: 208-378
taggggcttaagcggagggagtcgagccagcgtcgccgcgatggtgttgttggagagcgagcagatgacggtcgaaccaaacccattccaaagaagggtactgtggagggctttgagcccgcagacaacaagtgtctgttaagagctaccgatgggaagaagaagatcagcactgtggtgagctccaaggaagtgaataagtttcagatggcttattcaaacctccttagagctaacatggatgggctgaagaagagagacaaaaagaacaaaactaagaagaccaaagcagcagcagcagcagcagcagcagcacctgccgcagcagcaacagcaccaacaacagcagcaacaacagcagcaacagcagcacagtaaagggcatacatttcctgctttcaccaattaaccactgaattgctattttttccttttggccagatagctaggtttctggttcccccacag

SEQ ID NO: 181520 - DNA, 578 bp, Homo sapiens
  Payload ID: 15753
  Gene Symbol: SRP14
  Gene Name: signal recognition particle 14kDa (homologous Alu RNA binding protein)
  ENST ID: ENST00000559081
  CDS Start-End: 38-385
gggcttaagcggagggagtcgagccagcgtcgccgcgatggtgttgttggagagcgagcagttcctgacggagctgaccagacttttccagaagtgccggacgtcgggcagcgtctatatcaccttgaagaagtatgacggtcgaaccaaacccattccaaagaagggtactgtggagggctttgagcccgcagacaacaagtgtctgttaagagctaccgatgggaagaagaagatcagcactgtggtgagctccaaggaagtgaataagtttcagatggtgagttttgggtgttccttatgtttcccttctcagggcaagagtcagtatgatagtgaacactgggtaagattgatacttgggttcactgctctccggagataagttttaccagtatgtttcaagtaaaagctgccagggtgtgaatttcaatgctaataccgtcttcctttctagtttttttaagttagattttgtcttaggctgtagatatatgctacctatactatagttgaacaagaagttgcctgcaattttcccttggaaaaaaacgtaaaaaatgtgtgcaactgtctgt

SEQ ID NO: 181521 - DNA, 780 bp, Homo sapiens
  Payload ID: 15753
  Gene Symbol: SRP14
  Gene Name: signal recognition particle 14kDa (homologous Alu RNA binding protein)
  ENST ID: ENST00000558720
  CDS Start-End: 319-489
gcgttactcgagacctgtgcctcctgcaggaggaccagggccttgacgcggcaggacgaggatttggggctggctaacggggctgggcctgttgttttccagttcctgacggagctgaccagacttttccagaagtgccggacgtcgggcagcgtctatatcaccttgaagaagtatgacggtcgaaccaaacccattccaaagaagggtactgtggagggctttgagcccgcagacaacaagtgtctgttaagagctaccgatgggaagaagaagatcagcactgtggtgagctccaaggaagtgaataagtttcagatggcttattcaaacctccttagagctaacatggatgggctgaagaagagagacaaaaagaacaaaactaagaagaccaaagcagcagcagcagcagcagcagcagcacctgccgcagcagcaacagcaccaacaacagcagcaacaacagcagcaacagcagcacagtaaagggcatacatttcctgctttcaccaattaaccactgaattgctattttttccttttggccagatagctaggtttctggttcccccacagtaggtgttttcacataagattagggtccttttggaaagaatagttgcagtgtttataggatagttgtggtaagaatctagtttattttgcatttggctaattggtctgtgctgcatggttatatactcctggattatagattaaaagtctctgtagacatctctgtgaagagcaagctatcattaaacatgtctgtttatc

SEQ ID NO: 181522 - DNA, 937 bp, Homo sapiens
  Payload ID: 15754
  Gene Symbol: SRP19
  Gene Name: signal recognition particle 19kDa
  Uniprot ID: P09132
  ENST ID: ENST00000282999
  CDS Start-End: 73-405
agagccgggttcctcccgggtttctgccgggtttctccctgcggctcctgggttgttgagactcttgtgaagatggcttgcgctgccgcgcggtccccggccgaccaggacaggtttatttgtatctatcctgcttatttaaataataagaagaccatcgcagagggaaggcgaatccccataagtaaggctgttgaaaatcctacagctacagagattcaagatgtatgttcagcagttggacttaacgtatttcttgagaaaaataaaatgtactctagagaatggaatcgtgatgtccaatacagaggcagagtccgggtccagctcaaacaggaagatgggagcctctgccttgtacagttcccatcacattatacactaagcctaacttctggttcctaggtaagtcagtaatgttgtatgcagcagaaatgatacctaaactaaaaacaaggacacaaaaaacaggaggtgctgaccaaagtcttcaacaaggagagggaagtaaaaaagggaaaggaaagaaaaagaagtaacctagtatcagcatcaagtatgtggtactactgtaagagacatgaatggagacttctaatttgtatcggagggaaacagaagctttttgtttgcatcatttaactgaactgtgaacccttgtgcctctcatctttatcatcggagttgacagtgaaacaaatttacatcagaagtttgcatctcgcgtatatgccgtataaaagaatttttttgtctttcaatgcagttttttggaagaaaatatttttaaatggacaatggactgtacaataagttacttgaaataagttgtttcagataaatttcaattagatttaaaataaacattttgtccaccttttaagttaatgaaataaaatttgaaactgacttttgcagcttttgcttatatactaat

SEQ ID NO: 181523 - DNA, 2841 bp, Homo sapiens
  Payload ID: 15754
  Gene Symbol: SRP19
  Gene Name: signal recognition particle 19kDa
  Uniprot ID: P09132
  ENST ID: ENST00000505459
  CDS Start-End: 156-590
caaacaggcgatgagaaatcgcggacgcggaaccatttcttgggcaggacttccggcggaaaagcgggctgtctcggaaactcagagccgggttcctcccgggtttctgccgggtttctccctgcggctcctgggttgttgagactcttgtgaagatggcttgcgctgccgcgcggtccccggccgaccaggacaggtttatttgtatctatcctgcttatttaaataataagaagaccatcgcagagggaaggcgaatccccataagtaaggctgttgaaaatcctacagctacagagattcaagatgtatgttcagcagttggacttaacgtatttcttgagaaaaataaaatgtactctagagaatggaatcgtgatgtccaatacagaggcagagtccgggtccagctcaaacaggaagatgggagcctctgccttgtacagttcccatcacgtaagtcagtaatgttgtatgcagcagaaatgatacctaaactaaaaacaaggacacaaaaaacaggaggtgctgaccaaagtcttcaacaaggagagggaagtaaaaaagggaaaggaaagaaaaagaagtaacctagtatcagcatcaagtatgtggtactactgtaagagacatgaatggagacttctaatttgtatcggagggaaacagaagctttttgtttgcatcatttaactgaactgtgaacccttgtgcctctcatctttatcatcggagttgacagtgaaacaaatttacatcagaagtttgcatctcgcgtatatgccgtataaaagaatttttttgtctttcaatgcagttttttggaagaaaatatttttaaatggacaatggactgtacaataagttacttgaaataagttgtttcagataaatttcaattagatttaaaataaacattttgtccaccttttaagttaatgaaataaaatttgaaactgacttttgcagcttttgcttatatactaatgctaggagaggagggataattaagaataaaatatgtagtgaaagtttccatagtgtgaggctaaaactagaagaaactgtggtaggtccttttgtgggtgggggacaggggagtctgtaaaaagccagtctgtagatgatattttaatatattattgtaatcgaatcgttcagttgttttttgacatggaaagtcctggattttaagctttaaatttgcttattttgtaggtttaagaacatgattttcatgggagttgtaaaattaactgtgctttagcaccttgaggtacactttccttcaacaaatgaaattggattggtgctccagaatttcagagcggtttctgaaagtagtgattttgagctatcccaattcctgttcttcctgaggcctggtttagctcttccttgaattctgcaagctatctcatattttcagtaaattccattttttttaagtttgtttgtttgtttgtttttgagatggagtttcactcttgttgcctaggctggagtgcaatggcacgatatcggcgtaccacaacctctgcatcccaggttcaagagattctcctgcctcagcctccctaggagctgggattacaggcatgtgccaccacacccggctaattttgtatttttagtagagacagggtttttccatgttggtcaggctggtctcgaactcccgacctcaggtgatctgcccacctcagcctcccaaagtgctgggattacaggcatgagccaccgtgcccggccttctttacatttttattgctcacagtcaaacattcctattgattgtaaaataagcaaacctagagttgtggagatttatatgtatttatttatttgaattgagacagggtcttaaactcccaggctcaagtgatcctcctgcctcaacctcccaaagtgctgggattacaggcatgagctagctggcctgttgactttttttttttaactctaacaatttctgttttatagtgaacataatagtataagacttagtttatatatttgacttacaaataaatcctggggagaggggagtatgtgtaaaacataattcagagcagccttctttgagaaagtgggtgtgtttggctgtgtaacaaaacaataaggggatgtgtttgctgtgtaacaaaacaatgaaggatttaagcaggatatttttgcctcatatgttaaatccaagtgaggttgctgtggtggttggtttagctctcagtgatgccttttttgtatttttccgctctgctgtccatgacatatttctaacacctttatgattattgttcctgcttgtaaaagggctgatatttacatgagtgcaaggcaggaagaaaaggtagctgtgccagccacttctggcaagcagttctcccaccttagcctcccaagtagctgagaccataggcatgagatttctcaaaattcctcccagcaggctttcacttagtttcattgttgagaactgtgacaggtccatctctagctgcaaaggaggctgagaaagtgaacacagcagtcctccttatccttggggaatacattccaagagtggatccctgaaacagcagatagtactgaaccctatatatactatgtttttgcctatgtatatatacttgatatggtttggctgctacccaacccaaaatctcatcttgaattataatccccaaatccctatgtgttaagggtgggaccaggtggagataattggatcatgggggcaatttcccctgtgctgttcttgagataatgagtgactctcaggagatctgttggttttataagtgcctggcgtttcccctgcttgcagtcactccatcttgc

SEQ ID NO: 181524 - DNA, 660 bp, Homo sapiens
  Payload ID: 15754
  Gene Symbol: SRP19
  Gene Name: signal recognition particle 19kDa
  Uniprot ID: P09132
  ENST ID: ENST00000515463
  CDS Start-End: 68-304
cgggttcctcccgggtttctgccgggtttctccctgcggctcctgggttgttgagactcttgtgaagatggcttgcgctgccgcgcggtccccggccgaccaggacaggctgttgaaaatcctacagctacagagattcaagatgtatgttcagcagttggacttaacgtatttcttgagaaaaataaaatgtactctagagaatggaatcgtgatgtccaatacagaggcagagtccgggtccagctcaaacaggaagatgggagcctctgccttgtacagttcccatcacgtaagtcagtaatgttgtatgcagcagaaatgatacctaaactaaaaacaaggacacaaaaaacaggaggtgctgaccaaagtcttcaacaaggagagggaagtaaaaaagggaaaggaaagaaaaagaagtaacctagtatcagcatcaagtatgtggtactactgtaagagacatgaatggagacttctaatttgtatcggagggaaacagaagctttttgtttgcatcatttaactgaactgtgaacccttgtgcctctcatctttatcatcggagttgacagtgaaacaaatttacatcagaagtttgcatctcgcgtatatgccgtataaaagaatttttttgtctttcaatgcagttttttg

SEQ ID NO: 181525 - DNA, 833 bp, Homo sapiens
  Payload ID: 15754
  Gene Symbol: SRP19
  Gene Name: signal recognition particle 19kDa
  ENST ID: ENST00000445150
  CDS Start-End: 46-360
cgggtttctccctgcggctcctgggttgttgagactcttgtgaagatggcttgcgctgccgcgcggtccccggccgaccaggacaggtttatttgtatctatcctgcttatttaaataataagaagaccatcgcagagggaaggcgaatccccataagtaaggctgttgaaaatcctacagctacagagattcaagatgtatgttcagcagttggacttaacgtatttcttgagaaaaataaaatgtactctagagaatggaatcgtgatgtccaatacagaggcagagtccgggtccagctcaaacaggaagatgggagcctctgccttgtacagttcccatcacgtaagcttgtttaaatgaatcagtggggctcagggataggtttctcctacacaacacaaaaaaggttctaaaactgaaaggtaaaagtcagaatttgcattctgaagattaatttaaagacaggactactgctcatggagagaagcagtagttctaatttctttgaggtgaatgacctctttgaaaatgtaatgagacccactaaacatttttcaaaaaaattgttgtgtgaacattttataaacctctggaagtctgtcattgctcccaggttaagaatataaaattattaaatcgttggatgttaattgccatttcagatcctagaggtccttgaggtctgttaatatctataatatctaatgattctatcattaataaatctgaaaagcaatattgactgaaaaaagcaagagatatacatagtgtggtaccacttaggtaaatttaaatacaaaatattactatttattgatagatgcatatg

SEQ ID NO: 181526 - DNA, 1270 bp, Homo sapiens
  Payload ID: 15754
  Gene Symbol: SRP19
  Gene Name: signal recognition particle 19kDa
  ENST ID: ENST00000621420
  CDS Start-End: 53-415
tttctgccgggtttctccctgcggctcctgggttgttgagactcttgtgaagatggcttgcgctgccgcgcggtccccggccgaccaggacaggtttatttgtatctatcctgcttatttaaataataagaagaccatcgcagagggaaggcgaatccccataagtaagaaaaataaaatgtactctagagaatggaatcgtgatgtccaatacagaggcagagtccgggtccagctcaaacaggaagatgggagcctctgccttgtacagttcccatcacgtaagtcagtaatgttgtatgcagcagaaatgatacctaaactaaaaacaaggacacaaaaaacaggaggtgctgaccaaagtcttcaacaaggagagggaagtaaaaaagggaaaggaaagaaaaagaagtaacctagtatcagcatcaagtatgtggtactactgtaagagacatgaatggagacttctaatttgtatcggagggaaacagaagctttttgtttgcatcatttaactgaactgtgaacccttgtgcctctcatctttatcatcggagttgacagtgaaacaaatttacatcagaagtttgcatctcgcgtatatgccgtataaaagaatttttttgtctttcaatgcagttttttggaagaaaatatttttaaatggacaatggactgtacaataagttacttgaaataagttgtttcagataaatttcaattagatttaaaataaacattttgtccaccttttaagttaatgaaataaaatttgaaactgacttttgcagcttttgcttatatactaatgctaggagaggagggataattaagaataaaatatgtagtgaaagtttccatagtgtgaggctaaaactagaagaaactgtggtaggtccttttgtgggtgggggacaggggagtctgtaaaaagccagtctgtagatgatattttaatatattattgtaatcgaatcgttcagttgttttttgacatggaaagtcctggattttaagctttaaatttgcttattttgtaggtttaagaacatgattttcatgggagttgtaaaattaactgtgctttagcaccttgaggtacactttccttcaacaaatgaaattggattggtgctccagaatttcagagcggtttctgaaagtagtgattttgagctatcccaattcctgttcttcctgaggcctggtttagctcttccttgaattctgcaagctatctcatattttcagtaaattccattttttt

SEQ ID NO: 181527 - DNA, 2279 bp, Homo sapiens
  Payload ID: 15755
  Gene Symbol: SRP54
  Gene Name: signal recognition particle 54kDa
  Uniprot ID: P61011
  ENST ID: ENST00000216774
  CDS Start-End: 352-1866
gagccgcgtagaaggaacgcggcggtgtgccccggaagcggaagtagattctcctatagaaaggctggactacgcggagtggtgacgtttcctcattgggcggaaggttcgctggcactccgttggtcttccagctggtgggagttgacgacgtggtgctgggcgttgggaccctactttatctagttcgggaagttgggttgtggggtcatacctgtctgtctgctcccagctttcttgggtttcttccgacggcgtggggcctcgctaaggaattcccggcccctcagggccacggctttagcggtgtcttttgcgagttcttcgtaagtacatcttaaagctgtcaagatggttctagcagaccttggaagaaaaataacatcagcattacgctcgttgagcaatgccaccattatcaatgaagaggtattgaatgctatgctaaaagaagtctgtaccgctttgttggaagcagatgttaatattaaactagtgaagcaactaagagaaaatgttaagtctgctattgatcttgaagagatggcatctggtcttaacaaaagaaaaatgattcagcatgctgtatttaaagaacttgtgaagcttgtagaccctggagttaaggcatggacacccactaaaggaaaacaaaatgtgattatgtttgttggattgcaagggagtggtaaaacaacaacatgttcaaagctagcatattattaccagaggaaaggttggaagacctgtttaatatgtgcagacacattcagagcaggggcttttgaccaactaaaacagaatgctaccaaagcaagaattccattttatggaagctatacagaaatggatcctgtcatcattgcttctgaaggagtagagaaatttaaaaatgaaaattttgaaattattattgttgatacaagtggccgccacaaacaagaagactctttgtttgaagaaatgcttcaagttgctaatgctatacaacctgataacattgtttatgtgatggatgcctccattgggcaggcttgtgaagcccaggctaaggcttttaaagataaagtagatgtagcctcagtaatagtgacaaaacttgatggccatgcaaaaggaggtggtgcactcagtgcagtcgctgccacaaaaagtccgattattttcattggtacaggggaacatatagatgactttgaacctttcaaaacacagccttttattagcaaacttcttggtatgggcgacattgaaggactgatagataaagtcaacgagttgaagttggatgacaatgaagcacttatagagaagttgaaacatggtcagtttacgttgcgagacatgtatgagcaatttcaaaatatcatgaaaatgggccccttcagtcagatcttggggatgatccctggttttgggacagattttatgagcaaaggaaatgaacaggagtcaatggcaaggctaaagaaattaatgacaataatggatagtatgaatgatcaagaactagacagtacggatggtgccaaagtttttagtaaacaaccaggaagaatccaaagagtagcaagaggatcgggtgtatcaacaagagatgttcaagaacttttgacacaatataccaagtttgcacagatggtaaaaaagatgggaggtatcaaaggacttttcaaaggtggcgacatgtctaagaatgtgagccagtcacagatggcaaaattgaaccaacaaatggccaaaatgatggatcctagggttcttcatcacatgggtggtatggcaggacttcagtcaatgatgaggcagtttcaacagggtgctgctggcaacatgaaaggcatgatgggattcaataatatgtaaagaaaatgccttaatataaactgactcagttgaatacctaatttgctgagacctcagcgtttcccttctttttgcgaattggggggaaagtgtatttttcttgcttatcatgcactctttccttttcttctcgcccgcttttcccctccttttctttttccttccttctttcctccctttaatataagggagaaatacatggtttttgtggaaatcattatatgtttgctttagattttcttctgttttcaccatcataacacttaagttaaatcatgatgtaaaattttagtacttaaaggtttttaattatctcgaaggccaagcattgcatttgtaaacagtcctggtcagtagttaaataatgtttcaattaaagtgctgtaaaataaacttcaaagtggttataagtt

SEQ ID NO: 181528 - DNA, 2187 bp, Homo sapiens
  Payload ID: 15755
  Gene Symbol: SRP54
  Gene Name: signal recognition particle 54kDa
  Uniprot ID: P61011
  ENST ID: ENST00000546080
  CDS Start-End: 407-1774
gagccgcgtagaaggaacgcggcggtgtgccccggaagcggaagtagattctcctatagaaaggctggactacgcggagtggtgacgtttcctcattgggcggaaggttcgctggcactccgttggtcttccagctggtgggagttgacgacgtggtgctgggcgttgggaccctactttatctagttcgggaagttgggttgtggggtcatacctgtctgtctgctcccagctttcttgggtttcttccgacggcgtggggcctcgctaaggaattcccggcccctcagggccacggctttagcggtgtcttttgcgagttcttcgtaagtacatcttaaagctgtcaagatggttctagcagaccttggaagaaaaataacatcagcattacgctcgttgagcaatgccaccattatcaatgaagaggtctgctattgatcttgaagagatggcatctggtcttaacaaaagaaaaatgattcagcatgctgtatttaaagaacttgtgaagcttgtagaccctggagttaaggcatggacacccactaaaggaaaacaaaatgtgattatgtttgttggattgcaagggagtggtaaaacaacaacatgttcaaagctagcatattattaccagaggaaaggttggaagacctgtttaatatgtgcagacacattcagagcaggggcttttgaccaactaaaacagaatgctaccaaagcaagaattccattttatggaagctatacagaaatggatcctgtcatcattgcttctgaaggagtagagaaatttaaaaatgaaaattttgaaattattattgttgatacaagtggccgccacaaacaagaagactctttgtttgaagaaatgcttcaagttgctaatgctatacaacctgataacattgtttatgtgatggatgcctccattgggcaggcttgtgaagcccaggctaaggcttttaaagataaagtagatgtagcctcagtaatagtgacaaaacttgatggccatgcaaaaggaggtggtgcactcagtgcagtcgctgccacaaaaagtccgattattttcattggtacaggggaacatatagatgactttgaacctttcaaaacacagccttttattagcaaacttcttggtatgggcgacattgaaggactgatagataaagtcaacgagttgaagttggatgacaatgaagcacttatagagaagttgaaacatggtcagtttacgttgcgagacatgtatgagcaatttcaaaatatcatgaaaatgggccccttcagtcagatcttggggatgatccctggttttgggacagattttatgagcaaaggaaatgaacaggagtcaatggcaaggctaaagaaattaatgacaataatggatagtatgaatgatcaagaactagacagtacggatggtgccaaagtttttagtaaacaaccaggaagaatccaaagagtagcaagaggatcgggtgtatcaacaagagatgttcaagaacttttgacacaatataccaagtttgcacagatggtaaaaaagatgggaggtatcaaaggacttttcaaaggtggcgacatgtctaagaatgtgagccagtcacagatggcaaaattgaaccaacaaatggccaaaatgatggatcctagggttcttcatcacatgggtggtatggcaggacttcagtcaatgatgaggcagtttcaacagggtgctgctggcaacatgaaaggcatgatgggattcaataatatgtaaagaaaatgccttaatataaactgactcagttgaatacctaatttgctgagacctcagcgtttcccttctttttgcgaattggggggaaagtgtatttttcttgcttatcatgcactctttccttttcttctcgcccgcttttcccctccttttctttttccttccttctttcctccctttaatataagggagaaatacatggtttttgtggaaatcattatatgtttgctttagattttcttctgttttcaccatcataacacttaagttaaatcatgatgtaaaattttagtacttaaaggtttttaattatctcgaaggccaagcattgcatttgtaaacagtcctggtcagtagttaaataatgtttcaattaaagtgctgtaaaataaacttcaaagtggttataagtt

SEQ ID NO: 181529 - DNA, 572 bp, Homo sapiens
  Payload ID: 15755
  Gene Symbol: SRP54
  Gene Name: signal recognition particle 54kDa
  ENST ID: ENST00000554803
  CDS Start-End: 442-572
agtcacacctctatctctcatctttccgctcttagctgggagtgctccgcctagtcacttttcttaaggtggctcgtcgaggcctgacttcttccccgaaatcacgtccctagacagcctcctattttaccactaactttactcctgcagttattcagcggtaggaaactgaaaccaaaaaccagtgtaagcaagtaaacatctaaactgtttcaggagccgcgtagaaggaacgcggcggtgtgccccggaagcggaagtagattctcctatagaaaggctggactacgcggagtggtgacgtttcctcattgggcggaagctttcttgggtttcttccgacggcgtggggcctcgctaaggaattcccggcccctcagggccacggctttagcggtgtcttttgcgagttcttcgtaagtacatcttaaagctgtcaagatggttctagcagaccttggaagaaaaataacatcagcattacgctcgttgagcaatgccaccattatcaatgaagaggtattgaatgctatgctaaaagaagtctgtaccgctttgttggaagcagatgt

SEQ ID NO: 181530 - DNA, 600 bp, Homo sapiens
  Payload ID: 15755
  Gene Symbol: SRP54
  Gene Name: signal recognition particle 54kDa
  ENST ID: ENST00000556380
  CDS Start-End: 145-312
gtcatacctgtctgtctgctcccagctttcttgggtttcttccgacggcgtggggcctcgctaaggaattcccggcccctcagggccacggctttagcggtgtcttttgcgagttcttcgtaagtacatcttaaagctgtcaagatggttctagcagaccttggaagaaaaataacatcagcattacgctcgttgagcaatgccaccattatcaatgaagaggtattgaatgctatgctaaaagaagtctgtaccgctttgttggaagacctgtttaatatgtgcagacacattcagagcaggggcttttgaccaactaaaacagaatgctaccaaagcaagaattccattttatggaagctatacagaaatggatcctgtcatcattgcttctgaaggagtagagaaatttaaaaatgaaaattttgaaattattattgttgatacaagtggccgccacaaacaagaagactctttgtttgaagaaatgcttcaagttgctaatgctatacaacctgataacattgtttatgtgatggatgcctccattgggcaggcttgtgaagcccaggctaaggcttttaaagataaagtagatgt

SEQ ID NO: 181531 - DNA, 558 bp, Homo sapiens
  Payload ID: 15755
  Gene Symbol: SRP54
  Gene Name: signal recognition particle 54kDa
  ENST ID: ENST00000555746
  CDS Start-End: 337-558
atctttccgctcttagctgggagtgctccgcctagtcacttttcttaaggtggctcgtcgaggcctgacttcttccccgaaatcacgtccctagacagcctcctattttaccactaactttactcctgcagttattcagcggtaggaaactgaaaccaaaaaccagtgtaagcaagtaaacatctaaactgtttcaggagccgcgtagaaggaacgcggcggtgtgccccggaagcggaagtagattctcctatagaaaggctggactacgcggagtggtgacgtttcctcattgggcggaagagttcttcgtaagtacatcttaaagctgtcaagatggttctagcagaccttggaagaaaaataacatcagcattacgctcgttgagcaatgccaccattatcaatgaagaggtattgaatgctatgctaaaagaagtctgtaccgctttgttggaagcagatgttaatattaaactagtgaagcaactaagagaaaatgttaagtctgctattgatcttgaagagatggcatctggtcttaacaaaagaaaaatg

SEQ ID NO: 181532 - DNA, 1949 bp, Homo sapiens
  Payload ID: 15755
  Gene Symbol: SRP54
  Gene Name: signal recognition particle 54kDa
  ENST ID: ENST00000555557
  CDS Start-End: 325-1647
cttccagctggtgggagttgacgacgtggtgctgggcgttgggaccctactttatctagttcgggaagttgggttgtggggtcatacctgtctgtctgctcccagctttcttgggtttcttccgacggcgtggggcctcgctaaggaattcccggcccctcagggccacggctttagcggtgtcttttgcgagttcttcgtaagtacatcttaaagctgtcaagatggttctagcagaccttggaagaaaaataacatcagcattacgctcgttgagcaatgccaccattatcaatgaagaggtctgctattgatcttgaagagatggcatctggtcttaacaaaagaaaaatgattcagcatgctgtatttaaagaacttgtgaagcttgtagaccctggagttaaggcatggacacccactaaaggaaaacaaaatgtgattatgtttgttggattgcaagggagtggtaaaacaacaacatgttcaaagctagcatattattaccagaggaaaggttggaagacctgtttaatatgtgcagacacattcagagcaggggcttttgaccaactaaaacagaatgctaccaaagcaagaattccattttatggaagctatacagaaatggatcctgtcatcattgcttctgaaggagtagagaaatttaaaaatgaaaattttgaaattattattgttgatacaagtggccgccacaaacaagaagactctttgtttgaagaaatgcttcaagttgctaatgctatacaacctgataacattgtttatgtgatggatgcctccattgggcaggcttgtgaagcccaggctaaggcttttaaagataaagtagatgtagcctcagtaatagtgacaaaacttgatggccatgcaaaaggaggtggtgcactcagtgcagtcgctgccacaaaaagtccgattattttcattggtacaggggaacatatagatgactttgaacctttcaaaacacagccttttattagcaaacttcttggtatgggcgacattgaaggactgatagataaagtcaacgagttgaagttggatgacaatgaagcacttatagagaagttgaaacatggtcagtttacgttgcgagacatgtatgagcaatttcaaaatatcatgaaaatgggccccttcagtcagatcttggggatgatccctggttttgggacagattttatgagcaaaggaaatgaacaggagtcaatggcaaggctaaagaaattaatgacaataatggatagtatgaatgatcaagaactagacagtacggatggtgccaaagtttttagtaaacaaccaggaagaatccaaagagtagcaagaggatcgggtgtatcaacaagagatgttcaagaacttttgacacaatataccaagtttgcacagatggtaaaaaagatgggaggtatcaaaggacttttcaaaggtggcgacatgtctaagaatgtgagccagtcacagatggcaaaattgaaccaacaaatggccaaaatgatggatcctagggttcttcatcacatgggtggtatggcaggacttcagtcaatgatgaggcagtttcaacagggtgctgctggcaacatgaaaggcatgatgggattcaataatatgtaaagaaaatgccttaatataaactgactcagttgaatacctaatttgctgagacctcagcgtttcccttctttttgcgaattggggggaaagtgtatttttcttgcttatcatgcactctttccttttcttctcgcccgcttttcccctccttttctttttccttccttctttcctccctttaatataagggagaaatacatggtttttgtggaaatcattatatgtttgctttagattttcttctgttttcaccatcataacacttaagttaaatcatgatgtaaaattttagtacttaaagg

SEQ ID NO: 181533 - DNA, 2327 bp, Homo sapiens
  Payload ID: 15755
  Gene Symbol: SRP54
  Gene Name: signal recognition particle 54kDa
  Uniprot ID: P61011
  ENST ID: ENST00000556994
  CDS Start-End: 398-1912
gagatccaagacgcaactcccaccgccaggcggtcgcctcagaagggagccgcgtagaaggaacgcggcggtgtgccccggaagcggaagtagattctcctatagaaaggctggactacgcggagtggtgacgtttcctcattgggcggaaggttcgctggcactccgttggtcttccagctggtgggagttgacgacgtggtgctgggcgttgggaccctactttatctagttcgggaagttgggttgtggggtcatacctgtctgtctgctcccagctttcttgggtttcttccgacggcgtggggcctcgctaaggaattcccggcccctcagggccacggctttagcggtgtcttttgcgagttcttcgtaagtacatcttaaagctgtcaagatggttctagcagaccttggaagaaaaataacatcagcattacgctcgttgagcaatgccaccattatcaatgaagaggtattgaatgctatgctaaaagaagtctgtaccgctttgttggaagcagatgttaatattaaactagtgaagcaactaagagaaaatgttaagtctgctattgatcttgaagagatggcatctggtcttaacaaaagaaaaatgattcagcatgctgtatttaaagaacttgtgaagcttgtagaccctggagttaaggcatggacacccactaaaggaaaacaaaatgtgattatgtttgttggattgcaagggagtggtaaaacaacaacatgttcaaagctagcatattattaccagaggaaaggttggaagacctgtttaatatgtgcagacacattcagagcaggggcttttgaccaactaaaacagaatgctaccaaagcaagaattccattttatggaagctatacagaaatggatcctgtcatcattgcttctgaaggagtagagaaatttaaaaatgaaaattttgaaattattattgttgatacaagtggccgccacaaacaagaagactctttgtttgaagaaatgcttcaagttgctaatgctatacaacctgataacattgtttatgtgatggatgcctccattgggcaggcttgtgaagcccaggctaaggcttttaaagataaagtagatgtagcctcagtaatagtgacaaaacttgatggccatgcaaaaggaggtggtgcactcagtgcagtcgctgccacaaaaagtccgattattttcattggtacaggggaacatatagatgactttgaacctttcaaaacacagccttttattagcaaacttcttggtatgggcgacattgaaggactgatagataaagtcaacgagttgaagttggatgacaatgaagcacttatagagaagttgaaacatggtcagtttacgttgcgagacatgtatgagcaatttcaaaatatcatgaaaatgggccccttcagtcagatcttggggatgatccctggttttgggacagattttatgagcaaaggaaatgaacaggagtcaatggcaaggctaaagaaattaatgacaataatggatagtatgaatgatcaagaactagacagtacggatggtgccaaagtttttagtaaacaaccaggaagaatccaaagagtagcaagaggatcgggtgtatcaacaagagatgttcaagaacttttgacacaatataccaagtttgcacagatggtaaaaaagatgggaggtatcaaaggacttttcaaaggtggcgacatgtctaagaatgtgagccagtcacagatggcaaaattgaaccaacaaatggccaaaatgatggatcctagggttcttcatcacatgggtggtatggcaggacttcagtcaatgatgaggcagtttcaacagggtgctgctggcaacatgaaaggcatgatgggattcaataatatgtaaagaaaatgccttaatataaactgactcagttgaatacctaatttgctgagacctcagcgtttcccttctttttgcgaattggggggaaagtgtatttttcttgcttatcatgcactctttccttttcttctcgcccgcttttcccctccttttctttttccttccttctttcctccctttaatataagggagaaatacatggtttttgtggaaatcattatatgtttgctttagattttcttctgttttcaccatcataacacttaagttaaatcatgatgtaaaattttagtacttaaaggtttttaattatctcgaaggccaagcattgcatttgtaaacagtcctggtcagtagttaaataatgtttcaattaaagtgctgtaaaataaacttcaaagtggttataagttaa

SEQ ID NO: 181534 - DNA, 162 bp, Homo sapiens
  Payload ID: 15755
  Gene Symbol: SRP54
  Gene Name: signal recognition particle 54kDa
  ENST ID: ENST00000630962
  CDS Start-End: 1-162
atggttctagcagaccttggaagaaaaataacatcagcattacgctcgttgagcaatgccaccattatcaatgaagaggtattgaatgctatgctaaaagaagtctgtaccgctttgttggaagacctgtttaatatgtgcagacacattcagagcaggtaa

SEQ ID NO: 181535 - DNA, 2649 bp, Homo sapiens
  Payload ID: 15756
  Gene Symbol: SRP68
  Gene Name: signal recognition particle 68kDa
  Uniprot ID: Q9UHB9
  ENST ID: ENST00000307877
  CDS Start-End: 163-2046
ctcgcgcaggcgcgctccagcacatggcgccctgctgcagcaagggccgacggcggcggagtccgccgctatcccatcagcccggccaggcaggtccagctctcacccgcccaggtcgtcccgcctcccctatcccgtcttgctctgcggcgcaggggcaagatggctgctgagaagcaggtcccaggcggcggcggcggcggcggcagtggcggcggcggtggcagtggcggcggcggtagcggcggtggacgtggtgccggaggggaagaaaataaagaaaacgaacgcccttcggccggatcgaaggcaaacaaagaatttggggatagcctgagtttggagattcttcagattattaaggaatcccagcagcagcatggtttacggcatggagattttcagaggtacaggggctactgttcccgtagacaaagacgtcttcgaaaaacactcaacttcaagatgggtaacagacacaaattcacagggaagaaagtgactgaagagcttctgaccgataatagatacttgcttctggttctgatggatgctgaaagagcctggagctacgccatgcagctgaaacaggaagccaacactgaaccccgaaaacggtttcacttgttatctcgcctacgcaaagccgtgaagcatgcagaggaattggaacgcttgtgtgagagcaatcgcgtggatgccaagaccaaattagaggctcaggcttacacagcttacctctcaggaatgctacgttttgaacatcaagaatggaaagctgccattgaggcttttaacaaatgcaaaactatctatgagaagctagccagtgctttcacagaggagcaggctgtgctgtataaccaacgtgtggaagagatttcacccaacatccgctattgtgcatataatattggggaccagtcagccatcaatgaactcatgcagatgagattgaggtctgggggcactgagggtctcttggctgaaaaattggaggctttgatcactcagactcgagccaaacaggcagctaccatgagtgaagtggagtggagagggagaacggttccagtgaagattgacaaagtgcgcattttcttattaggactggctgataacgaagcagctattgtccaggctgaaagcgaagaaactaaggagcgcctgtttgaatcaatgctcagcgagtgtcgggacgccatccaggtggttcgggaggagctcaagccagatcagaaacagagagattatatccttgaaggagagccagggaaggtgtctaatcttcaatacttgcatagctacctgacttacatcaagctatcaacggcaatcaagcgtaatgagaacatggccaaaggtctgcagagggctctgctgcagcagcagccagaggatgacagcaagcgctcaccccggccccaggacctgatccgactctatgacatcatcttacagaatctggtggaattgctccagcttcctggtttagaggaagacaaagccttccagaaagagataggcctcaagactctggtgttcaaagcttacaggtgttttttcattgctcagtcctatgtgctggtgaagaagtggagcgaagcccttgtcctgtatgacagagtcctgaaatatgcaaatgaagtaaattctgatgctggcgccttcaagaacagcctaaaggacctgcctgatgtgcaagagctcatcactcaagtgcggtcagagaagtgctccctgcaggccgcagccatccttgatgcaaacgacgctcatcaaacagagacctcctcctcccaagtcaaggacaataagcctctggttgaacggtttgagacattctgcctggacccttcccttgtcaccaagcaagccaaccttgtgcacttcccaccaggcttccagcccattccctgcaagcctttgttctttgacctggccctcaaccatgtggctttcccaccccttgaggacaagttggaacagaagaccaagagtggcctcactggatacatcaagggcatctttggattcaggagctaaccaggctcttcctcgggggcgggggagattctgactcttaatctgtattgtgagaaaatcccagcaagttccatgatattaaatccaggtctgcattggcccggggcaagagtttaacatcttcggccctgcattcctacatcttgtgtctgtacacgttcttaagcagcgtgtcaggagagcaccctgttgtcttctggtaaatgtgtgcagggtcatcctgtctcctgtacctcctgggaaaggggccgctgctgtctggtgccctgtgagctgtgattgattgcctttggtcagtaatgcgttcaggagtccacaccaggcacagatggggccttgaaacgctttgtcatgcttcttcagtaccatggatttgaaatgaactcatccttgctgtgagcatccaggagcccttgagaagtttatctatgactatgaaactggcaacgtcaccccagaattacggtcagccttattccccttcacctcccagtgaacgctaagaagtttcagacaagcagagagctctatttttagaagaaatatgttacactcagaaatgatgaaaccaaatcttatattaaaaggcaaagatgacggaga

SEQ ID NO: 181536 - DNA, 2386 bp, Homo sapiens
  Payload ID: 15756
  Gene Symbol: SRP68
  Gene Name: signal recognition particle 68kDa
  Uniprot ID: Q9UHB9
  ENST ID: ENST00000539137
  CDS Start-End: 17-1786
gcggcgcaggggcaagatggctgctgagaagcaggtcccaggcggcggcggcggcggcggcagtggcggcggcggtggcagtggcggcggcggtagcggcggtggacgtggtgccggaggggaagaaaataaagaaaacgaacgcccttcggccggatcgaaggcaaacaaagaatttggggatagcctgagtttggagattcttcagattattaaggaatcccagcagcagcatggtttacggcatggagattttcagaggtacagatacttgcttctggttctgatggatgctgaaagagcctggagctacgccatgcagctgaaacaggaagccaacactgaaccccgaaaacggtttcacttgttatctcgcctacgcaaagccgtgaagcatgcagaggaattggaacgcttgtgtgagagcaatcgcgtggatgccaagaccaaattagaggctcaggcttacacagcttacctctcaggaatgctacgttttgaacatcaagaatggaaagctgccattgaggcttttaacaaatgcaaaactatctatgagaagctagccagtgctttcacagaggagcaggctgtgctgtataaccaacgtgtggaagagatttcacccaacatccgctattgtgcatataatattggggaccagtcagccatcaatgaactcatgcagatgagattgaggtctgggggcactgagggtctcttggctgaaaaattggaggctttgatcactcagactcgagccaaacaggcagctaccatgagtgaagtggagtggagagggagaacggttccagtgaagattgacaaagtgcgcattttcttattaggactggctgataacgaagcagctattgtccaggctgaaagcgaagaaactaaggagcgcctgtttgaatcaatgctcagcgagtgtcgggacgccatccaggtggttcgggaggagctcaagccagatcagaaacagagagattatatccttgaaggagagccagggaaggtgtctaatcttcaatacttgcatagctacctgacttacatcaagctatcaacggcaatcaagcgtaatgagaacatggccaaaggtctgcagagggctctgctgcagcagcagccagaggatgacagcaagcgctcaccccggccccaggacctgatccgactctatgacatcatcttacagaatctggtggaattgctccagcttcctggtttagaggaagacaaagccttccagaaagagataggcctcaagactctggtgttcaaagcttacaggtgttttttcattgctcagtcctatgtgctggtgaagaagtggagcgaagcccttgtcctgtatgacagagtcctgaaatatgcaaatgaagtaaattctgatgctggcgccttcaagaacagcctaaaggacctgcctgatgtgcaagagctcatcactcaagtgcggtcagagaagtgctccctgcaggccgcagccatccttgatgcaaacgacgctcatcaaacagagacctcctcctcccaagtcaaggacaataagcctctggttgaacggtttgagacattctgcctggacccttcccttgtcaccaagcaagccaaccttgtgcacttcccaccaggcttccagcccattccctgcaagcctttgttctttgacctggccctcaaccatgtggctttcccaccccttgaggacaagttggaacagaagaccaagagtggcctcactggatacatcaagggcatctttggattcaggagctaaccaggctcttcctcgggggcgggggagattctgactcttaatctgtattgtgagaaaatcccagcaagttccatgatattaaatccaggtctgcattggcccggggcaagagtttaacatcttcggccctgcattcctacatcttgtgtctgtacacgttcttaagcagcgtgtcaggagagcaccctgttgtcttctggtaaatgtgtgcagggtcatcctgtctcctgtacctcctgggaaaggggccgctgctgtctggtgccctgtgagctgtgattgattgcctttggtcagtaatgcgttcaggagtccacaccaggcacagatggggccttgaaacgctttgtcatgcttcttcagtaccatggatttgaaatgaactcatccttgctgtgagcatccaggagcccttgagaagtttatctatgactatgaaactggcaacgtcaccccagaattacggtcagccttattccccttcacctcccagtgaacgctaagaagtttcagacaagcagagagctctatttttagaagaaatatgttacactcagaaatgatgaaaccaaatcttatattaaaaggcaaagatgacgg

SEQ ID NO: 181537 - DNA, 1941 bp, Homo sapiens
  Payload ID: 15756
  Gene Symbol: SRP68
  Gene Name: signal recognition particle 68kDa
  ENST ID: ENST00000592704
  CDS Start-End: 7-171
ggcaagatggctgctgagaagcaggtcccaggcggcggcggcggcggcggcagtggcggcggcggtggcagtggcggcggcggtagcggcggtggacgtggtgccggaggggaagaaaataaagaaaacgaacgcccttcggccggatcgaaggggctactgttcccgtagacaaagacgtcttcgaaaaacactcaacttcaagatgggtaacagacacaaattcacagggaagaaagtgactgaagagcttctgaccgataatagatacttgcttctggttctgatggatgctgaaagagcctggagctacgccatgcagctgaaacaggaagccaacactgaaccccgaaaacggtttcacttgttatctcgcctacgcaaagccgtgaagcatgcagaggaattggaacgcttgtgtgagagcaatcgcgtggatgccaagaccaaattagaggctcaggcttacacagcttacctctcaggaatgctacgttttgaacatcaagaatggaaagctgccattgaggcttttaacaaatgcaaaactatctatgagaagctagccagtgctttcacagaggagcaggctgtgctgtataaccaacgtgtggaagagatttcacccaacatccgctattgtgcatataatattggggaccagtcagccatcaatgaactcatgcagatgagattgaggtctgggggcactgagggtctcttggctgaaaaattggaggctttgatcactcagactcgagccaaacaggcagctaccatgagtgaagtggagtggagagggagaacggttccagtgaagattgacaaagtgcgcattttcttattaggactggctgataacgaagcagctattgtccaggctgaaagcgaagaaactaaggagcgcctgtttgaatcaatgctcagcgagtgtcgggacgccatccaggtggttcgggaggagctcaagccagatcagaaacagagagattatatccttgaaggagagccagggaaggtgtctaatcttcaatacttgcatagctacctgacttacatcaagctatcaacggcaatcaagcgtaatgagaacatggccaaaggtctgcagagggctctgctgcagcagcagccagaggatgacagcaagcgctcaccccggccccaggacctgatccgactctatgacatcatcttacagaatctggtggaattgctccagcttcctggtttagaggaagacaaagccttccagaaagagataggcctcaagactctggtgttcaaagcttacaggtgttttttcattgctcagtcctatgtgctggtgaagaagtggagcgaagcccttgtcctgtatgacagagtcctgaaatatgcaaatgaagtaaattctgatgctggcgccttcaagaacagcctaaaggacctgcctgatgtgcaagagctcatcactcaagtgcggtcagagaagtgctccctgcaggccgcagccatccttgatgcaaacgacgctcatcaaacagagacctcctcctcccaagtcaaggacaataagcctctggttgaacggtttgagacattctgcctggacccttcccttgtcaccaagcaagccaaccttgtgcacttcccaccaggcttccagcccattccctgcaagcctttgttctttgacctggccctcaaccatgtggctttcccaccccttgaggacaagttggaacagaagaccaagagtggcctcactggatacatcaagggcatctttggattcaggagctaaccaggctcttcctcgggggcgggggagattctgactcttaatctgtattgtgagaaaatcccagcaagttccatgatattaaatccaggtctgcattggcccggggcaagagtttaacatcttcggccctgcattcctacatcttgtgtctgtac

SEQ ID NO: 181538 - DNA, 507 bp, Homo sapiens
  Payload ID: 15756
  Gene Symbol: SRP68
  Gene Name: signal recognition particle 68kDa
  ENST ID: ENST00000591272
  CDS Start-End: 17-208
gcggcgcaggggcaagatggctgctgagaagcaggtcccaggcggcggcggcggcggcggcagtggcggcggcggtggcagtggcggcggcggtagcggcggtggacgtggtgccggaggggaagaaaataaagaaaacgaacgcccttcggccggatcgaaggcaaacaaagaatttggggatagcctgagtttggagaattattaaggaatcccagcagcagcatggtttacggcatggagattttcagaggtacaggggctactgttcccgtagacaaagacgtcttcgaaaaacactcaacttcaagatgggtaacagacacaaattcacagggaagaaagtgactgaagagcttctgaccgataatagatacttgcttctggttctgatggatgctgaaagagcctggagctacgccatgcagctgaaacaggaagccaacactgaaccccgaaaacggtttcacttgttatctcgcctacgcaaagccgtgaagcatgcag

SEQ ID NO: 181539 - DNA, 2037 bp, Homo sapiens
  Payload ID: 15756
  Gene Symbol: SRP68
  Gene Name: signal recognition particle 68kDa
  Uniprot ID: Q9UHB9
  ENST ID: ENST00000602720
  CDS Start-End: 240-1106
ccttcattgctttttaggatgtttgtaaaattcccagtgggaacttagagctttgtgggagcagtggggaggttttttggtttcagcaccttgatgcagaggcttagttaaagggagcagaggtgatacgtggcagtcaagaggttttaaacttgaactgtaccctaccgacaggaaaagaggcaaatcctgtgtagctggctgaaagcgaagaaactaaggagcgcctgtttgaatcaatgctcagcgagtgtcgggacgccatccaggtggttcgggaggagctcaagccagatcagaaacagagagattatatccttgaaggagagccagggaaggtgtctaatcttcaatacttgcatagctacctgacttacatcaagctatcaacggcaatcaagcgtaatgagaacatggccaaaggtctgcagagggctctgctgcagcagcagccagaggatgacagcaagcgctcaccccggccccaggacctgatccgactctatgacatcatcttacagaatctggtggaattgctccagcttcctggtttagaggaagacaaagccttccagaaagagataggcctcaagactctggtgttcaaagcttacaggtgttttttcattgctcagtcctatgtgctggtgaagaagtggagcgaagcccttgtcctgtatgacagagtcctgaaatatgcaaatgaagtaaattctgatgctggcgccttcaagaacagcctaaaggacctgcctgatgtgcaagagctcatcactcaagtgcggtcagagaagtgctccctgcaggccgcagccatccttgatgcaaacgacgctcatcaaacagagacctcctcctcccaagtcaaggacaataagcctctggttgaacggtttgagacattctgcctggacccttcccttgtcaccaagcaagccaaccttgtgcacttcccaccaggcttccagcccattccctgcaagcctttgttctttgacctggccctcaaccatgtggctttcccaccccttgaggacaagttggaacagaagaccaagagtggcctcactggatacatcaagggcatctttggattcaggagctaaccaggctcttcctcgggggcgggggagattctgactcttaatctgtattgtgagaaaatcccagcaagttccatgatattaaatccaggtctgcattggcccggggcaagagtttaacatcttcggccctgcattcctacatcttgtgtctgtacacgttcttaagcagcgtgtcaggagagcaccctgttgtcttctggtaaatgtgtgcagggtcatcctgtctcctgtacctcctgggaaaggggccgctgctgtctggtgccctgtgagctgtgattgattgcctttggtcagtaatgcgttcaggagtccacaccaggcacagatggggccttgaaacgctttgtcatgcttcttcagtaccatggatttgaaatgaactcatccttgctgtgagcatccaggagcccttgagaagtttatctatgactatgaaactggcaacgtcaccccagaattacggtcagccttattccccttcacctcccagtgaacgctaagaagtttcagacaagcagagagctctatttttagaagaaatatgttacactcagaaatgatgaaaccaaatcttatattaaaaggcaaagatgacggagactgtgcccatttcttatatgccctccctcatgtccagtccccgttctctcctcgggagcctagttgcgtgaagccggtgaggtcaagtgtaacctgacttaccggcaactaggtgaggctgatgccagatacacatgttagaggcactatttttcaggacttcccaatgtgtaatttttagatgccattatattttaatccccttcgttaccccccgtttttccttagtcatcccttttcacttctattataacatcaataatagaagtcacaaaaacaatgtaagaaagcaaggaataaaagtgatttaaacatgtacctgacactt

SEQ ID NO: 181540 - DNA, 165 bp, Homo sapiens
  Payload ID: 15756
  Gene Symbol: SRP68
  Gene Name: signal recognition particle 68kDa
  ENST ID: ENST00000629930
  CDS Start-End: 1-165
atggctgctgagaagcaggtcccaggcggcggcggcggcggcggcagtggcggcggcggtggcagtggcggcggcggtagcggcggtggacgtggtgccggaggggaagaaaataaagaaaacgaacgcccttcggccggatcgaaggggctactgttcccgtag

SEQ ID NO: 181541 - DNA, 3983 bp, Homo sapiens
  Payload ID: 15757
  Gene Symbol: SRP72
  Gene Name: signal recognition particle 72kDa
  Uniprot ID: O76094
  ENST ID: ENST00000342756
  CDS Start-End: 722-2737
gctaagtaacttgtttattgtcagacatctagtgagtcgcagagccagggaactgaccacgggcattttcaccccattacccttccagcttattgccgactgctcccgaagggagcgaaaaggacaggcaaagggtttcaccaaaccctttgtaatgggagattcttgccttcttacctttcctcacgtttgcttctctgccagaatgtcttcccgcactttccccagaacccaagttctcctaatcatctttcaagatccctttccctcaaccacagatgagccgtgcctatttctccttcaaatgactccctatggcttctagttggtagtcttttatttaccacctcatagtccttttatttatatcccataaatgatcgtccggccccgcaccgtgggaccaggacgctgcctcgaccatggcggtctcctggaaacaggctgctttgagccgaaactggtgaccgtttcccaaccccgtccaggagtccgacgcctcttttctccaggccaacttcaagtgaggtgtatcaactctatccgcacaaatttcttgccacgagagcagaagattatgatctctgatgctgccttagggctgaagacactcccaactcggcgacgcttagcaatcatcgacttcctcctcctcttggctgcctcggagatcctgttccggggcagaggtctccccgccccgcccctcgtctcctccaagatggcgagcggcggcagcgggggggtgtcagtacctgcgctgtggagtgaagtgaaccggtatggccagaacggcgacttcacgcgcgctctcaagaccgtcaataagatactacagatcaacaaagatgacgtaactgccctgcattgtaaagtggtatgccttatccagaatggaagtttcaaggaagctttgaatgtcatcaatactcacaccaaagtgttagccaataactctctctcctttgaaaaggcatattgcgagtacaggctgaacagaattgagaatgccttgaagacaatagaaagtgccaaccagcagacagacaaactgaaggagctttatggacaagtgttataccgtttggaacgctatgatgaatgcttagcagtgtatagagatctcgtccgaaactcccaagatgattatgatgaggagaggaaaacaaacctttcagcagttgttgcagctcaaagcaattgggaaaaagtggttccagagaacctgggcctccaagaaggcacacatgagctgtgctacaacactgcatgtgcactgataggccaaggccagctgaaccaggccatgaaaatcctacaaaaagctgaagatctttgccgccgttcattatcagaagacactgatgggactgaggaagacccacaggcagaactggccatcattcatggtcagatggcttatattctgcagcttcagggtcgaacagaggaggctttgcaactttacaatcaaataataaaactaaaaccaacagatgtgggattactagctgtaattgcaaataacatcattaccattaacaaggaccaaaatgtctttgactccaagaagaaagtgaaattaaccaatgcggaaggagtagagtttaagctttccaagaaacaactacaagctatagaatttaacaaagctttacttgctatgtacacaaaccaggctgaacaatgccgcaaaatatctgccagtttacagtcccaaagtcccgagcatctcttacctgtgttaatccaagctgcccagctctgccgtgaaaagcagcacacaaaagcaatagagctgcttcaggaattttcagatcagcatccagaaaatgcagctgaaattaagctgaccatggcacagttgaaaatttctcaaggtaatatttctaaagcatgtctaatattgagaagcatagaggagttaaagcataaaccaggcatggtatctgcattagttaccatgtatagccatgaagaagatattgatagtgccattgaggtcttcacacaagctatccagtggtatcaaaaccatcagccaaaatctcctgctcatttgtccttgataagagaagctgcaaacttcaaactcaaatatgggcggaagaaggaggcaattagtgacctacaacagctgtggaaacaaaatccaaaagatattcacaccctggcacagcttatttctgcttactcacttgtagatccagagaaagccaaagctcttagtaaacacttgccatcgtcagatagtatgtctctaaaagtagatgttgaggctcttgaaaattctgctggtgctacatacattcggaagaagggtggaaaagttactggagatagtcaaccaaaggaacaaggacagggagatttgaaaaagaagaaaaagaaaaagaagggaaaattgcctaagaattatgacccaaaagttaccccagatccagaaagatggctgccaatgcgagaacgttcttactaccggggaagaaagaagggtaaaaagaaggatcagattggaaaagggacccagggagcaactgcaggagcttcatctgaactggatgccagtaaaactgtgagcagcccacccacctccccaagacctggcagtgctgcaacagtatctgcctctacaagtaacatcatacccccaagacaccagaaacctgcaggggctccagcaacaaaaaagaaacagcaacagaaaaagaagaaaggtggaaaaggtggctggtgatgagaatattcttgttgcaggctgtttttaaactagtgtcagtgacactaggaatataataaaggtaacacagcaagaagcacagaactactccctcttcatctccatattttcataatttcttgtgtttcaaatagggaaacatcttcctcaaagtctgcctagtgagatatggcctactggttgcctcatagctttgtacagattatgaggactgaaaataattgggcatttacccatcttggtatctgttgtatcctttatctgtgtgtgctgatttgatcttttttcagtttcacataccttatctaaggtttcccaggatttaaacagaaactacttctatgatttcagctggagtctgaagatacttgtttctgttcaagtcccactttaaattatgtcttaggagactgaaagtggaatcttctgagcattcctaaatatctgcttagaaatatcatgtgataaagagggaccttcttaatacactgatgttcttcactaaatggatggccacaagaaaaataaagtaaatgtcttaaataatttaaccataaattttctgtcatgtgatactggaatatgggatacttttcatgtttatatatatatatatatgtatatatatatacatatatatatatatataaacatgaaatatatatatatggctcctttgtgccccatgtcattttcagattatggtagcatgctgatacagcaccatgaaagaactcaaggaaaatatatcaatgtaagaagttcactcttagacccagtgttctgaggtcacatgggtttggactgtctcaatcagaaagattaatgactgttatcaagaacatgaacattggcttcctccatagagaagaaatcagtatctgagttgcataccaggcagtattaaaatctaacaggtctgtttggcccattgatagatactcaaatggtgtctccttctggttatggattttgaccattgattacctttctcaatgtaatgaagtattttacagtcaatttgtggtgtaaatgttgctcttgtctttccttgcttacaaactactttcacattgaacagctgtgagacagacatattgagatgcctgcccttgttagtattcattttatgctgcccaagatatcatttaatttagacttaacaagtatttccttgtgattatattactctgtccttgttaataaagtgctgctgtgtttgactctgaacatactaccaaaa

SEQ ID NO: 181542 - DNA, 2473 bp, Homo sapiens
  Payload ID: 15757
  Gene Symbol: SRP72
  Gene Name: signal recognition particle 72kDa
  Uniprot ID: O76094
  ENST ID: ENST00000510663
  CDS Start-End: 20-1852
gcccctcgtctcctccaagatggcgagcggcggcagcgggggggtgtcagtacctgcgctgtggagtgaagtgaaccggtatggccagaacggcgacttcacgcgcgctctcaagaccgtcaataagatactacagatcaacaaagatgacgtaactgccctgcattgtaaagtggtatgccttatccagaatggaagtttcaaggaagctttgaatgtcatcaatactcacaccaaagtgttagccaataactctctctcctttgaaaaggcatattgcgagtacaggctgaacagaattgagaatgccttgaagacaatagaaagtgccaaccagcagacagacaaactgaaggagctttatggacaagtgttataccgtttggaacgctatgatgaatgcttagcagtgtatagagatctcgtccgaaactcccaagatgattatgatgaggagaggaaaacaaacctttcagcagttgttgcagctcaaagcaattgggaaaaagtggttccagagaacctgggcctccaagaaggcacacatgagctgtgctacaacactgcatgtgcactgataggccaaggccagctgaaccaggccatgaaaatcctacaaaaagctgaagatctttgccgccgttcattatcagaagacactgaccaaaatgtctttgactccaagaagaaagtgaaattaaccaatgcggaaggagtagagtttaagctttccaagaaacaactacaagctatagaatttaacaaagctttacttgctatgtacacaaaccaggctgaacaatgccgcaaaatatctgccagtttacagtcccaaagtcccgagcatctcttacctgtgttaatccaagctgcccagctctgccgtgaaaagcagcacacaaaagcaatagagctgcttcaggaattttcagatcagcatccagaaaatgcagctgaaattaagctgaccatggcacagttgaaaatttctcaaggtaatatttctaaagcatgtctaatattgagaagcatagaggagttaaagcataaaccaggcatggtatctgcattagttaccatgtatagccatgaagaagatattgatagtgccattgaggtcttcacacaagctatccagtggtatcaaaaccatcagccaaaatctcctgctcatttgtccttgataagagaagctgcaaacttcaaactcaaatatgggcggaagaaggaggcaattagtgacctacaacagctgtggaaacaaaatccaaaagatattcacaccctggcacagcttatttctgcttactcacttgtagatccagagaaagccaaagctcttagtaaacacttgccatcgtcagatagtatgtctctaaaagtagatgttgaggctcttgaaaattctgctggtgctacatacattcggaagaagggtggaaaagttactggagatagtcaaccaaaggaacaaggacagggagatttgaaaaagaagaaaaagaaaaagaagggaaaattgcctaagaattatgacccaaaagttaccccagatccagaaagatggctgccaatgcgagaacgttcttactaccggggaagaaagaagggtaaaaagaaggatcagattggaaaagggacccagggagcaactgcaggagcttcatctgaactggatgccagtaaaactgtgagcagcccacccacctccccaagacctggcagtgctgcaacagtatctgcctctacaagtaacatcatacccccaagacaccagaaacctgcaggggctccagcaacaaaaaagaaacagcaacagaaaaagaagaaaggtggaaaaggtggctggtgatgagaatattcttgttgcaggctgtttttaaactagtgtcagtgacactaggaatataataaaggtaacacagcaagaagcacagaactactccctcttcatctccatattttcataatttcttgtgtttcaaatagggaaacatcttcctcaaagtctgcctagtgagatatggcctactggttgcctcatagctttgtacagattatgaggactgaaaataattgggcatttacccatcttggtatctgttgtatcctttatctgtgtgtgctgatttgatcttttttcagtttcacataccttatctaaggtttcccaggatttaaacagaaactacttctatgatttcagctggagtctgaagatacttgtttctgttcaagtcccactttaaattatgtcttaggagactgaaagtggaatcttctgagcattcctaaatatctgcttagaaatatcatgtgataaagagggaccttcttaatacactgatgttcttcactaaatggatggccacaagaaaaataaagtaaatgtcttaaataatttaaccataaattttctgtcatgtgatactggaatatgggatacttttcatgtttatatatatatatatat

SEQ ID NO: 181543 - DNA, 1071 bp, Homo sapiens
  Payload ID: 15757
  Gene Symbol: SRP72
  Gene Name: signal recognition particle 72kDa
  ENST ID: ENST00000505314
  CDS Start-End: 1-1071
ggagaggaaaacaaacctttcagcagttgttgcagctcaaagcaattgggaaaaagtggttccagagaacctgggcctccaagaaggcacacatgagctgtgctacaacactgcatgtgcactgataggccaaggccagctgaaccaggccatgaaaatcctacaaaaagctgaagatctttgccgccgttcattatcagaagacactgatgggactgaggaagacccacaggcagaactggccatcattcatggtcagatggcttatattctgcagcttcagggtcgaacagaggaggctttgcaactttacaatcaaataataaaactaaaaccaacagatgtgggattactagctgtaattgcaaataacatcattaccattaacaaggctgaacaatgccgcaaaatatctgccagtttacagtcccaaagtcccgagcatctcttacctgtgttaatccaagctgcccagctctgccgtgaaaagcagcacacaaaagcaatagagctgcttcaggaattttcagatcagcatccagaaaatgcagctgaaattaagctgaccatggcacagttgaaaatttctcaaggtaatatttctaaagcatgtctaatattgagaagcatagaggagttaaagcataaaccaggcatggtatctgcattagttaccatgtatagccatgaagaagatattgatagtgccattgaggtcttcacacaagctatccagtggtatcaaaaccatcagccaaaatctcctgctcatttgtccttgataagagaagctgcaaacttcaaactcaaatatgggcggaagaaggaggcaattagtgacctacaacagctgtggaaacaaaatccaaaagatattcacaccctggcacagcttatttctgcttactcacttgtagatccagagaaagccaaagctcttagtaaacacttgccatcgtcagatagtatgtctctaaaagtagatgttgaggctcttgaaaattctgctggtgctacatacattcggaagaagggtggaaaagttactggagatagtcaaccaaaggaaca

SEQ ID NO: 181544 - DNA, 745 bp, Homo sapiens
  Payload ID: 15757
  Gene Symbol: SRP72
  Gene Name: signal recognition particle 72kDa
  ENST ID: ENST00000504757
  CDS Start-End: 19-681
cccctcgtctcctccaagatggcgagcggcggcagcgggggggtgtcagtacctgcgctgtggagtgaagtgaaccggtatggccagaacggcgacttcacgcgcgctctcaagaccgtcaataagatactacagatcaacaaagatgacgtaactgccctgcattgtaaagtggtatgccttatccagaatggaagtttcaaggaagctttgaatgtcatcaatactcacaccaaagtgttagccaataactctctctcctttgaaaaggcatattgcgagtacaggctgaacagaattgagaatgccttgaagacaatagaaagtgccaaccagcagacagacaaactgaaggagctttatggacaagtgttataccgtttggaacgctatgatgaatgcttagcagtgtatagagatctcgtccgaaactcccaagatgattatgatgaggagaggaaaacaaacctttcagcagttgttgcagctcaaagcaattgggaaaaagtggttccagagaacctgggcctccaagaaggcacacatgagctgtgctacaacactgcatgtgcactgataggccaaggccagctgaaccaggccatgaaaatcctacaaaaagctgaaggttggaagtttgttaaacttatctgtaaatataacgtgcatataactttgtagagtatcttctaaaattgcatttgacttctgtgaaattattaaatggaagttattgatgcagtga

SEQ ID NO: 181545 - DNA, 1480 bp, Homo sapiens
  Payload ID: 15758
  Gene Symbol: SRP9
  Gene Name: signal recognition particle 9kDa
  Uniprot ID: P49458
  ENST ID: ENST00000304786
  CDS Start-End: 113-373
gccatcttggggctgctgggactcgcgtcggttggcgactcccggacgtaggtagtttgttgggccgggttctgaggccttgcttctctttacttttccactctaggccacgatgccgcagtaccagacctgggaggagttcagccgcgctgccgagaagctttacctcgctgaccctatgaaggcacgtgtggttctcaaatataggcattctgatgggaacttgtgtgttaaagtaacagatgatttagtttgtttggtgtataaaacagaccaagctcaagatgtaaagaagattgagaaattccacagtcaactaatgcgacttatggtagccaaggaagcccgcaatgttaccatggaaactgagtgaatggtttgaaatgaagactttgtcgtgtacttaggaagtaaatatcttttgaattagagaaagtgttgggacagaaagtactttatgtaactaagtgggctgttcagaagcttagaggtcattttttgtaattttctttttaattactttagagagctagggatgcaaatgttttcagttagaaagcctttatttacttttggaaattgaacaagaaatgcatctgtcttagaaactggagattatttgatgttaggtaaaacatgtaattgtttctctggcaaatttgtatcagtaatttgaaaatgagatattaggaaaaaccaattcttcttaaatttagttcatctttctttaaaagaacattaaatgtaaccattttgtcagatccatgtattttggagcataaaatgtatgctgttgtgaccaataaatataaaatatggtaattggaattaactccacaccatagtatgcattgttatacatactgtgtacctaattatgtatagcagtgtagtctcaattatatctgaaagtaattgtgactaacaagtatgctttgccttatttccacatttaaactacctgttaatataagggatttgtagtatcagcttgttgagcaatgactttgaatctagttttcagtgatcagaagcagcagttatttgagtgtatgaatggaatgatgatcactgtgctataatgtactgaaaccaccatattacagaaatatttactacatattttccatctgtagtttctcagaagggctatggattagtttgaactgtcaaatccttgcatacttctgtgacacccctgcccattttctgtctttaattaaccaaggtgttaggtgtgactgtcacaactgttatgttttccagtaaactagaagtacgatatttgataattatatttgtatttcaccacctaaatgtaatgttgattcctcaagaatgaaatgaaggcactacattgaaatatgttttgtataaatttgtcatgttgaacagcattttagcatggtaagttcccttagctatatgaattttggcatgtttcagagagatcagtaaataaaatattagataaaatata

SEQ ID NO: 181546 - DNA, 540 bp, Homo sapiens
  Payload ID: 15758
  Gene Symbol: SRP9
  Gene Name: signal recognition particle 9kDa
  ENST ID: ENST00000366838
  CDS Start-End: 7-207
gccacgatgccgcagtaccagacctgggaggagttcagccgcgctgccgagaagctttacctcgctgaccctatgaaggcacgtgtggttctcaaatataggcattctgatgggaacttgtgtgttaaagtaacagatgatttagttcagtggcatttaaattactgtactttaagacatggaattgctggaggcttggaaacttgagtgcaatttccctagtacgacctccaaggagaatagagcaaaacagtgtgtttggtgtataaaacagaccaagctcaagatgtaaagaagattgagaaattccacagtcaactaatgcgacttatggtagccaaggaagcccgcaatgttaccatggaaactgagtgaatggtttgaaatgaagactttgtcgtgtacttaggaagtaaatatcttttgaattagagaaagtgttgggacagaaagtactttatgtaactaagtgggctgttcagaagcttagaggtcattttttgtaattttctttttaattactttagagagctagggatg

SEQ ID NO: 181547 - DNA, 1596 bp, Homo sapiens
  Payload ID: 15758
  Gene Symbol: SRP9
  Gene Name: signal recognition particle 9kDa
  Uniprot ID: P49458
  ENST ID: ENST00000366839
  CDS Start-End: 105-353
ggggctgctgggactcgcgtcggttggcgactcccggacgtaggtagtttgttgggccgggttctgaggccttgcttctctttacttttccactctaggccacgatgccgcagtaccagacctgggaggagttcagccgcgctgccgagaagctttacctcgctgaccctatgaaggcacgtgtggttctcaaatataggcattctgatgggaacttgtgtgttaaagtaacagatgatttagttagacagtgtcttgctctattgctcaggctgcagtgcagtggcatgatcatagctcactgcatcctcgacctcctgggctcaagcggtcctcttgcttcagcctcctgaatagcagagactacagtgtttggtgtataaaacagaccaagctcaagatgtaaagaagattgagaaattccacagtcaactaatgcgacttatggtagccaaggaagcccgcaatgttaccatggaaactgagtgaatggtttgaaatgaagactttgtcgtgtacttaggaagtaaatatcttttgaattagagaaagtgttgggacagaaagtactttatgtaactaagtgggctgttcagaagcttagaggtcattttttgtaattttctttttaattactttagagagctagggatgcaaatgttttcagttagaaagcctttatttacttttggaaattgaacaagaaatgcatctgtcttagaaactggagattatttgatgttaggtaaaacatgtaattgtttctctggcaaatttgtatcagtaatttgaaaatgagatattaggaaaaaccaattcttcttaaatttagttcatctttctttaaaagaacattaaatgtaaccattttgtcagatccatgtattttggagcataaaatgtatgctgttgtgaccaataaatataaaatatggtaattggaattaactccacaccatagtatgcattgttatacatactgtgtacctaattatgtatagcagtgtagtctcaattatatctgaaagtaattgtgactaacaagtatgctttgccttatttccacatttaaactacctgttaatataagggatttgtagtatcagcttgttgagcaatgactttgaatctagttttcagtgatcagaagcagcagttatttgagtgtatgaatggaatgatgatcactgtgctataatgtactgaaaccaccatattacagaaatatttactacatattttccatctgtagtttctcagaagggctatggattagtttgaactgtcaaatccttgcatacttctgtgacacccctgcccattttctgtctttaattaaccaaggtgttaggtgtgactgtcacaactgttatgttttccagtaaactagaagtacgatatttgataattatatttgtatttcaccacctaaatgtaatgttgattcctcaagaatgaaatgaaggcactacattgaaatatgttttgtataaatttgtcatgttgaacagcattttagcatggtaagttcccttagctatatgaattttggcatgtttcagagagatcagtaaataaaatattagataaaatata

SEQ ID NO: 181548 - DNA, 377 bp, Homo sapiens
  Payload ID: 15758
  Gene Symbol: SRP9
  Gene Name: signal recognition particle 9kDa
  Uniprot ID: P49458
  ENST ID: ENST00000619790
  CDS Start-End: 129-377
ggtgcgaggaggcgccgccatcttggggctgctgggactcgcgtcggttggcgactcccggacgtaggtagtttgttgggccgggttctgaggccttgcttctctttacttttccactctaggccacgatgccgcagtaccagacctgggaggagttcagccgcgctgccgagaagctttacctcgctgaccctatgaaggcacgtgtggttctcaaatataggcattctgatgggaacttgtgtgttaaagtaacagatgatttagttagacagtgtcttgctctattgctcaggctgcagtgcagtggcatgatcatagctcactgcatcctcgacctcctgggctcaagcggtcctcttgcttcagcctcctga

SEQ ID NO: 181549 - DNA, 329 bp, Homo sapiens
  Payload ID: 15758
  Gene Symbol: SRP9
  Gene Name: signal recognition particle 9kDa
  ENST ID: ENST00000626563
  CDS Start-End: 129-329
ggtgcgaggaggcgccgccatcttggggctgctgggactcgcgtcggttggcgactcccggacgtaggtagtttgttgggccgggttctgaggccttgcttctctttacttttccactctaggccacgatgccgcagtaccagacctgggaggagttcagccgcgctgccgagaagctttacctcgctgaccctatgaaggcacgtgtggttctcaaatataggcattctgatgggaacttgtgtgttaaagtaacagatgatttagttcagtggcatttaaattactgtactttaagacatggaattgctggaggcttggaaacttga

SEQ ID NO: 181550 - DNA, 3069 bp, Homo sapiens
  Payload ID: 15759
  Gene Symbol: SRPR
  Gene Name: signal recognition particle receptor (docking protein)
  Uniprot ID: P08240
  ENST ID: ENST00000332118
  CDS Start-End: 156-2072
gatggggagggcacccggcgttctgagcggaagtacggttgagccgatttccggggccactggtgtgacgtgtcccgcgcttggcgcagcaggaagcggcggcgaacgcggcctgaattcccggcgccggccccagctcctctgccgctgccgccatgctcgacttcttcaccattttctccaagggcgggcttgtgctctggtgcttccagggcgttagcgactcatgcaccggacccgttaacgcgttgattcgttccgtgctgctgcaggaacggggaggtaacaactccttcacccatgaggcactcacactcaagtataaactggacaaccagtttgagctggtgtttgtggttggttttcagaagatcctgacactgacatatgtagacaaattgatagatgacgtgcatcggctgtttcgggacaagtaccgcacagagatccaacagcaaagtgctttaagtttattaaatggcacttttgatttccaaaatgacttcctgcggctccttcgtgaagcagaggagagcagtaagatccgtgctcccactaccatgaagaaatttgaagattctgaaaaggccaagaaacctgtgaggtccatgattgagacacggggggaaaagcccaaggaaaaagcaaagaatagcaaaaaaaagggggccaagaaggaaggttctgatggtcctttggctaccagcaaaccagtccctgcagaaaagtcaggtcttccagtgggtcctgagaacggagtagaactttccaaagaggagctgatccgcaggaagcgcgaggagttcattcagaagcatgggaggggtatggagaagtccaacaagtccacgaagtcagatgctccaaaggagaagggcaaaaaagcaccccgggtgtgggaactgggtggctgtgctaacaaagaagtgttggattacagtactcccaccaccaatggaacccctgaggctgccttgtctgaggacatcaacctgattcgagggactgggtctggggggcagcttcaggatctggactgcagcagctctgatgacgaaggggctgctcaaaactctaccaaacctagtgcgaccaagggaacactgggtggcatgtttggtatgctgaagggccttgtgggttcaaagagcttgagtcgtgaagacatggaatctgtgctggacaagatgcgtgatcatctcattgctaagaacgtggctgcagacattgccgtccagctctgtgaatctgttgccaacaagttggaagggaaggtgatggggacgttcagcacggtgacttccacagtaaagcaagccctacaggagtccctggtgcagattctgcagccacagcgtcgtgtagacatgctccgggacatcatggatgcccagcgtcgccagcgcccttatgtcgtcaccttctgcggcgttaatggagtggggaaatctactaatcttgccaagatttccttctggttgttagagaatggcttcagtgtcctcattgctgcctgtgatacatttcgtgctggggccgtggagcagctgcgtacacacacccggcgtttgagtgccctacaccctccagagaagcatggtggccgcaccatggtgcagttgtttgaaaagggctatggcaaggatgctgctggcattgccatggaagccattgcttttgcacgtaaccaaggctttgacgtggtgctggtggacacggcaggccgcatgcaagacaatgcccctctgatgactgccctggccaaactcattactgtcaatacacctgatttggtgctgtttgtaggagaagccttagtaggcaatgaagccgtggaccagctggtcaagttcaacagagccttggctgaccattctatggctcagacacctcggctcattgatggcattgttcttaccaaatttgataccattgatgacaaggtgggagctgctatttctatgacgtacatcacaagcaaacccatcgtctttgtgggcaccggccagacctactgtgacctacgcagcctcaatgccaaggctgtggtggctgccctcatgaaggcttaacgtggctcttgcccaataccaaatcgccgctttccccacaagcccttcttcctgtatcaagaatgtgctttagagtatgtgagcaacctgtcttcagtgtagtacaaaggcagagtgagggggcttgtggctccttccaaccccactccccgttcagcacagccgccatctgcaaggaaggcctaatcatgttacaatcactgcccactgaccctctcccagcgggcctcccccttcctactcaggcacccccttcactctgcctacagactcagtcttattacagctttgaccaatggttggaacccaacaccagagctttgctaataattagtgtggtcaagagccgtctgagcctaatgagtcccagctgcattaggttaagagactcttccagagccagcgccaggtcttgaatggcacctctccctaggatacacagcctgcaggtccccaggacctggatgacacccgcctcactgtggcagtgtattgcctgttaattgctgctaattctaattctgatgatgactcctactccattgtttaccccaaagcatcagctaggctggagtgatttgttacaaatgagcaaaagatgagtccttgcttccctcagaaataaaaggagctcagctgcagcgttgcattgggcttcttggcctcccaactcttcccactcccagaatccagaagtaagctctgcatgttccccttcctgggaggaaaccaattgtcagaaggatgtatgatgaccccctcccctcccatccttcacctcctaagcagtcctggcttttcctcatcactcccctctacagtgcctggtagacaagtgctacattgaagaacacaaacctcttgttaagacttgtcctgtagcttgatattacagatgtgctattagtgcaataaggtgaaggctgtctgcccagagaaataagtaatttatataagaaaataaatttcataaataaattgccttttaggtcttgga

SEQ ID NO: 181551 - DNA, 2453 bp, Homo sapiens
  Payload ID: 15759
  Gene Symbol: SRPR
  Gene Name: signal recognition particle receptor (docking protein)
  Uniprot ID: P08240
  ENST ID: ENST00000532259
  CDS Start-End: 179-2011
agtcctgcgcgcccccgggcggagatggggagggcacccggcgttctgagcggaagtacggttgagccgatttccggggccactggtgtgacgtgtcccgcgcttggcgcagcaggaagcggcggcgaacgcggcctgaattcccggcgccggccccagctcctctgccgctgccgccatgctcgacttcttcaccattttctccaagggcgggcttgtgctctggtgcttccagggcgttagcgactcatgcaccggacccgttaacgcgttgattcgttccgtgctgctgcaggttggttttcagaagatcctgacactgacatatgtagacaaattgatagatgacgtgcatcggctgtttcgggacaagtaccgcacagagatccaacagcaaagtgctttaagtttattaaatggcacttttgatttccaaaatgacttcctgcggctccttcgtgaagcagaggagagcagtaagatccgtgctcccactaccatgaagaaatttgaagattctgaaaaggccaagaaacctgtgaggtccatgattgagacacggggggaaaagcccaaggaaaaagcaaagaatagcaaaaaaaagggggccaagaaggaaggttctgatggtcctttggctaccagcaaaccagtccctgcagaaaagtcaggtcttccagtgggtcctgagaacggagtagaactttccaaagaggagctgatccgcaggaagcgcgaggagttcattcagaagcatgggaggggtatggagaagtccaacaagtccacgaagtcagatgctccaaaggagaagggcaaaaaagcaccccgggtgtgggaactgggtggctgtgctaacaaagaagtgttggattacagtactcccaccaccaatggaacccctgaggctgccttgtctgaggacatcaacctgattcgagggactgggtctggggggcagcttcaggatctggactgcagcagctctgatgacgaaggggctgctcaaaactctaccaaacctagtgcgaccaagggaacactgggtggcatgtttggtatgctgaagggccttgtgggttcaaagagcttgagtcgtgaagacatggaatctgtgctggacaagatgcgtgatcatctcattgctaagaacgtggctgcagacattgccgtccagctctgtgaatctgttgccaacaagttggaagggaaggtgatggggacgttcagcacggtgacttccacagtaaagcaagccctacaggagtccctggtgcagattctgcagccacagcgtcgtgtagacatgctccgggacatcatggatgcccagcgtcgccagcgcccttatgtcgtcaccttctgcggcgttaatggagtggggaaatctactaatcttgccaagatttccttctggttgttagagaatggcttcagtgtcctcattgctgcctgtgatacatttcgtgctggggccgtggagcagctgcgtacacacacccggcgtttgagtgccctacaccctccagagaagcatggtggccgcaccatggtgcagttgtttgaaaagggctatggcaaggatgctgctggcattgccatggaagccattgcttttgcacgtaaccaaggctttgacgtggtgctggtggacacggcaggccgcatgcaagacaatgcccctctgatgactgccctggccaaactcattactgtcaatacacctgatttggtgctgtttgtaggagaagccttagtaggcaatgaagccgtggaccagctggtcaagttcaacagagccttggctgaccattctatggctcagacacctcggctcattgatggcattgttcttaccaaatttgataccattgatgacaaggtgggagctgctatttctatgacgtacatcacaagcaaacccatcgtctttgtgggcaccggccagacctactgtgacctacgcagcctcaatgccaaggctgtggtggctgccctcatgaaggcttaacgtggctcttgcccaataccaaatcgccgctttccccacaagcccttcttcctgtatcaagaatgtgctttagagtatgtgagcaacctgtcttcagtgtagtacaaaggcagagtgagggggcttgtggctccttccaaccccactccccgttcagcacagccgccatctgcaaggaaggcctaatcatgttacaatcactgcccactgaccctctcccagcgggcctcccccttcctactcaggcacccccttcactctgcctacagactcagtcttattacagctttgaccaatggttggaacccaacaccagagctttgctaataattagtgtggtcaagagccgtctgagcctaatgagtcccagctgcattaggttaagagactcttccagagccagcgccaggtcttgaatggcacctctccctaggatacacag

SEQ ID NO: 181552 - DNA, 512 bp, Homo sapiens
  Payload ID: 15760
  Gene Symbol: SRPRB
  Gene Name: signal recognition particle receptor, B subunit
  ENST ID: ENST00000484684
  CDS Start-End: 235-512
atctcttaaaagatgtgtgtgtccctcgacaaataacctgtctgcccctatcgttctgtaggaggacggagtcccagagaactacaactcccatcaagcacttgggggatcgccgcggctgagggagagactatggcttaggaaccaccattcgcgtgaggctctgctccccgcgcctgcgcagagtgcagggccacgtcgcttttgctgtaccggggaccacgcgtctcatccatggcttccgcggactcgcgccgggtggcagatggcggcggtgccgggggcaccttccagccctacctagacaccttgcggcaggagctgcagcagacggacccaacgctgttgtcagtagtggtggcggttcttgcggtgctgctgacgctagtcttctggaagttaatccggagcagaaggagcagtcagagagctgttcttcttgttggcctttgtgattccgggaaaacgttgctctttgtcaggttgttaacaggcctttatagagacactca

SEQ ID NO: 181553 - DNA, 917 bp, Homo sapiens
  Payload ID: 15760
  Gene Symbol: SRPRB
  Gene Name: signal recognition particle receptor, B subunit
  ENST ID: ENST00000466636
  CDS Start-End: 1-482
gtctgaccttgattgaccttcccggccatgagagtttgaggcttcagttcttagagcggtttaagtcttcagccagggctattgtgtttgttgtggatagtgcagcattccagcgagaggtgaaagatgtggctgagtttctgtatcaagtcctcattgacagtatgggtctgaagaatacaccatcattcttaatagcctgcaataagcaagatattgcaatggcaaaatcagcaaagttaattcaacagcagctggagaaagaactcaacaccttacgagttacccgttctgctgcccccagcacactggacagttccagcactgcccctgctcagctggggaagaaaggcaaagagtttgaattctcacagttgcccctcaaagtggagttcctggagtgcagtgccaagggtggaagaggggacgtgggctctgctgacatccaggacttggagaaatggctggctaaaattgcctgagaggcagctctaaagcacaagacctggatgtgtgacacacagttttggaaaaagagatactgaaactggtctggccattgctcccctcagacctgggaacatgactgaatgtttaaggatgacaagaagagagcagcgatagatagcaaggaggcctctgaccaagggaaactgctgccaacagctaccaagccaactagccttggatcacacaactgcagccatggtgctcatgattctgatgtcacaccttcatgttgatgtatgtatgatcacccagcaagttaggagtgatcagaaccaatgtgtttccacttgtaaataggctgtttgctttttccatcttacactcaactttcctgatgcctgcagaacaggagctttgttgataagcttttaagattcacccccttcactcccaccatccccaaaaaa

SEQ ID NO: 181554 - DNA, 2827 bp, Homo sapiens
  Payload ID: 15760
  Gene Symbol: SRPRB
  Gene Name: signal recognition particle receptor, B subunit
  Uniprot ID: Q9Y5M8
  ENST ID: ENST00000466490
  CDS Start-End: 286-1101
gtaggccatggagccgagcagatccgggtcttcgggtggccgcaatgtcccaagtggacgacacccacctagtcccgaggacaaccgacaaagtccttaatgggcccagaaggaggacggagtcccagagaactacaactcccatcaagcacttgggggatcgccgcggctgagggagagactatggcttaggaaccaccattcgcgtgaggctctgctccccgcgcctgcgcagagtgcagggccacgtcgcttttgctgtaccggggaccacgcgtctcatccatggcttccgcggactcgcgccgggtggcagatggcggcggtgccgggggcaccttccagccctacctagacaccttgcggcaggagctgcagcagacggacccaacgctgttgtcagtagtggtggcggttcttgcggtgctgctgacgctagtcttctggaagttaatccggagcagaaggagcagtcagagagctgttcttcttgttggcctttgtgattccgggaaaacgttgctctttgtcaggttgttaacaggcctttatagagacactcagacgtccattactgacagctgtgctgtatacagagtcaacaataacaggggcaatagtctgaccttgattgaccttcccggccatgagagtttgaggcttcagttcttagagcggtttaagtcttcagccagggctattgtgtttgttgtggatagtgcagcattccagcgagaggtgaaagatgtggctgagtttctgtatcaagtcctcattgacagtatgggtctgaagaatacaccatcattcttaatagcctgcaataagcaagatattgcaatggcaaaatcagcaaagttaattcaacagcagctggagaaagaactcaacaccttacgagttacccgttctgctgcccccagcacactggacagttccagcactgcccctgctcagctggggaagaaaggcaaagagtttgaattctcacagttgcccctcaaagtggagttcctggagtgcagtgccaagggtggaagaggggacgtgggctctgctgacatccaggacttggagaaatggctggctaaaattgcctgagaggcagctctaaagcacaagacctggatgtgtgacacacagttttggaaaaaggtctgtggtagtctggagttgatgaggaaggggtacaagatgtggttagaaacatttctttgttctggaaacaaagtactgttgaaaccagcttggaattttttttttttttttttttaagttcagttctcccttatggctgcctttcaaacaagtaccttttatctgatgcctgtatcttccctttgttaaggtgtaacttgatgtagggtcaaggtttttgtgacaacaggcagactccacacagagaggatatgatgagaatatggccatcacctgaaaagttttcttatcttctgtgcttttggtccctggaaacaaatccgcctatgtatgaagctagttgatttccagttgcactatttccagttgcctctgaagttcacaggcaatacattgtctagtcctttgcgaatttctctgatttgtgggcacagttatgaagtttccccacatgtgaagacaggtacaaaatagcagagccaagcagacagtgggtctattcttcattagctcagtgacttgtccacactcgtcttagcacttacgtttcaaaagcttgtcacaaacccttggagtcattcccagataatagaactggaaatgataaatcccctaatgccaagggtctagtgtgttcttagtggttatactgggaagtgtgtggagatttaggtgctgctctgctgctctggatggctgaaggctcctgggccatcttcatgtgctgcttgaagagctcctattttgtactcctggctagaatgctgtggaacaaatacaaagtgaaaaaagttctctgtagatttctgaagtgcatattcattgatgccaagaaaaaaaaaaagttgcctttttgaagtgatgttttttgctgtcttcttaaacacaaggcttttttgaatgattagtatatttcatggtaaagaaaacagcctgtctggctcaaagcaattaaatagaatgtaatggtgagtacaaatgagtgcacatgtcaggactcaggtctaactccttgtctcctgagcctaaagattgcaacatacacaagaacacactcctattcctaccccacacactcagggacaagcccaactaaagcttacaaggagaccagggtggctctgtccaggggagaagccagttatggaacagtgcattgagagccatggtaggagaggcccacagttctctggagcatgcagcaggggcaccccacctggccttgaggatcagggggagtcaaaggataaagcatggggctgatgacgtctgagggagtgtgatcctccatgtatggcctctgcctgctgtctcacatgtcccttctggtggtcacttgggctctaggagtatacgtcacctcagaccatctggcagaaatactccaggctcctaccccaaagcacatgtcagccttgctgctggagcacgaagacaatgtaaatgaaacatgaaatggaggagttgtgagaccctgaccctgagtccttacttgaaagctgctgctggtgttctgagtgtcttttggactcttatttcttgcccttttccttattaggcaagcagtaacttaggaagtaggtaagagcaataaatgtgacatgttatgtcatcatagtaggagctcatgggaataaaagtcagtggcttgatgcttctgttagaggca

SEQ ID NO: 181555 - DNA, 9669 bp, Homo sapiens
  Payload ID: 15761
  Gene Symbol: SSR1
  Gene Name: signal sequence receptor, alpha
  Uniprot ID: P43307
  ENST ID: ENST00000244763
  CDS Start-End: 88-948
cggagcccggatgaagagtaacgccattaccgccggagccgccgagagccttagccgacggaaactggacactggaccggcagcgccatgagactcctcccccgcttgctgctgcttctcttactcgtgttccctgccactgtcttgttccgaggcggccccagaggcttgttagcagtggcacaagatcttacagaggatgaagaaacagtagaagattccataattgaggatgaagatgatgaagccgaggtagaagaagatgaacccacagatttggtagaagataaagaggaagaagatgtgtctggtgaacctgaagcttcaccgagtgcagatacaactatactgtttgtaaaaggagaagattttccagcaaataacattgtgaagttcctggtaggctttaccaacaagggtacagaagattttattgttgaatccttagatgcctcattccgttatcctcaggactaccagttttatatccagaatttcacagctcttcctctgaacactgtagtgccaccccagagacaggcaacttttgagtactctttcattcctgcagagcccatgggcggacgaccatttggtttggtcatcaatctgaactacaaagatttgaacggcaatgtattccaagatgcagtcttcaatcaaacagttacagttattgaaagagaggatgggttagatggagaaacaatctttatgtatatgttccttgctggtcttgggcttctggttattgttggccttcatcaactcctagaatctagaaagcgtaagagacccatacagaaagtagaaatgggtacatcaagtcagaatgatgttgacatgagttggattcctcaggaaacattgaatcaaatcaataaagcttcaccaagaaggttgcccaggaaacgggcacagaagagatcagtgggatctgatgagtaaatgttcctttgtgcaacaattcggtctttacttaacctgccctaatatttttcggcctgatgggaattagtgcagagaagccatgtcaccatagaaggcaactcctacttgtgtgtggactgagcaatcagagtctgtggcgataatattgctgaaaatgcactgcattcatttttctaaagtaacaaatttggtttttttttaaaccattaaaatctatgtgtgtgcgtgtgtatgtatgtgagcagttggtcttaccagaatcattgttgaactacctgaaacaagtctttagaatactaaatataatgctgttgtctcttcctttttgacattttctgattttttcccccaaaactcagttaatatttacccactatgattattgatgtcctgccttgaacagttttaaagaaaacaatttttggaatagctcaaatttcaattgatggcacaaatcagcattttgttgttgttactgtattacaattagtattctaaaggcagaagcagaagtagctgctttttagcaatagaattgtttcagtattttgctgctgtttaatgcgcatcttcagaaaacttcccagtggcttcaaggaatttggggatctctctggcaacaaattgtgaaacatgaaatttctgctgactttaatatatgaaacctaatcctacccccttttttaacaaaaagaaactagtacatttgtgaaaattgtgttgtgttgtccattgttgctctagttctgacccagaggtagctctggagtgattttagacctactcactcagttgtgtgtaggtttttttgttttgttttgagagagaatttttctctccttaatagaagcatcctttttaaagagaagttgccttggtccacacactaagcagaaaaccaagttatcaggacagagatatttcccagttactcctaatcaatgaagaaagtgagttggatatttttaaagcagttaactaattttttcttacctaatcttttgggagttttgcttgttgatataacctttttagttaacctgaaagattccaaaaattgttcttaagtgcttgagactggaaccaaaattaaattgtacttcataaaatcctcttatagagttactcttgccctagattgtaaattaagtttggcattattgtcagactggatggagggtgaagtaaaatagtatgaacaattaagaggctctccccctcttgtctttaagccatattctcctacatgtattttataagaaaatgttaagtcaaattttagtggctctttaattcctgacctcttcattctccttttcagtataacctcccctatgctcatgcccacacagacaaaaaaacaaaacgaaatacacacagaaaaaagtctttccaaactgtttaagtatttaaacatctgagccaaagcagatagaagttattgtataattgttaatcactttgcaaataggggctatcaaattacctatattggcattgctggattataaactctatatctgtaatataaagtgtttgagtttttaattgggctgttatgatcagtagttgattttgagaaagctctatgagctctaagtaactgcatggttttttgtttaatgtaatataggagacccttcacattcccaaggaatatattccaaaacatttttgtgaatatctaagtttgtgaaactactagggcatgatacagtaaggtgtaattacagaatttacgaaatgtaaatggcctctacagagttttatggaatacctggtactaacgtaggcagctgcaaaaccacactgagttacagctgtcagccctcctcattcctaaataacttgccttacatatcagccctcccacttctgaagttcaaattagtgcctcggaaatgtagaatttattatttgtcatttttttttttttagcatagattgagaacagttgaactcttaaatcctcagatgccaggggtctgctctagcatcagtaagtatttagcagaaactaactccgtaatgaatggaattcaattccacacatggtttgttcaagcacacttaataagtagcctattttttaaatgtctttttaaaatgtaaatatttggatgaagtttttctttgttttgatatattcatttgctacaccaactatgttttcagaattcatcttttgaacaacttggtttcagaatatgtaaaatgactttaaggatcttgtgtatcaaacctatccccggatgtgtgagaataatgtgttcataaagcatggatctcgctttggttgtatagcttcctcatttacttcatggtcttacatagctggtgactttcagggctaatctgccctctaaagcattgtcccaggagaggaaaaggaaatgggacctcagaagtagaagcctcagggaaggagtaaagtagaaatcagaagaaaagaagcttcacttgatagtaataaggtttttaacttcaagtaccttcagaaaatgtgattttgataagaggaaagggcaaatttagaccttaaaaaatatggaagaactactgccttaaaagtgcatttgtggcacatcagcctagaactgtatcatggctgtgctggggagaagtaaatggtggtaatgtaacattgccacctttacttaatgatgtgttattttcgaggtacagtagatcaatatagtaataggcgagcctcatatatagcattcatcttgtacaatgatatccatacccttgatatgaaggaaaattgacttggtttgtgcatttgaatactgaaataattttttaaaactcagtgacacataccatctcttgccaagactagaccctgtattttagttcctaaattagatgtttaaatttaaaaacattttcagatgtacttaagtacttccatagtacttttttttttttttttttttttgccccctgagacggagtctctgtgtcacccaggctggagtgcagtggtgcgatctcggctcactgcaacttctgcctcttgggttcaagcagttctccctgtctcagcctcctgagtagcttggattacaggcgcccgtcaccgcacctgcctaatttttgcatttttagtagagacggggtttcgtcatttggccaggctggtcttgaactcctgaccacaggtgatacgcctgccttggcctcccaaagtgtgctgggattacaggcgtgagccactgtgcccggcccactgttcactttttgaatggcatcattttatagctgtagaactaaaatcaatgtttgccccaattttcttaagtaaaactctactttgagctcttacctccaacttagtaaaaagcagcttcacacacaaacaagattcttactggtggaatgttaggtttcgttgttaagttaatctgtctataagctcatccttagaggatatttgaggaggaagaacaccttgcagctgacttgcaaacatctaaataatttatttcgggtgcttatgaatgttactaatggattttgtatgaatttttatcccttttcatttatacaaaaacctgggcttttatgttaattatatcatctgaggttctaaggttttttttttagattttgaaatttagggataatagctcttaggtttgggtaccactttgctgcagtttaagaaagggggaagggaactcatttattaaacatcaatcacgtgctgtgttctgtttgttttctagtcatcatatcacacacctttacgacagctcactgaaggaaggtgatactgttcccattttgtagatggaatagacaaaacctgaatttaagtagcttgctcaaggttccatattgaatatggaaagttcaaatcatctcagtaatgaatataccatatatacttgctgtattgtatctatgataattcagttacccacaatacccttttaaatttctgttaatgacatacctttaaatgtctccttgatgaacagaatcatggtctttaaaaacattttcatgggttgattgcattttcaagctctaaaggattgaaagataaatcttcacgttaaaggtaagagtgaagtatctgctcttgggttacagaaccagatagtactagaactaagattacagggtaaagctgcttttatcttttttctttttctttttctttttttttttgacatggggtctcactgtattgcccaggctggaatgcagtggcatgatctcagctcacggcagcctctgcctcttgggctcaagcgattctcctgcttcagctttccaagtatttgggaccacaggcgcacaccacaggcctggctaatgtttttgttttgtttttggtagagacggggtttcaccatgttgccaggctggtctcgaactcctgagctcaagtgattcacccaccttggcctcacaaagtgtcaggcttacaggcgtgagccactgcgcccggctcacagggtaaggcttctgtctggtgtgttgtattacggattttgcttaataggcacagtgaggcattaaaaagaaaattcagtatgcctgtagaaaggataatccttgtttaaagtctccaaattgcagtcaaagatgttttgactgtgcctttttttgttcccctgctgtcccttatgtagacttctgtcagtacccatggcagcctgtcatcttgttgacatctccttctggactgtgagctctgtatctggcttgtttttcatccccagcttctagttcacaattaggtagaaccctattactctttgaagaaggaacaagaaaatgtgggccagttttcatttgccattcttccatgtgagttagtatggttcgtaagtattcctggtgatacgctagtattggcaattctgtgaggttgaacaaaggggtggtatggtgtgctagcgtgggaattaggagacctctgggtcttgacagtgccctggccactaagcaaaggcagttcatccttggagtctcaatgtgcttttttgttaattgagatatgcttgaagtatcagccctaaatagtctgattctgtgacctacaaacccttacttaattcagtgttactataaatgattcttcccttaaacctactttttacttagcaaaagagaaaaaaaaaaaaaggaaacgctcatgtcaggctgcctgggtttgaaccccagatcccctcttagttggaggcaagttgtatgatgcttcagcttttggttcctgcctcctaaggttgttaggagttactgtgtgtagctgcttagaacattgcctgggtctcagtaagccgcttaagtgactgctctcattttcgctgtaaagcaccatactgtaataacatcccatgaagcatggggcggggaagagtatatggtaccttatggactttgatgtggtggggtagtaggtaaattctgaatatgtaagctacatagtattctttttgtaactaaaggataaaagttttaagatgggcatgtaatatggctagcactggattttaatgatgagccagagtaataaggctggcaaggggagtttttgttttgtaataaatctcttacacctgcacatccagttctttttaaaaacacgtttgaagaggctccatatttctcagtgaagctgttggggttcatgttatttttgaaaatcatcttgcaatttatttcagcatcagactgaaccacccaaagaaaattagtctatttctgaacagttttttcagaaaccatattggtctgatcacccaacatttatagaaataggcgcttaaggcctagaggcatttcagaaaggagaatgagaaatactgtggtcaagagtagtgttcagatggagaacatcaagcatctgctctgcccttccacacacatcctcatttcatcttcacaactgccctaggtaaccttgttatctgtaatgaaacagcctcaaggagcacagaggcactcactcctcacgtttggtctgttgccatttccggcttggttggaatagggtaggagccttttggcagggagcacattctcagtaatgcagagtgcactcacctgggttctagcttcaacacttaggatttgcttgatattttgtattctctgaggcactgcctgtatttgtttctgctatcacagtccagagtcaagcttcatttataaagactgggcagggcatggtggctcactcctgtaattccagcactttgggaggctgaggtgggtggatcactttaggtcaggagttcaagaccagcctggccaacatggtgaaaccccatctctactaaaaaatacaaaaaggccgggcacggtggctcacacctgtaatcccaacactttgggaggccaaggtgggcagaacacctgaggtcaggagttcaagaccatcctggcgaacatagtgaaacctcgcctctactaaaaatacaaaaattagccaggtgtggtggtgcatgcctgtaatcccagctacttgggaggctgaggcaggagaattgcttaaacctgggaggtggagattgtggtgagctgagatcgtgccactgcactccagcctgggagatagaacgagactccatctcaaaaaagaacaaaaacaattagccgagcgaggtggtgcacgcctgtaatcccagctactcatgaggctgaggcaggagaatcacttgaacccaggaggaggaggttgtagtgagtcaaggttgcaccactgcactccagcctgggtgacagagtgagactgtctcaaaaaataagtacataaataataagtaaaagctactaacaattaaaaaataaataaataaagacaagactgtctggaaaatggctctcctaaaaggaccagttgccatcatccacagtggaagattcaaagcagttggtccttggtacgtatgagaagcggatttcattcccttgaattctacagagcagtttattagagtgaatgcattttaaggccttgcatttgatatgtcatccagttcataatcaagttgcctttttctggctaaaacataatgattatgtatttttctcatttggtcctacaagctgctggccctttgtccctccactgtgggaatcagatctagaggaggctgagcctgcagacacagcagtggccaaaaggtcactctaagtgttttgtcttgactccttacttgaagtccacccagctagcacacatctggtttatactgaagccccctgcctagaaatactcatttcaggaaccaccagtaagcatctgtgaccacacaggctttttgactgatggcttcccggatctggtttcaagggataaccccgtctgtgtgcatctatggtcttctctctacagcgaggactttgcagtgctgcttgtggtccacacaaggggctcagagctgagtctgaactgcttcatggtcaccagctcctgtcccttccagtcttgagaggcttttttctccagatggaacctttccttcccgccgttttctcggtctctggctgtttttctcttgtgcccgtctaattggacacctcctggcttccatctctgtggttctcctgcctcacttcctgttctgttgtttttccgttttgtcaaaatatctcctatgttcttggcttccttttcgtcgccaggttttcagctttcctttagctcttcttctaatatggcttctgcccacaaaagcctgctctgtcaggatctcatggttctccacttgccagaaccttcttcagcctcagttcctcggcctcaacttgtacgtttaacccattgaccaccaccccccaaattcaccttcatttctttgaccctgctcctcactccttttctgttgaggaatctgttgactaactccaggctcactcaggctcaccgtcctgctctctgcaccagcctttccagagcgtgccagttctcatggcttcatctgttaactgttgatcacttcagtcctgatttttagacctaaatggtttccttaacgccattctaactgcctgtgactcattttcacttacagtgtttattgtaacgccaaaccaacaaatcacaggtgcttgcttctctccataaatctccccagtctaactttttgtcattcaacatgactcgtttatccaacctgaaatcgcatatagccccaagtatggtgttttgtacacaggtatttaataagtgacttccagttttggctctgctatgaataaaaagagatttcagttctcttcactttgaaatctaacaactcagagaacattgaagaaattggaatttagttgggatgaaatacttgtggtttaaaatatttctgttcatattttctaatttgttgccggaggtcttgggttttctatttgagtgcttgcaaactcaatgtgatttctgtcagcatatcttaggtttgtttgttatgaaacttatgcagtgtgaggttctatctgaaaatgttatttagctatcttctgggactatttaatgaaagtggggtcatgaatccttaaaattcttgtgcagctttgagaaacatttctgttatttgggtatcagtttgtaagtgtggtaaagccaagatggaaacgagcactttgctttcttggttgttgttactggtctaacctcctgcttgaactagtctgctgtcctgtcaaatgcatctttttatttacatgtcccttaaattaaagctgatcatgaaagta

SEQ ID NO: 181556 - DNA, 3248 bp, Homo sapiens
  Payload ID: 15761
  Gene Symbol: SSR1
  Gene Name: signal sequence receptor, alpha
  ENST ID: ENST00000397511
  CDS Start-End: 79-954
gatgaagagtaacgccattaccgccggagccgccgagagccttagccgacggaaactggacactggaccggcagcgccatgagactcctcccccgcttgctgctgcttctcttactcgtgttccctgccactgtcttgttccgaggcggccccagaggcttgttagcagtggcacaagatcttacagaggatgaagaaacagtagaagattccataattgaggatgaagatgatgaagccgaggtagaagaagatgaacccacagatttggtagaagataaagaggaagaagatgtgtctggtgaacctgaagcttcaccgagtgcagatacaactatactgtttgtaaaaggagaagattttccagcaaataacattgtgaagttcctggtaggctttaccaacaagggtacagaagattttattgttgaatccttagatgcctcattccgttatcctcaggactaccagttttatatccagaatttcacagctcttcctctgaacactgtagtgccaccccagagacaggcaacttttgagtactctttcattcctgcagagcccatgggcggacgaccatttggtttggtcatcaatctgaactacaaagatttgaacggcaatgtattccaagatgcagtcttcaatcaaacagttacagttattgaaagagaggatgggttagatggagaaacaatctttatgtatatgttccttgctggtcttgggcttctggttattgttggccttcatcaactcctagaatctagaaagcgtaagagacccatacagaaagtagaaatgggtacatcaagtcagaatgatgttgacatgagttggattcctcaggaaacattgaatcaaatcatgcagagtagaagagataaagcttcaccaagaaggttgcccaggaaacgggcacagaagagatcagtgggatctgatgagtaaatgttcctttgtgcaacaattcggtctttacttaacctgccctaatatttttcggcctgatgggaattagtgcagagaagccatgtcaccatagaaggcaactcctacttgtgtgtggactgagcaatcagagtctgtggcgataatattgctgaaaatgcactgcattcatttttctaaagtaacaaatttggtttttttttaaaccattaaaatctatgtgtgtgcgtgtgtatgtatgtgagcagttggtcttaccagaatcattgttgaactacctgaaacaagtctttagaatactaaatataatgctgttgtctcttcctttttgacattttctgattttttcccccaaaactcagttaatatttacccactatgattattgatgtcctgccttgaacagttttaaagaaaacaatttttggaatagctcaaatttcaattgatggcacaaatcagcattttgttgttgttactgtattacaattagtattctaaaggcagaagcagaagtagctgctttttagcaatagaattgtttcagtattttgctgctgtttaatgcgcatcttcagaaaacttcccagtggcttcaaggaatttggggatctctctggcaacaaattgtgaaacatgaaatttctgctgactttaatatatgaaacctaatcctacccccttttttaacaaaaagaaactagtacatttgtgaaaattgtgttgtgttgtccattgttgctctagttctgacccagaggtagctctggagtgattttagacctactcactcagttgtgtgtaggtttttttgttttgttttgagagagaatttttctctccttaatagaagcatcctttttaaagagaagttgccttggtccacacactaagcagaaaaccaagttatcaggacagagatatttcccagttactcctaatcaatgaagaaagtgagttggatatttttaaagcagttaactaattttttcttacctaatcttttgggagttttgcttgttgatataacctttttagttaacctgaaagattccaaaaattgttcttaagtgcttgagactggaaccaaaattaaattgtacttcataaaatcctcttatagagttactcttgccctagattgtaaattaagtttggcattattgtcagactggatggagggtgaagtaaaatagtatgaacaattaagaggctctccccctcttgtctttaagccatattctcctacatgtattttataagaaaatgttaagtcaaattttagtggctctttaattcctgacctcttcattctccttttcagtataacctcccctatgctcatgcccacacagacaaaaaaacaaaacgaaatacacacagaaaaaagtctttccaaactgtttaagtatttaaacatctgagccaaagcagatagaagttattgtataattgttaatcactttgcaaataggggctatcaaattacctatattggcattgctggattataaactctatatctgtaatataaagtgtttgagtttttaattgggctgttatgatcagtagttgattttgagaaagctctatgagctctaagtaactgcatggttttttgtttaatgtaatataggagacccttcacattcccaaggaatatattccaaaacatttttgtgaatatctaagtttgtgaaactactagggcatgatacagtaaggtgtaattacagaatttacgaaatgtaaatggcctctacagagttttatggaatacctggtactaacgtaggcagctgcaaaaccacactgagttacagctgtcagccctcctcattcctaaataacttgccttacatatcagccctcccacttctgaagttcaaattagtgcctcggaaatgtagaatttattatttgtcatttttttttttttagcatagattgagaacagttgaactcttaaatcctcagatgccaggggtctgctctagcatcagtaagtatttagcagaaactaactccgtaatgaatggaattcaattccacacatggtttgttcaagcacacttaataagtagcctattttttaaatgtctttttaaaatgtaaatatttggatgaagtttttctttgttttgatatattcatttgctacaccaactatgttttcagaattcatcttttgaacaacttggtttcagaatatgtaaaatgactttaaggatcttgtgtatcaaacctatccccggatgtgtgagaataatgtgttcataaagcatggatctcgc

SEQ ID NO: 181557 - DNA, 1094 bp, Homo sapiens
  Payload ID: 15761
  Gene Symbol: SSR1
  Gene Name: signal sequence receptor, alpha
  ENST ID: ENST00000462112
  CDS Start-End: 69-866
aacgccattaccgccggagccgccgagagccttagccgacggaaactggacactggaccggcagcgccatgagactcctcccccgcttgctgctgcttctcttactcgtgttccctgccactgtcttgttccgaggcggccccagaggcttgttagcagtggcacaagatcttacagaggatgaagaaacagtagaagattccataattgaggatgaagatgatgaagccgaggtagaagaagatgaacccacagatttggtagaagataaagaggaagaagatgtgtctggtgaacctgaagcttcaccgagtgcagatacaactatactgtttgtaaaaggagaagattttccagcaaataacattgtgaagttcctggtaggctttaccaacaagggtacagaagattttattgttgaatccttagatgcctcattccgttatcctcaggactaccagttttatatccagaatttcacagctcttcctctgaacactgtagtgccaccccagagacaggcaacttttgagtactctttcattcctgcagagcccatgggcggacgaccatttggtttggtcatcaatctgaactacaaagatttgaacggcaatgtattccaagatgcagtcttcaatcaaacagttacagttattgaaagagaggatgggttagatggagaaacaatctttatgtatatgttccttgctggtcttgggcttctggttattgttggccttcatcaactcctagaatctagaaagtctggctctttcatccaggatggagtgcagtggcacaatcttgcttactgcaacctccgccttcggggctcaagtcatcctcccacctcagcttcctgagtagtcgaactacaggtgcacgccaccacacccagctaatttttgtatgttttgtagagacagggtttcgccatgttgcccaggctggtctcgaactcctgggctcaagctgtcctctcatgttggtttcccaaagtgttggaattgtaggcatgagccaccacactcagcctgcgttaatactcttaattatagaaacaatccttaattaataaacaagtcctttca

SEQ ID NO: 181558 - DNA, 1118 bp, Homo sapiens
  Payload ID: 15761
  Gene Symbol: SSR1
  Gene Name: signal sequence receptor, alpha
  ENST ID: ENST00000479365
  CDS Start-End: 63-863
attaccgccggagccgccgagagccttagccgacggaaactggacactggaccggcagcgccatgagactcctcccccgcttgctgctgcttctcttactcgtgttccctgccactgtcttgttccgaggcggccccagaggcttgttagcagtggcacaagatcttacagaggatgaagaaacagtagaagattccataattgaggatgaagatgatgaagccgaggtagaagaagatgaacccacagatttggtagaagataaagaggaagaagatgtgtctggtgaacctgaagcttcaccgagtgcagatacaactatactgtttgtaaaaggagaagattttccagcaaataacattgtgaagttcctggtaggctttaccaacaagggtacagaagattttattgttgaatccttagatgcctcattccgttatcctcaggactaccagttttatatccagaatttcacagctcttcctctgaacactgtagtgccaccccagagacaggcaacttttgagtactctttcattcctgcagagcccatgggcggacgaccatttggtttggtcatcaatctgaactacaaagatttgaacggcaatgtattccaagatgcagtcttcaatcaaacagttacagttattgaaagagaggatgggttagatggagaaacaatctttatgtatatgttccttgctggtcttgggcttctggttattgttggccttcatcaactcctagaatctagaaagcgtaagagacccatacagaaagtagaaatgggtacatcaagtcagaatgatgttgacatgagttggattcctcaggaaacattgaatcaaatcagtaagtaataaagcttcaccaagaaggttgcccaggaaacgggcacagaagagatcagtgggatctgatgagtaaatgttcctttgtgcaacaattcggtctttacttaacctgccctaatatttttcggcctgatgggaattagtgcagagaagccatgtcaccatagaaggcaactcctacttgtgtgtggactgagcaatcagagtctgtggcgataatattgctgaaaatgcactgcattcatttttctaaagtaacaa

SEQ ID NO: 181559 - DNA, 1808 bp, Homo sapiens
  Payload ID: 15761
  Gene Symbol: SSR1
  Gene Name: signal sequence receptor, alpha
  ENST ID: ENST00000474597
  CDS Start-End: 88-984
cggagcccggatgaagagtaacgccattaccgccggagccgccgagagccttagccgacggaaactggacactggaccggcagcgccatgagactcctcccccgcttgctgctgcttctcttactcgtgttccctgccactgtcttgttccgaggcggccccagaggcttgttagcagtggcacaagatcttacagaggatgaagaaacagtagaagattccataattgaggatgaagatgatgaagccgaggtagaagaagatgaacccacagatttggtagaagataaagaggaagaagatgtgtctggtgaacctgaagcttcaccgagtgcagatacaactatactgtttgtaaaaggagaagattttccagcaaataacattgtgaagttcctggtaggctttaccaacaagggtacagaagattttattgttgaatccttagatgcctcattccgttatcctcaggactaccagttttatatccagaatttcacagctcttcctctgaacactgtagtgccaccccagagacaggcaacttttgagtactctttcattcctgcagagcccatgggcggacgaccatttggtttggtcatcaatctgaactacaaagatttgaacggcaatgtattccaagatgcagtcttcaatcaaacagttacagttattgaaagagaggatgggttagatggagaaacaatctttatgtatatgttccttgctggtcttgggcttctggttattgttggccttcatcaactcctagaatctagaaagcgtaagagacccatacagaaagtagaaatgggtacatcaagtcagaatgatgttgacatgagttggattcctcaggaaacattgaatcaaatcatgcagagtagaagagataaagcttcaccaagaaggttgcccaggaaacgggcacagaagagatcagtgggatctgatgaacgcaggaggagggagacgcactgatgacatcgggccgctcctgcagctcgggcgcctcgcagtctccaggtgcaaggccagcgcttccgccgtggctgcttcaggacatcccccagcacagccgttcctggagacccggccatcttttctgcatcgttttgcaatttgtgaaacttaggacagcagccgcctgttcaaccgggccctccgccggatggctctgggaagtcaccgctgggcatggctgtgtcactagggctttgtggctgatgaataacagctgtcgtgtgctgtttctgggtggagatgtcccaggaaaccagtcctactctgccagccagtaggatggggatgcaggtcccgccagcaaggactggctgaaccgtgcgacccatgcagtagggcccttgggtcagctgtccccacccactacactgatggtgaatgaggccagaagacagggggctctgcgtgaagcccaccagcccctgccacgtgatggttggaacgcgtaccttagagcttccagttccgtcttaggacattttcaaagatgagcgtcctcaggaggggcggtggagggggcatgtctggagggacctgaggcacggggagcgctcggtgcccaggccgagcagtgccacacgtgcgcacgagttatgcctgcaaacacgggttacgcctgtgagaccagtgggctccttccagccgggctgcctgaggccactgtctgtgtgttggtgcccattgtgggctccggggcgctcttcccttgtgctgacgtgagtggagttgaattgccctgaatcagattagactgaaataaactgaattgaaaggcctacaaa

SEQ ID NO: 181560 - DNA, 640 bp, Homo sapiens
  Payload ID: 15761
  Gene Symbol: SSR1
  Gene Name: signal sequence receptor, alpha
  ENST ID: ENST00000479485
  CDS Start-End: 1-312
atgggcggacgaccatttggtttggtcatcaatctgaactacaaagatttgaacggcaatgtattccaagatgcagtcttcaatcaaacagttacagttattgaaagagaggatgggttagatggagaaacaatctttatgtatatgttccttgctggtcttgggcttctggttattgttggccttcatcaactcctagaatctagaaagcgtaagagacccatacagaaagtagaaatgggtacatcaagtcagaatgatgttgacatgagttggattcctcaggaaacattgaatcaaatcagtaagtagtcttacagacttggctgggaagtttttctcttaagtggaaattaaataccttagatttagtttaaaaaaaaaactttttcagtactatttaacattcatcttttccattacttgtgtagaatctagtatagtgattaattaagaccttaaaggtttattcagtgtgtagtcttcttatgctttaatttggaaattcttccagatctgcagcttatttatgaatgtgtgaattttctgtgttcctaatccatttcctgtctcttttctttctgttgcttcagtgcagagtagaagaggtgaggcatttaatttttttaatggtttttgc

SEQ ID NO: 181561 - DNA, 1893 bp, Homo sapiens
  Payload ID: 15761
  Gene Symbol: SSR1
  Gene Name: signal sequence receptor, alpha
  ENST ID: ENST00000489567
  CDS Start-End: 55-711
cggagccgccgagagccttagccgacggaaactggacactggaccggcagcgccatgagactcctcccccgcttgctgctgcttctcttactcgtgttccctgccactgtcttgttccgaggcggccccagaggcttgttagcagtggcacaagatcttacagaggatgaagaaacagtagaagattccataattgaggatgaagatgatgaagccgaggtagaagaagatgaacccacagatttggtagaagataaagaggaagaagatgtgtctggtgaacctgaagcttcaccgagtgcagatacaactatactgtttgtaaaaggagaagagcccatgggcggacgaccatttggtttggtcatcaatctgaactacaaagatttgaacggcaatgtattccaagatgcagtcttcaatcaaacagttacagttattgaaagagaggatgggttagatggagaaacaatctttatgtatatgttccttgctggtcttgggcttctggttattgttggccttcatcaactcctagaatctagaaagcgtaagagacccatacagaaagtagaaatgggtacatcaagtcagaatgatgttgacatgagttggattcctcaggaaacattgaatcaaatcaataaagcttcaccaagaaggttgcccaggaaacgggcacagaagagatcagtgggatctgatgagtaaatgttcctttgtgcaacaattcggtctttacttaacctgccctaatatttttcggcctgatgggaattagtgcagagaagccatgtcaccatagaaggcaactcctacttgtgtgtggactgagcaatcagagtctgtggcgataatattgctgaaaatgcactgcattcatttttctaaagtaacaaatttggtttttttttaaaccattaaaatctatgtgtgtgcgtgtgtatgtatgtgagcagttggtcttaccagaatcattgttgaactacctgaaacaagtctttagaatactaaatataatgctgttgtctcttcctttttgacattttctgattttttcccccaaaactcagttaatatttacccactatgattattgatgtcctgccttgaacagttttaaagaaaacaatttttggaatagctcaaatttcaattgatggcacaaatcagcattttgttgttgttactgtattacaattagtattctaaaggcagaagcagaagtagctgctttttagcaatagaattgtttcagtattttgctgctgtttaatgcgcatcttcagaaaacttcccagtggcttcaaggaatttggggatctctctggcaacaaattgtgaaacatgaaatttctgctgactttaatatatgaaacctaatcctacccccttttttaacaaaaagaaactagtacatttgtgaaaattgtgttgtgttgtccattgttgctctagttctgacccagaggtagctctggagtgattttagacctactcactcagttgtgtgtaggtttttttgttttgttttgagagagaatttttctctccttaatagaagcatcctttttaaagagaagttgccttggtccacacactaagcagaaaaccaagttatcaggacagagatatttcccagttactcctaatcaatgaagaaagtgagttggatatttttaaagcagttaactaattttttcttacctaatcttttgggagttttgcttgttgatataacctttttagttaacctgaaagattccaaaaattgttcttaagtgcttgagactggaaccaaaattaaattgtacttcataaaatcctcttatagagttactcttgccctagattgtaaattaagtttggcattattgtcagactggatggagg

SEQ ID NO: 181562 - DNA, 1116 bp, Homo sapiens
  Payload ID: 15762
  Gene Symbol: SSR2
  Gene Name: signal sequence receptor, beta (translocon-associated protein beta)
  Uniprot ID: P43308
  ENST ID: ENST00000295702
  CDS Start-End: 73-624
tttccggtctttcggatgctgacgctctcttcctgtctttgtggctccggaaaggcgtttgggatgccaacgatgaggctgctgtcatttgtggtgttggctctatttgctgtcactcaagcagaggaaggagccaggcttttggcttccaaatcactgctgaacagatacgccgtggagggacgagacctgaccttgcagtacaacatctacaatgttggctcaagtgctgcattagacgtggaactatctgatgattccttccctccagaagactttggcattgtgtctggaatgctcaatgtcaaatgggaccggattgcccctgctagcaatgtctcccacactgtggtcctgcgccctctcaaggctggttatttcaacttcacctcggcaacaattacttacctggcccaggaggatgggcccgttgtgattggctctaccagtgcacctggacagggaggaatcctggctcagcgggagtttgacaggcgattctcccctcattttctggactgggcagcctttggggtcatgacccttccctccatcggcatccccctgctattgtggtactccagcaagaggaaatatgacactcccaaaacgaagaagaactgattggggcttccacagccctcctctcccaagaaatccaggctcctctcccaagaaatccaggtgctttccagactccaaagggtatcttaaatgcaatctcttctctcttagcccttggccactttctcctggatcctgccctgctctcagccatagtgaaggaccagccctaggagtctgcgagagcctccttggttccatcgtgaagccataaacaggaatgcctttggcaatagccttgagcctagagggccctctgatgccccactgaggtgctgttggtttattgctggcaacgtgaattctctcaggggtctaggaggggcattttggagactgcctgacaccacccctatcccctgcctccccctctcagaagagggtggaagatgaaatgaaagctatgggactcttggaggatacccagtgtctattctgggttagagaagtgcttactaaggggttttctaataaaaacaaatgccacattga

SEQ ID NO: 181563 - DNA, 476 bp, Homo sapiens
  Payload ID: 15762
  Gene Symbol: SSR2
  Gene Name: signal sequence receptor, beta (translocon-associated protein beta)
  ENST ID: ENST00000531790
  CDS Start-End: 26-298
cggaaaggcgtttgggatgccaacgatgaggctgctgtcatttgtggtgttggctctatttgctgtcactcaagcagaggaaggagccaggcttttggcttccaaatcactgctgaacagatacgccgtggagggacgagacctgaccttgcagtacaacatctacaatgttggctcaagtgctgcattagacgtggaactatctgatgattccttccctccagaagactttggcattgtgtctggaatgctcaatgtcaaatgggaccggattgccccgtatcctcttggcacttgattggctctaccagtgcacctggacagggaggaatcctggctcagcgggagtttgacaggcgattctcccctcattttctggactgggcagcctttggggtcatgacccttccctccatcggcatccccctgctattgtggtactccagcaagaggaaatatgacactcccaaaacgaa

SEQ ID NO: 181564 - DNA, 1027 bp, Homo sapiens
  Payload ID: 15762
  Gene Symbol: SSR2
  Gene Name: signal sequence receptor, beta (translocon-associated protein beta)
  ENST ID: ENST00000473699
  CDS Start-End: 60-248
ggatgctgacgctctcttcctgtctttgtggctccggaaaggcgtttgggatgccaacgatgaggctgctgtcatttgtggtgttggctctatttgctgtcactcaagcagaggaaggagccaggcttttggcttccaaatcactgctgaacagatacgccgtggagggacgagacctgaccttgcagtacaacatctacaatgttggctcaaggcatgtacatgaagaaaaattgaggcaaggatgaacttggacctattgcctcctggatacttgattattttggtgcttctgagcaatagaatccagtccttgacctggattcttcagtgcaacagaaccaagttgctatattactcatatcttttgcaattctgatttttttggagaagcagtgctgcattagacgtggaactatctgatgattccttccctccagaagactttggcattgtgtctggaatgctcaatgtcaaatgggaccggattgccccgtatcctcttggcacttggtgatgaagggtcggggggcagggagagccttgcctgcaaagcagcaggggtacttcaaataggctggatatgtgtggctgtcctcctgtcatctctctggataagatggagcaagagagattggctctaccagtgcacctggacagggaggaatcctggctcagcgggagtttgacaggcgattctcccctcattttctggactgggcagcctttggggtcatgacccttccctccatcggcatccccctgctattgtggtactccagcaagaggaaatatgacactcccaaaacgaagaagaactgattggggcttccacagccctcctctcccaagaaatccaggctcctctcccaagaaatccaggtgctttccagactccaaagggtatcttaaatgcaatctcttctctcttagcccttggccactttctcctggatcctgccctgctctcagccatagtgaaggaccagccctaggagtctgcgagagcctccttggttccatcgtg

SEQ ID NO: 181565 - DNA, 895 bp, Homo sapiens
  Payload ID: 15762
  Gene Symbol: SSR2
  Gene Name: signal sequence receptor, beta (translocon-associated protein beta)
  Uniprot ID: P43308
  ENST ID: ENST00000480567
  CDS Start-End: 164-715
cggtaagtccggaggcttagggcgtccgaacgggagaggcgagagcctcgtgtccgcgcatcaccccgtggctgggggttagctaggggagggcgggaagggcagaggacgcggtggctggaggacgtgtaaccttgcaagaggcgggaggcggggggcagagatgaggctgctgtcatttgtggtgttggctctatttgctgtcactcaagcagaggaaggagccaggcttttggcttccaaatcactgctgaacagatacgccgtggagggacgagacctgaccttgcagtacaacatctacaatgttggctcaagtgctgcattagacgtggaactatctgatgattccttccctccagaagactttggcattgtgtctggaatgctcaatgtcaaatgggaccggattgcccctgctagcaatgtctcccacactgtggtcctgcgccctctcaaggctggttatttcaacttcacctcggcaacaattacttacctggcccaggaggatgggcccgttgtgattggctctaccagtgcacctggacagggaggaatcctggctcagcgggagtttgacaggcgattctcccctcattttctggactgggcagcctttggggtcatgacccttccctccatcggcatccccctgctattgtggtactccagcaagaggaaatatgacactcccaaaacgaagaagaactgattggggcttccacagccctcctctcccaagaaatccaggctcctctcccaagaaatccaggtgctttccagactccaaagggtatcttaaatgcaatctcttctctcttagcccttggccactttctcctggatcctgccctgctctcagccatagtgaaggaccagccctaggagtctg

SEQ ID NO: 181566 - DNA, 351 bp, Homo sapiens
  Payload ID: 15762
  Gene Symbol: SSR2
  Gene Name: signal sequence receptor, beta (translocon-associated protein beta)
  ENST ID: ENST00000526212
  CDS Start-End: 8-351
gtttgggatgccaacgggtgaagatggtaggagagtctggagaacgggtctgctctggtggcttatggactactctgtggaaggggctgctgttctgatgaggctgctgtcatttgtggtgttggctctatttgctgtcactcaagcagaggaaggagccaggcttttggcttccaaatcactgctgaacagatacgccgtggagggacgagacctgaccttgcagtacaacatctacaatgttggctcaagtgctgcattagacgtggaactatctgatgattccttccctccagaagactttggcattgtgtctggaatgctcaatgtcaaatgggaccggattgcccc

SEQ ID NO: 181567 - DNA, 849 bp, Homo sapiens
  Payload ID: 15762
  Gene Symbol: SSR2
  Gene Name: signal sequence receptor, beta (translocon-associated protein beta)
  ENST ID: ENST00000529008
  CDS Start-End: 31-312
ggctccggaaaggcgtttgggatgccaacgatgaggctgctgtcatttgtggtgttggctctatttgctgtcactcaagcagaggaaggagccaggcttttggcttccaaatcactgctgaacagatacgccgtggagggacgagacctgaccttgcagtacaacatctacaatgttggctcaagtgctgcattagacgtggaactatctgatgattccttccctccagaagactttggcattgtgtctggaatgctcaatgtcaaatgggaccggattgccccctggactgggcagcctttggggtcatgacccttccctccatcggcatccccctgctattgtggtactccagcaagaggaaatatgacactcccaaaacgaagaagaactgattggggcttccacagccctcctctcccaagaaatccaggctcctctcccaagaaatccaggtgctttccagactccaaagggtatcttaaatgcaatctcttctctcttagcccttggccactttctcctggatcctgccctgctctcagccatagtgaaggaccagccctaggagtctgcgagagcctccttggttccatcgtgaagccataaacaggaatgcctttggcaatagccttgagcctagagggccctctgatgccccactgaggtgctgttggtttattgctggcaacgtgaattctctcaggggtctaggaggggcattttggagactgcctgacaccacccctatcccctgcctccccctctcagaagagggtggaagatgaaatgaaagctatgggactcttggaggatacccagtgtctattctgggttagagaagtgctt

SEQ ID NO: 181568 - DNA, 666 bp, Homo sapiens
  Payload ID: 15762
  Gene Symbol: SSR2
  Gene Name: signal sequence receptor, beta (translocon-associated protein beta)
  ENST ID: ENST00000466905
  CDS Start-End: 45-446
cttcctgtctttgtggctccggaaaggcgtttgggatgccaacgatgaggctgctgtcatttgtggtgttggctctatttgctgtcactcaagcagaggaaggagccaggcttttggcttccaaatcactgctgaacagatacgccgtggagggacgagacctgaccttgcagtacaacatctacaatgttggctcaagtgctgcattagacgtggaactatctgatgattccttccctccagaagactttggcattgtgtctggaatgctcaatgtcaaatgggaccggattgcccctgctagcaatgtctcccacactgtggtcctgcgccctctcaaggctggttatttcaacttcacctcggcaacaattacttacctggcccaggaggatgggcccgttgtgaaccaacctcaggactctttggttctacctggtagttgatgggttaatagacataaaatcaaaggctttgctgccactttggaataaagttgtttgcagtgtgctccaaactcttggcttcctctccaagacaaaggaatgtggaccagactcaacccctcctctaataatgtacatttggattggctctaccagtgcacctggacagggaggaatcctggctcagcgggagtttgacaggcgattctcccctcatttt

SEQ ID NO: 181569 - DNA, 825 bp, Homo sapiens
  Payload ID: 15762
  Gene Symbol: SSR2
  Gene Name: signal sequence receptor, beta (translocon-associated protein beta)
  ENST ID: ENST00000496742
  CDS Start-End: 47-307
ctcttcctgtctttgtggctccggaaaggcgtttgggatgccaacgatgaggctgctgtcatttgtggtgttggctctatttgctgtcactcaagcagaggaaggagccaggcttttggcttccaaatcactgctgaacagatacgccgtggagggacgagacctgaccttgcagtacaacatctacaatgttggctcaagattggctctaccagtgcacctggacagggaggaatcctggctcagcgggagtttgacaggcgattctcccctcattttctggactgggcagcctttggggtcatgacccttccctccatcggcatccccctgctattgtggtactccagcaagaggaaatatgacactcccaaaacgaagaagaactgattggggcttccacagccctcctctcccaagaaatccaggctcctctcccaagaaatccaggtgctttccagactccaaagggtatcttaaatgcaatctcttctctcttagcccttggccactttctcctggatcctgccctgctctcagccatagtgaaggaccagccctaggagtctgcgagagcctccttggttccatcgtgaagccataaacaggaatgcctttggcaatagccttgagcctagagggccctctgatgccccactgaggtgctgttggtttattgctggcaacgtgaattctctcaggggtctaggaggggcattttggagactgcctgacaccacccctatcccctgcctccccctctcagaagagggtggaagatgaaatgaaagctatgggactcttggaggatacccagtgtctatt

SEQ ID NO: 181570 - DNA, 555 bp, Homo sapiens
  Payload ID: 15762
  Gene Symbol: SSR2
  Gene Name: signal sequence receptor, beta (translocon-associated protein beta)
  ENST ID: ENST00000531917
  CDS Start-End: 115-555
ggcagaggacgcggtggctggaggacgtgtaaccttgcaagaggcgggaggcggggggcagaggtgattgacccccgcccccccgcccgtgggaccaagaaagggatgtgacagatgaggctgctgtcatttgtggtgttggctctatttgctgtcactcaagcagaggaaggagccaggcttttggcttccaaatcactgctgaacagatacgccgtggagggacgagacctgaccttgcagtacaacatctacaatgttggctcaagtgctgcattagacgtggaactatctgatgattccttccctccagaagactttggcattgtgtctggaatgctcaatgtcaaatgggaccggattgcccctgctagcaatgtctcccacactgtggtcctgcgccctctcaaggctggttatttcaacttcacctcggcaacaattacttacctggcccaggaggatgggcccgttgtgattggctctaccagtgcacctggacagggaggaatcctggctcagcgggagtttgacaggcgattctcccctcatttt

SEQ ID NO: 181571 - DNA, 639 bp, Homo sapiens
  Payload ID: 15762
  Gene Symbol: SSR2
  Gene Name: signal sequence receptor, beta (translocon-associated protein beta)
  ENST ID: ENST00000474377
  CDS Start-End: 28-429
tccggaaaggcgtttgggatgccaacgatgaggctgctgtcatttgtggtgttggctctatttgctgtcactcaagcagaggaaggagccaggcttttggcttccaaatcactgctgaacagatacgccgtggagggacgagacctgaccttgcagtacaacatctacaatgttggctcaagtgctgcattagacgtggaactatctgatgattccttccctccagaagactttggcattgtgtctggaatgctcaatgtcaaatgggaccggattgcccctgctagcaatgtctcccacactgtggtcctgcgccctctcaaggctggttatttcaacttcacctcggcaacaattacttacctggcccaggaggatgggcccgttgtgaaccaacctcaggactctttggttctacctggtagttgatgggttaatagacataaaatcaaaggctttgctgccactttggaataaagttgtttgcagtgtgctccaaactcttggcttcctctccaagacaaaggaatgtggaccagactcaacccctcctctaataatattggctctaccagtgcacctggacagggaggaatcctggctcagcgggagtttgacaggcgattctcccctcatttt

SEQ ID NO: 181572 - DNA, 1671 bp, Homo sapiens
  Payload ID: 15763
  Gene Symbol: SSR4
  Gene Name: signal sequence receptor, delta
  Uniprot ID: P51571
  ENST ID: ENST00000320857
  CDS Start-End: 1085-1606
gccacgcagtggctcagtgtgggagcatggcctagaggtcaaacctcttacccatcagggccaggtgctggctggcagctgcttcagatggtttccagcccacctaggacctaaattaacctcttcttaaataagtgtaaggaaagaagactcggacctgaatacgcaagaccgcacacggagaagagcagaagcaaaacccccgcagcctcagaaaccctagctccttcccattccaggcgcctcgaggggaaggcatctggggctctaagactgggggactatgggggatgactggcaaagtccggttctttgccaccgggataggtggcaaagcggtccacgagagaggaaaccgtggagaaatttgagtcccggaaccggattcccgaagcggtttgagaaaggcgggccgggatacgtgagtgactgcctcagaagggctccttcaaggacactaaggaggtgacagccgccgtggcccactctcccggcccgtccggagggccccccgccacccgatgcagaccccctgggggagccggtccagggccaacttcggccaatcccctcagtgacagcggaggcggccaatcaaccccggcgcgaagccctttccccgcccctggtggggcccctagccaatcggactccagactgcttcgggtgcggctaccccaccgctcccctgcgaccgctgccgcggtcccgtggctctttccctgctcacctcccagggacggcagagaagggctggcccgagcaccgccttcgcggcgctgccggcgacggtcgctaccttcagcgccatgacggaaagtgagagcctccgcacgtcccgacacgcagataccgctctcgcgagagttcgacggggtgcgaagtttcggggacaggcgcggacccggtactgcgcacgcgcgcggtcgcaccgattcacgcccccttccggcgcctagagcaccgctgccgccatgttgagggggggaccgcgaccagctgggcccctggctcagggaggggccacgtcagtgctgccagagacgtcacaatgccggcccagccgttcggcagagaagaggcgatggcggcgatggcatctctcggcgccctggcgctgctcctgctgtccagcctctcccgctgctcagccgaggcctgcctggagccccagatcaccccttcctactacaccacttctgacgctgtcatttccactgagaccgtcttcattgtggagatctccctgacatgcaagaacagggtccagaacatggctctctatgctgacgtcggtggaaaacaattccctgtcactcgaggccaggatgtggggcgttatcaggtgtcctggagcctggaccacaagagcgcccacgcaggcacctatgaggttagattcttcgacgaggagtcctacagcctcctcaggaaggctcagaggaataacgaggacatttccatcatcccgcctctgtttacagtcagcgtggaccatcggggcacttggaacgggccctgggtgtccactgaggtgctggctgcggcgatcggccttgtgatctactacttggccttcagtgcgaagagccacatccaggcctgagggcggcaccccagccctgcccttgcttccttcaataaacatcacaggacctgggactgcacagg

SEQ ID NO: 181573 - DNA, 526 bp, Homo sapiens
  Payload ID: 15763
  Gene Symbol: SSR4
  Gene Name: signal sequence receptor, delta
  ENST ID: ENST00000370085
  CDS Start-End: 15-461
gcagagaagaggcgatggcggcgatggcatctctcggcgccctggcgctgctcctgctgtccagcctctcccgctgctcagccgaggcctgcctggagccccagatcaccccttcctactacaccacttctgacgctgtcatttccactgagaccgtcttcattgtggagatctccctgacatgcaagaacagggtccaggtgtcctggagcctggaccacaagagcgcccacgcaggcacctatgaggttagattcttcgacgaggagtcctacagcctcctcaggaaggctcagaggaataacgaggacatttccatcatcccgcctctgtttacagtcagcgtggaccatcggggcacttggaacgggccctgggtgtccactgaggtgctggctgcggcgatcggccttgtgatctactacttggccttcagtgcgaagagccacatccaggcctgagggcggcaccccagccctgcccttgcttccttcaataaacatcacaggacctgggactgcacagg

SEQ ID NO: 181574 - DNA, 643 bp, Homo sapiens
  Payload ID: 15763
  Gene Symbol: SSR4
  Gene Name: signal sequence receptor, delta
  Uniprot ID: P51571
  ENST ID: ENST00000370086
  CDS Start-End: 50-571
tcgtgttcatgggagctcgttttcttttcctctaggcagagaagaggcgatggcggcgatggcatctctcggcgccctggcgctgctcctgctgtccagcctctcccgctgctcagccgaggcctgcctggagccccagatcaccccttcctactacaccacttctgacgctgtcatttccactgagaccgtcttcattgtggagatctccctgacatgcaagaacagggtccagaacatggctctctatgctgacgtcggtggaaaacaattccctgtcactcgaggccaggatgtggggcgttatcaggtgtcctggagcctggaccacaagagcgcccacgcaggcacctatgaggttagattcttcgacgaggagtcctacagcctcctcaggaaggctcagaggaataacgaggacatttccatcatcccgcctctgtttacagtcagcgtggaccatcggggcacttggaacgggccctgggtgtccactgaggtgctggctgcggcgatcggccttgtgatctactacttggccttcagtgcgaagagccacatccaggcctgagggcggcaccccagccctgcccttgcttccttcaataaacatcacaggacctgggactgcacaggacctggg

SEQ ID NO: 181575 - DNA, 745 bp, Homo sapiens
  Payload ID: 15763
  Gene Symbol: SSR4
  Gene Name: signal sequence receptor, delta
  Uniprot ID: P51571
  ENST ID: ENST00000370087
  CDS Start-End: 159-680
ccccaccgctcccctgcgaccgctgccgcggtcccgtggctctttccctgctcacctcccagggacggcagagaagggctggcccgagcaccgccttcgcggcgctgccggcgacggtcgctaccttcagcgccatgacggaaagcagagaagaggcgatggcggcgatggcatctctcggcgccctggcgctgctcctgctgtccagcctctcccgctgctcagccgaggcctgcctggagccccagatcaccccttcctactacaccacttctgacgctgtcatttccactgagaccgtcttcattgtggagatctccctgacatgcaagaacagggtccagaacatggctctctatgctgacgtcggtggaaaacaattccctgtcactcgaggccaggatgtggggcgttatcaggtgtcctggagcctggaccacaagagcgcccacgcaggcacctatgaggttagattcttcgacgaggagtcctacagcctcctcaggaaggctcagaggaataacgaggacatttccatcatcccgcctctgtttacagtcagcgtggaccatcggggcacttggaacgggccctgggtgtccactgaggtgctggctgcggcgatcggccttgtgatctactacttggccttcagtgcgaagagccacatccaggcctgagggcggcaccccagccctgcccttgcttccttcaataaacatcacaggacctgggactgcacagg

SEQ ID NO: 181576 - DNA, 3716 bp, Homo sapiens
  Payload ID: 15764
  Gene Symbol: SSR3
  Gene Name: signal sequence receptor, gamma (translocon-associated protein gamma)
  Uniprot ID: Q9UNL2
  ENST ID: ENST00000265044
  CDS Start-End: 96-653
gttagcggatacggcggccgcaggggcggagtcaagggcctttgcccgccttggcggccggctctacgttccctgttctcgcctgcagctccgccatggctcctaaaggcagctccaaacagcagtctgaggaggacctgctcctgcaggatttcagccgcaatctctcggccaagtcctccgcgctcttcttcggaaacgcgttcatcgtgtctgccatccccatctggttatactggcgaatatggcatatggatcttattcagtctgctgttttgtatagtgtgatgaccctagtaagcacatatttggtagcctttgcatacaagaatgtgaaatttgttctcaagcacaaagtagcacagaagagggaggatgctgtttccaaagaagtgactcgaaaactttctgaagctgataatagaaagatgtctcggaaggagaaagatgaaagaatcttgtggaagaagaatgaagttgctgattatgaagctacaacattttccatcttctataacaacactctgttcctggtcgtggtcattgttgcttccttcttcatattgaagaacttcaaccccacagtgaactacatattgtccataagtgcttcatcaggactcatcgccctcctgtctactggctccaaatagaccatgtcagcttcaccccctggctttgtgtctatgggtggcctgtggtatatggaaaagtagcagggtggtcagggtgggagacacaagatgtttttatagtctagagcctttaaaaaacccagcagaatgtaattcagtatttgtttattggctgttttttgacagattgttgaaattaaatgaattgaaagggaaactcagagtactaggacgtttattaaaaggaaaaaaatgtcttgcaatgtgctgtaatcacaagaggagaaaataacttgtttccttgatctgtcagaggtcacagtaacctgggccgagctgttattatttattatataatagtagtaggaagttaataactggttctctgtgttccaagcacaatattacaacttcttttgaaccgtaaatatcagaatgaatcctcttcccaggggattgaacagaagcttaatgtttacaagtgtttgaatttgtgatctgaaataacacaaaattaaaaacatgatttctctaattttccaactagaggaagagaaacttgtggaaaagttctttttttttcttttttttttcttaaagaagggcagccaaggtagtaacctaaaaatagtgcccaggcatatgagagttgtcctacgaggttaaagaacacactgttccactgtatggctttggccctgagtggccagggaggtcaacttgaccctgccatgttggtttgacttactaagacacaggaatcactgttttccttgaccagggtctcacaccctggaggaatgttaagtaagagaaagaacctctttcctgaatattgacatgtaaaagaccaaagtaatttttctgaacttctgcaattctgagaactctccaaggaatttacagtgattttagtgcttgtcagcatttttccatgaggactttcatacatttgactctttagttcacaggttcccattgattgtgagcaagatatttatctctttagcccttggggatccagctgagagcaatctcttgcatttttttacccgtgtatgtacagatatcatttcttgtgtatgccatgacttgaaaaagtttgggaagctctttagcaatatcagctaaaaggatatgaaatcacaggtgatagcagttgtcattcagtaatttcctacaagcagcaccccaaaggaaatatagtcctaatctttactatccacttctaaatttaatgtgaatttcatacatgttattagttgttttctttataattttataaaaattattcatcgggagtttaacttccacttccatgctatcggatgtgttgggctccatgcaagaacttggaagaaaaacaggcaggaatgcatttgcataatgacccagatcatcattttctgcaactgagaattatatttcatcattgcttctagaagtctgcaattctttacttttctttggtgcattattatctaggtgccatcactggataatgtggagtgactagagaagtcacatatcactgtaaggtacagttagggtaacactttagaggtttattatttttaaaaaacttttcttgaactcctggccaacatggtgaaaccccgtctctactaaaaataccaaaattagccaggcgtgatggtgggcgcctgtaatctcagctacttgggaggctgaagcaggagaactgcctgaacccaggaggcagaggttgcggtgagtcgagatcgtgctactactgcctgggtggcaagggtgagactccatctcaaaaaagaaacaaaaaaacccaaaaagttttctttactgttggttaaaaaaaaaagccagaccatagtttgactggtggcatggaatttgtgtatcaaataaatgcatttgcttatttgacaaaccatcagtgtccactatttgttaccagagttgggccactatcttttaaaattgctggtgaaaacttgccactagatggcagtgcctgtatagatggggaaaaaattgccaccattcttggtataatacagtgtagcttagatgaggtggtgaaataggggtatcagccgaatattcctaatatagtttctcttgaattaataaactgaagatttgtaggaaaatgagtgagcaaaatttgtttactgttgtgaatttttcctacagcactgtttttaatcttgatgttttccaactttctgtactaatagatacatttctgtgcataagattataaagcatatactcacagttcagtagttttcgttaaggatttactgtgtgagtactttactgtgaggaattgcagaaccttttcccctctactcttgtctaaaagttctgtgtggcacacagagatgcgacctactcaatctgacttagtaaaaccatgctgtagaatttttgtcttaaaaagaccacatacccagcacccatgaaataaaagattcatctgtaattgggattcaaagtgattaaattcctttgttcatactcataaatagcactaaagtgttataacattttcatttacctatttttagttccttcattttaacttaataaaaatcttggattgatattcttttttttttttttttttttttgagacagcgtctcgctctgtcacccaggctggagtacagtggctctatcttggctcactgcgagctccgcctcccaggttcacgccattctcctgcctcagcctgccgagtagctgggactacaggcgcccgccaccacacccggctaatttttttgtatttttagtagagacggggtttcaccctgttagccaggatggtctcgatctcctgacctcgtgatccacctgcctcggcctcccaaagtgctggaattacaggcgtgagccaccgcgcccggcctagattgatattcttaagcaataaaagtttactggttgtcctatttgccatattattgaaacttggaaaggataatttgaaacaaggtttgaagttaactgaaatatggagattgaatttatactcaattcttgtgaaaagtcttgcttaataagtatgattaaactttgcttcttaaaatttg

SEQ ID NO: 181577 - DNA, 596 bp, Homo sapiens
  Payload ID: 15764
  Gene Symbol: SSR3
  Gene Name: signal sequence receptor, gamma (translocon-associated protein gamma)
  ENST ID: ENST00000463503
  CDS Start-End: 133-534
aatctctccagctcccctgagctcggggaggcacggagcctcttctttgggcacagtgttgtcgcttgggattgtcctgtgcagcactcggggaggtcacttgttaaaaggttatactggcgaatatggcatatggatcttattcagtctgctgttttgtatagtgtgatgaccctagtaagcacatatttggtagcctttgcatacaagaatgtgaaatttgttctcaagcacaaagtagcacagaagagggaggatgctgtttccaaagaagtgactcgaaaactttctgaagctgataatagaaagatgtctcggaaggagaaagatgaaagaatcttgtggaagaagaatgaagttgctgattatgaagctacaacattttccatcttctataacaacactctgttcctggtcgtggtcattgttgcttccttcttcatattgaagaacttcaaccccacagtgaactacatattgtccataagtgcttcatcaggactcatcgccctcctgtctactggctccaaatagaccatgtcagcttcaccccctggctttgtgtctatgggtggcctgtggtatatggaaaagta

SEQ ID NO: 181578 - DNA, 807 bp, Homo sapiens
  Payload ID: 15764
  Gene Symbol: SSR3
  Gene Name: signal sequence receptor, gamma (translocon-associated protein gamma)
  ENST ID: ENST00000476217
  CDS Start-End: 37-561
ggctctacgttccctgttctcgcctgcagctccgccatggctcctaaaggcagctccaaacagcagtctgaggaggacctgctcctgcaggatttcagccgcaatctctcggccaagtcctccgcgctcttcttcggaaacgcgttcatcgtgtctgccatccccatctggttatactggcgaatatggcatatggatcttattcagtctgctgttttgtatagtgtgatgaccctagtaagcacatatttggtagcctttgcatacaagaatgtgaaatttgttctcaagcacaaagtagcacagaagagggaggatgctgtttccaaagaagtgactcgaaaactttctgaagctgataatagaaagatgtctcggaaggagaaagatgaaagaatcttgtggaagaagaatgaagttgctgattatgaagctacaacattttccatcttctataacaacactctgttcctggtcgtggtcattgttgcttccttcttcatattgaagaacttcaaccccacagtgtatccttttcaaggaactacatattgtccataagtgcttcatcaggactcatcgccctcctgtctactggctccaaatagaccatgtcagcttcaccccctggctttgtgtctatgggtggcctgtggtatatggaaaagtagcagggtggtcagggtgggagacacaagatgtttttatagtctagagcctttaaaaaacccagcagaatgtaattcagtatttgtttattggctgttttttgacagattgttgaaattaaatgaattgaaagggaaa

SEQ ID NO: 181579 - DNA, 579 bp, Homo sapiens
  Payload ID: 15764
  Gene Symbol: SSR3
  Gene Name: signal sequence receptor, gamma (translocon-associated protein gamma)
  ENST ID: ENST00000496050
  CDS Start-End: 157-558
attttggaatggcctgtgtttcgcatgctagtaccctgatgaatgaaatttgaagtctgacttgtgattacgttgagccagagtttgttctcattttagaagttgaaatctcatctggactagtaataggaagggttatactggcgaatatggcatatggatcttattcagtctgctgttttgtatagtgtgatgaccctagtaagcacatatttggtagcctttgcatacaagaatgtgaaatttgttctcaagcacaaagtagcacagaagagggaggatgctgtttccaaagaagtgactcgaaaactttctgaagctgataatagaaagatgtctcggaaggagaaagatgaaagaatcttgtggaagaagaatgaagttgctgattatgaagctacaacattttccatcttctataacaacactctgttcctggtcgtggtcattgttgcttccttcttcatattgaagaacttcaaccccacagtgaactacatattgtccataagtgcttcatcaggactcatcgccctcctgtctactggctccaaatagaccatgtcagcttcaccccct

SEQ ID NO: 181580 - DNA, 1039 bp, Homo sapiens
  Payload ID: 15764
  Gene Symbol: SSR3
  Gene Name: signal sequence receptor, gamma (translocon-associated protein gamma)
  Uniprot ID: Q9UNL2
  ENST ID: ENST00000467789
  CDS Start-End: 61-657
gggcctttgcccgccttggcggccggctctacgttccctgttctcgcctgcagctccgccatggctcctaaaggcagctccaaacagcagtctgaggaggacctgctcctgcaggatttcagccgcaatctctcggccaagtcctccgcgctcttcttcggaaacgcgttcatcgtgtctgccatccccatctggttatactggcgaatatggcatatggatcttattcagtctgctgttttgtatagtgtgatgaccctagtaagcacatatttggtagcctttgcatacaagaatgtgaaatttgttctcaagcacaaagtagcacagaagagggaggatgctgtttccaaagaagtgactcgaaaactttctgaagctgataatagaaagatgtctcggaaggagaaagatgaaaggtttgactcctgtttaaagtatggccatcataaaaggggaatcttgtggaagaagaatgaagttgctgattatgaagctacaacattttccatcttctataacaacactctgttcctggtcgtggtcattgttgcttccttcttcatattgaagaacttcaaccccacagtgaactacatattgtccataagtgcttcatcaggactcatcgccctcctgtctactggctccaaatagaccatgtcagcttcaccccctggctttgtgtctatgggtggcctgtggtatatggaaaagtagcagggtggtcagggtgggagacacaagatgtttttatagtctagagcctttaaaaaacccagcagaatgtaattcagtatttgtttattggctgttttttgacagattgttgaaattaaatgaattgaaagggaaactcagagtactaggacgtttattaaaaggaaaaaaatgtcttgcaatgtgctgtaatcacaagaggagaaaataacttgtttccttgatctgtcagaggtcacagtaacctgggccgagctgttattatttattatataatagtagtaggaagttaataactggttctctgtgttccaagcac

SEQ ID NO: 181581 - DNA, 4310 bp, Homo sapiens
  Payload ID: 15765
  Gene Symbol: STAT1
  Gene Name: signal transducer and activator of transcription 1, 91kDa
  Uniprot ID: P42224
  ENST ID: ENST00000361099
  CDS Start-End: 389-2641
gctgagcgcggagccgcccggtgattggtgggggcggaagggggccgggcgccagcgctgccttttctcctgccgggtagtttcgctttcctgcgcagagtctgcggaggggctcggctgcaccggggggatcgcgcctggcagaccccagaccgagcagaggcgacccagcgcgctcgggagaggctgcaccgccgcgcccccgcctagcccttccggatcctgcgcgcagaaaagtttcatttgctgtatgccatcctcgagagctgtctaggttaacgttcgcactctgtgtatataacctcgacagtcttggcacctaacgtgctgtgcgtagctgctcctttggttgaatccccaggcccttgttggggcacaaggtggcaggatgtctcagtggtacgaacttcagcagcttgactcaaaattcctggagcaggttcaccagctttatgatgacagttttcccatggaaatcagacagtacctggcacagtggttagaaaagcaagactgggagcacgctgccaatgatgtttcatttgccaccatccgttttcatgacctcctgtcacagctggatgatcaatatagtcgcttttctttggagaataacttcttgctacagcataacataaggaaaagcaagcgtaatcttcaggataattttcaggaagacccaatccagatgtctatgatcatttacagctgtctgaaggaagaaaggaaaattctggaaaacgcccagagatttaatcaggctcagtcggggaatattcagagcacagtgatgttagacaaacagaaagagcttgacagtaaagtcagaaatgtgaaggacaaggttatgtgtatagagcatgaaatcaagagcctggaagatttacaagatgaatatgacttcaaatgcaaaaccttgcagaacagagaacacgagaccaatggtgtggcaaagagtgatcagaaacaagaacagctgttactcaagaagatgtatttaatgcttgacaataagagaaaggaagtagttcacaaaataatagagttgctgaatgtcactgaacttacccagaatgccctgattaatgatgaactagtggagtggaagcggagacagcagagcgcctgtattggggggccgcccaatgcttgcttggatcagctgcagaactggttcactatagttgcggagagtctgcagcaagttcggcagcagcttaaaaagttggaggaattggaacagaaatacacctacgaacatgaccctatcacaaaaaacaaacaagtgttatgggaccgcaccttcagtcttttccagcagctcattcagagctcgtttgtggtggaaagacagccctgcatgccaacgcaccctcagaggccgctggtcttgaagacaggggtccagttcactgtgaagttgagactgttggtgaaattgcaagagctgaattataatttgaaagtcaaagtcttatttgataaagatgtgaatgagagaaatacagtaaaaggatttaggaagttcaacattttgggcacgcacacaaaagtgatgaacatggaggagtccaccaatggcagtctggcggctgaatttcggcacctgcaattgaaagaacagaaaaatgctggcaccagaacgaatgagggtcctctcatcgttactgaagagcttcactcccttagttttgaaacccaattgtgccagcctggtttggtaattgacctcgagacgacctctctgcccgttgtggtgatctccaacgtcagccagctcccgagcggttgggcctccatcctttggtacaacatgctggtggcggaacccaggaatctgtccttcttcctgactccaccatgtgcacgatgggctcagctttcagaagtgctgagttggcagttttcttctgtcaccaaaagaggtctcaatgtggaccagctgaacatgttgggagagaagcttcttggtcctaacgccagccccgatggtctcattccgtggacgaggttttgtaaggaaaatataaatgataaaaattttcccttctggctttggattgaaagcatcctagaactcattaaaaaacacctgctccctctctggaatgatgggtgcatcatgggcttcatcagcaaggagcgagagcgtgccctgttgaaggaccagcagccggggaccttcctgctgcggttcagtgagagctcccgggaaggggccatcacattcacatgggtggagcggtcccagaacggaggcgaacctgacttccatgcggttgaaccctacacgaagaaagaactttctgctgttactttccctgacatcattcgcaattacaaagtcatggctgctgagaatattcctgagaatcccctgaagtatctgtatccaaatattgacaaagaccatgcctttggaaagtattactccaggccaaaggaagcaccagagccaatggaacttgatggccctaaaggaactggatatatcaagactgagttgatttctgtgtctgaagttcacccttctagacttcagaccacagacaacctgctccccatgtctcctgaggagtttgacgaggtgtctcggatagtgggctctgtagaattcgacagtatgatgaacacagtatagagcatgaatttttttcatcttctctggcgacagttttccttctcatctgtgattccctcctgctactctgttccttcacatcctgtgtttctagggaaatgaaagaaaggccagcaaattcgctgcaacctgttgatagcaagtgaatttttctctaactcagaaacatcagttactctgaagggcatcatgcatcttactgaaggtaaaattgaaaggcattctctgaagagtgggtttcacaagtgaaaaacatccagatacacccaaagtatcaggacgagaatgagggtcctttgggaaaggagaagttaagcaacatctagcaaatgttatgcataaagtcagtgcccaactgttataggttgttggataaatcagtggttatttagggaactgcttgacgtaggaacggtaaatttctgtgggagaattcttacatgttttctttgctttaagtgtaactggcagttttccattggtttacctgtgaaatagttcaaagccaagtttatatacaattatatcagtcctctttcaaaggtagccatcatggatctggtagggggaaaatgtgtattttattacatctttcacattggctatttaaagacaaagacaaattctgtttcttgagaagagaatattagctttactgtttgttatggcttaatgacactagctaatatcaatagaaggatgtacatttccaaattcacaagttgtgtttgatatccaaagctgaatacattctgctttcatcttggtcacatacaattatttttacagttctcccaagggagttaggctattcacaaccactcattcaaaagttgaaattaaccatagatgtagataaactcagaaatttaattcatgtttcttaaatgggctactttgtcctttttgttattagggtggtatttagtctattagccacaaaattgggaaaggagtagaaaaagcagtaactgacaacttgaataatacaccagagataatatgagaatcagatcatttcaaaactcatttcctatgtaactgcattgagaactgcatatgtttcgctgatatatgtgtttttcacatttgcgaatggttccattctctctcctgtactttttccagacacttttttgagtggatgatgtttcgtgaagtatactgtatttttacctttttccttccttatcactgacacaaaaagtagattaagagatgggtttgacaaggttcttcccttttacatactgctgtctatgtggctgtatcttgtttttccactactgctaccacaactatattatcatgcaaatgctgtattcttctttggtggagataaagatttcttgagttttgttttaaaattaaagctaaagtatctgtattgcattaaatataatatgcacacagtgctttccgtggcactgcatacaatctgaggcctcctctctcagtttttatatagatggcgagaacctaagtttcagttgattttacaattgaaatgactaaaaaacaaagaagacaacattaaaacaatattgtttctaattgctgaggtttagctgtcagttctttttgccctttgggaattcggcatggtttcattttactgcactagccaagagactttacttttaagaagtattaaaattctaaaattcta

SEQ ID NO: 181582 - DNA, 2716 bp, Homo sapiens
  Payload ID: 15765
  Gene Symbol: STAT1
  Gene Name: signal transducer and activator of transcription 1, 91kDa
  Uniprot ID: P42224
  ENST ID: ENST00000392322
  CDS Start-End: 307-2445
tcgctttcctgcgcagagtctgcggaggggctcggctgcaccggggggatcgcgcctggcagaccccagaccgagcagaggcgacccagcgcgctcgggagaggctgcaccgccgcgcccccgcctagcccttccggatcctgcgcgcagaaaagtttcatttgctgtatgccatcctcgagagctgtctaggttaacgttcgcactctgtgtatataacctcgacagtcttggcacctaacgtgctgtgcgtagctgctcctttggttgaatccccaggcccttgttggggcacaaggtggcaggatgtctcagtggtacgaacttcagcagcttgactcaaaattcctggagcaggttcaccagctttatgatgacagttttcccatggaaatcagacagtacctggcacagtggttagaaaagcaagactgggagcacgctgccaatgatgtttcatttgccaccatccgttttcatgacctcctgtcacagctggatgatcaatatagtcgcttttctttggagaataacttcttgctacagcataacataaggaaaagcaagcgtaatcttcaggataattttcaggaagacccaatccagatgtctatgatcatttacagctgtctgaaggaagaaaggaaaattctggaaaacgcccagagatttaatcaggctcagtcggggaatattcagagcacagtgatgttagacaaacagaaagagcttgacagtaaagtcagaaatgtgaaggacaaggttatgtgtatagagcatgaaatcaagagcctggaagatttacaagatgaatatgacttcaaatgcaaaaccttgcagaacagagaacacgagaccaatggtgtggcaaagagtgatcagaaacaagaacagctgttactcaagaagatgtatttaatgcttgacaataagagaaaggaagtagttcacaaaataatagagttgctgaatgtcactgaacttacccagaatgccctgattaatgatgaactagtggagtggaagcggagacagcagagcgcctgtattggggggccgcccaatgcttgcttggatcagctgcagaactggttcactatagttgcggagagtctgcagcaagttcggcagcagcttaaaaagttggaggaattggaacagaaatacacctacgaacatgaccctatcacaaaaaacaaacaagtgttatgggaccgcaccttcagtcttttccagcagctcattcagagctcgtttgtggtggaaagacagccctgcatgccaacgcaccctcagaggccgctggtcttgaagacaggggtccagttcactgtgaagttgagactgttggtgaaattgcaagagctgaattataatttgaaagtcaaagtcttatttgataaagatgtgaatgagagaaatacagtaaaaggatttaggaagttcaacattttgggcacgcacacaaaagtgatgaacatggaggagtccaccaatggcagtctggcggctgaatttcggcacctgcaattgaaagaacagaaaaatgctggcaccagaacgaatgagggtcctctcatcgttactgaagagcttcactcccttagttttgaaacccaattgtgccagcctggtttggtaattgacctcgagacgacctctctgcccgttgtggtgatctccaacgtcagccagctcccgagcggttgggcctccatcctttggtacaacatgctggtggcggaacccaggaatctgtccttcttcctgactccaccatgtgcacgatgggctcagctttcagaagtgctgagttggcagttttcttctgtcaccaaaagaggtctcaatgtggaccagctgaacatgttgggagagaagcttcttggtcctaacgccagccccgatggtctcattccgtggacgaggttttgtaaggaaaatataaatgataaaaattttcccttctggctttggattgaaagcatcctagaactcattaaaaaacacctgctccctctctggaatgatgggtgcatcatgggcttcatcagcaaggagcgagagcgtgccctgttgaaggaccagcagccggggaccttcctgctgcggttcagtgagagctcccgggaaggggccatcacattcacatgggtggagcggtcccagaacggaggcgaacctgacttccatgcggttgaaccctacacgaagaaagaactttctgctgttactttccctgacatcattcgcaattacaaagtcatggctgctgagaatattcctgagaatcccctgaagtatctgtatccaaatattgacaaagaccatgcctttggaaagtattactccaggccaaaggaagcaccagagccaatggaacttgatggccctaaaggaactggatatatcaagactgagttgatttctgtgtctgaagtgtaagtgaacacagaagagtgacatgtttacaaacctcaagccagccttgctcctggctggggcctgttgaagatgcttgtattttacttttccattgtaattgctatcgccatcacagctgaacttgttgagatccccgtgttactgcctatcagcattttactactttaaaaaaaaaaaaaaagccaaaaaccaaatttgtatttaaggtatataaattttcccaaaactgataccctttgaaaaagtataaataaaatgagcaaaagttgat

SEQ ID NO: 181583 - DNA, 2723 bp, Homo sapiens
  Payload ID: 15765
  Gene Symbol: STAT1
  Gene Name: signal transducer and activator of transcription 1, 91kDa
  ENST ID: ENST00000392323
  CDS Start-End: 413-2557
agcgctgccttttctcctgccgggtagtttcgctttcctgcgcagagtctgcggaggggctcggctgcaccggggggatcgcgcctggcagaccccagaccgagcagaggcgacccagcgcgctcgggagaggctgcaccgccgcgcccccgcctagcccttccggatcctgcgcgcagaaaagtttcatttgctgtatgccatcctcgagagctgtctaggttaacgttcgcactctgtgtatataacctcgacagtcttggcacctaacgtgctgtgcgtagctgctcctttggttgaatccccaggcccttgttggggcacaaggtggcagggatacaccagtgcacagaatcctccaccaacatccatcccttcaagtggtgaaaacagacaataatgaaaataaaatatgtggatgtctcagtggtacgaacttcagcagcttgactcaaaattcctggagcaggttcaccagctttatgatgacagttttcccatggaaatcagacagtacctggcacagtggttagaaaagcaagactgggagcacgctgccaatgatgtttcatttgccaccatccgttttcatgacctcctgtcacagctggatgatcaatatagtcgcttttctttggagaataacttcttgctacagcataacataaggaaaagcaagcgtaatcttcaggataattttcaggaagacccaatccagatgtctatgatcatttacagctgtctgaaggaagaaaggaaaattctggaaaacgcccagagatttaatcaggctcagtcggggaatattcagagcacagtgatgttagacaaacagaaagagcttgacagtaaagtcagaaatgtgaaggacaaggttatgtgtatagagcatgaaatcaagagcctggaagatttacaagatgaatatgacttcaaatgcaaaaccttgcagaacagagaacacgagaccaatggtgtggcaaagagtgatcagaaacaagaacagctgttactcaagaagatgtatttaatgcttgacaataagagaaaggaagtagttcacaaaataatagagttgctgaatgtcactgaacttacccagaatgccctgattaatgatgaactagtggagtggaagcggagacagcagagcgcctgtattggggggccgcccaatgcttgcttggatcagctgcagaactggttcactatagttgcggagagtctgcagcaagttcggcagcagcttaaaaagttggaggaattggaacagaaatacacctacgaacatgaccctatcacaaaaaacaaacaagtgttatgggaccgcaccttcagtcttttccagcagctcattcagagctcgtttgtggtggaaagacagccctgcatgccaacgcaccctcagaggccgctggtcttgaagacaggggtccagttcactgtgaagttgagactgttggtgaaattgcaagagctgaattataatttgaaagtcaaagtcttatttgataaagatgtgaatgagagaaatacagtaaaaggatttaggaagttcaacattttgggcacgcacacaaaagtgatgaacatggaggagtccaccaatggcagtctggcggctgaatttcggcacctgcaattgaaagaacagaaaaatgctggcaccagaacgaatgagggtcctctcatcgttactgaagagcttcactcccttagttttgaaacccaattgtgccagcctggtttggtaattgacctcgagacgacctctctgcccgttgtggtgatctccaacgtcagccagctcccgagcggttgggcctccatcctttggtacaacatgctggtggcggaacccaggaatctgtccttcttcctgactccaccatgtgcacgatgggctcagctttcagaagtgctgagttggcagttttcttctgtcaccaaaagaggtctcaatgtggaccagctgaacatgttgggagagaagcttcttggtcctaacgccagccccgatggtctcattccgtggacgaggttttgtaaggaaaatataaatgataaaaattttcccttctggctttggattgaaagcatcctagaactcattaaaaaacacctgctccctctctggaatgatgggtgcatcatgggcttcatcagcaaggagcgagagcgtgccctgttgaaggaccagcagccggggaccttcctgctgcggttcagtgagagctcccgggaaggggccatcacattcacatgggtggagcggtcccagaacggaggcgaacctgacttccatgcggttgaaccctacacgaagaaagaactttctgctgttactttccctgacatcattcgcaattacaaagtcatggctgctgagaatattcctgagaatcccctgaagtatctgtatccaaatattgacaaagaccatgcctttggaaagtattactccaggccaaaggaagcaccagagccaatggaacttgatggccctaaaggaactggatatatcaagactgagttgatttctgtgtctgaagtgtaagtgaacacagaagagtgacatgtttacaaacctcaagccagccttgctcctggctggggcctgttgaagatgcttgtattttacttttccattgtaattgctatcgccatcacagctgaacttgttgagatccccgtgttactgcctatcagcattttactacttt

SEQ ID NO: 181584 - DNA, 3097 bp, Homo sapiens
  Payload ID: 15765
  Gene Symbol: STAT1
  Gene Name: signal transducer and activator of transcription 1, 91kDa
  Uniprot ID: P42224
  ENST ID: ENST00000409465
  CDS Start-End: 433-2685
gtgcagttggacgccgggcgaggacgggccgtctgtgctgacccgcgaatagtgatcccagaggaagaacgcgtcctgagtattccaagtgcgagcagtgccacctgttctcggagatggcactgctcagcacgattgtccttgccagtcgtgctctggcagtgaagaggacttgtgaaatataattttcctctagaaggcactgcaccttcccatttaccgtcactttctcccgtttccacccctttccatcagtcacgttttcttcttttcgcagaaagtttcatttgctgtatgccatcctcgagagctgtctaggttaacgttcgcactctgtgtatataacctcgacagtcttggcacctaacgtgctgtgcgtagctgctcctttggttgaatccccaggcccttgttggggcacaaggtggcaggatgtctcagtggtacgaacttcagcagcttgactcaaaattcctggagcaggttcaccagctttatgatgacagttttcccatggaaatcagacagtacctggcacagtggttagaaaagcaagactgggagcacgctgccaatgatgtttcatttgccaccatccgttttcatgacctcctgtcacagctggatgatcaatatagtcgcttttctttggagaataacttcttgctacagcataacataaggaaaagcaagcgtaatcttcaggataattttcaggaagacccaatccagatgtctatgatcatttacagctgtctgaaggaagaaaggaaaattctggaaaacgcccagagatttaatcaggctcagtcggggaatattcagagcacagtgatgttagacaaacagaaagagcttgacagtaaagtcagaaatgtgaaggacaaggttatgtgtatagagcatgaaatcaagagcctggaagatttacaagatgaatatgacttcaaatgcaaaaccttgcagaacagagaacacgagaccaatggtgtggcaaagagtgatcagaaacaagaacagctgttactcaagaagatgtatttaatgcttgacaataagagaaaggaagtagttcacaaaataatagagttgctgaatgtcactgaacttacccagaatgccctgattaatgatgaactagtggagtggaagcggagacagcagagcgcctgtattggggggccgcccaatgcttgcttggatcagctgcagaactggttcactatagttgcggagagtctgcagcaagttcggcagcagcttaaaaagttggaggaattggaacagaaatacacctacgaacatgaccctatcacaaaaaacaaacaagtgttatgggaccgcaccttcagtcttttccagcagctcattcagagctcgtttgtggtggaaagacagccctgcatgccaacgcaccctcagaggccgctggtcttgaagacaggggtccagttcactgtgaagttgagactgttggtgaaattgcaagagctgaattataatttgaaagtcaaagtcttatttgataaagatgtgaatgagagaaatacagtaaaaggatttaggaagttcaacattttgggcacgcacacaaaagtgatgaacatggaggagtccaccaatggcagtctggcggctgaatttcggcacctgcaattgaaagaacagaaaaatgctggcaccagaacgaatgagggtcctctcatcgttactgaagagcttcactcccttagttttgaaacccaattgtgccagcctggtttggtaattgacctcgagacgacctctctgcccgttgtggtgatctccaacgtcagccagctcccgagcggttgggcctccatcctttggtacaacatgctggtggcggaacccaggaatctgtccttcttcctgactccaccatgtgcacgatgggctcagctttcagaagtgctgagttggcagttttcttctgtcaccaaaagaggtctcaatgtggaccagctgaacatgttgggagagaagcttcttggtcctaacgccagccccgatggtctcattccgtggacgaggttttgtaaggaaaatataaatgataaaaattttcccttctggctttggattgaaagcatcctagaactcattaaaaaacacctgctccctctctggaatgatgggtgcatcatgggcttcatcagcaaggagcgagagcgtgccctgttgaaggaccagcagccggggaccttcctgctgcggttcagtgagagctcccgggaaggggccatcacattcacatgggtggagcggtcccagaacggaggcgaacctgacttccatgcggttgaaccctacacgaagaaagaactttctgctgttactttccctgacatcattcgcaattacaaagtcatggctgctgagaatattcctgagaatcccctgaagtatctgtatccaaatattgacaaagaccatgcctttggaaagtattactccaggccaaaggaagcaccagagccaatggaacttgatggccctaaaggaactggatatatcaagactgagttgatttctgtgtctgaagttcacccttctagacttcagaccacagacaacctgctccccatgtctcctgaggagtttgacgaggtgtctcggatagtgggctctgtagaattcgacagtatgatgaacacagtatagagcatgaatttttttcatcttctctggcgacagttttccttctcatctgtgattccctcctgctactctgttccttcacatcctgtgtttctagggaaatgaaagaaaggccagcaaattcgctgcaacctgttgatagcaagtgaatttttctctaactcagaaacatcagttactctgaagggcatcatgcatcttactgaaggtaaaattgaaaggcattctctgaagagtgggtttcacaagtgaaaaacatccagatacacccaaagtatcaggacgagaatgagggtcctttgggaaaggagaagttaagcaacatctagcaaatgttatgcataaagtcagtgcccaactgttataggttgttggataaatcagtggttatttagggaactgcttgacgtaggaa

SEQ ID NO: 181585 - DNA, 663 bp, Homo sapiens
  Payload ID: 15765
  Gene Symbol: STAT1
  Gene Name: signal transducer and activator of transcription 1, 91kDa
  ENST ID: ENST00000415035
  CDS Start-End: 1-121
tagtcacccttctagacttcagaccacagacaacctgctccccatgtctcctgaggagtttgacgaggtgtctcggatagtgggctctgtagaattcgacagtatgatgaacacagtatagagcatgaatttttttcatcttctctggcgacagttttccttctcatctgtgattccctcctgctactctgttccttcacatcctgtgtttctagggaaatgaaagaaaggccagcaaattcgctgcaacctgttgatagcaagtgaatttttctctaactcagaaacatcagttactctgaagggcatcatgcatcttactgaagatccacggggtaggaaactgctcactcagcatcctccccatggaagctcaagcatgggaacagcttcgggcctggtgcagctaaggaacattggccgtggtttcaccaaaggaggtgccatctaggtaatgggagggcagtggcaggagccactggcttagactggaagtgaaaatgaaagcacctggaggctgctggagtaaggtgccatcaggcatgtaaagtttagaagcagcagagtgtgctcatagaaaaagaaaaaaaaaggaatttgctgtatgtgataacaactaacattcatgtacttgagctcatttcactaaacacagcttcagag

SEQ ID NO: 181586 - DNA, 477 bp, Homo sapiens
  Payload ID: 15765
  Gene Symbol: STAT1
  Gene Name: signal transducer and activator of transcription 1, 91kDa
  ENST ID: ENST00000423282
  CDS Start-End: 1-175
tcctgagaatcccctgaagtatctgtatccaaatattgacaaagaccatgcctttggaaagtattactccaggccaaaggaagcaccagagccaatggaacttgatggccctaaaggaactggatatatcaagactgagttgatttctgtgtctgaagtcactgtcttggggtgaatggatgtagccttcatgtaaaaacactgtgtggagcagctttatctgcattcaaacctcaagtcacccttctagacttcagaccacagacaacctgctccccatgtctcctgaggagtttgacgaggtgtctcggatagtgggctctgtagaattcgacagtatgatgaacacagtatagagcatgaatttttttcatcttctctggcgacagttttccttctcatctgtgattccctcctgctactctgttccttcacatcctgtgtttctagggaaatgaaagaaaggccagcaaattc

SEQ ID NO: 181587 - DNA, 2594 bp, Homo sapiens
  Payload ID: 15765
  Gene Symbol: STAT1
  Gene Name: signal transducer and activator of transcription 1, 91kDa
  ENST ID: ENST00000452281
  CDS Start-End: 367-948
gattggtgggggcggaagggggccgggcgccagcgctgccttttctcctgccgggtagtttcgctttcctgcgcagagtctgcggaggggctcggctgcaccggggggatcgcgcctggcagaccccagaccgagcagaggcgacccagcgcgctcgggagaggctgcaccgccgcgcccccgcctagcccttccggatcctgcgcgcagaaaagtttcatttgctgtatgccatcctcgagagctgtctaggttaacgttcgcactctgtgtatataacctcgacagtcttggcacctaacgtgctgtgcgtagctgctcctttggttgaatccccaggcccttgttggggcacaaggtggcaggatgtctcagtggtacgaacttcagcagcttgactcaaaattcctggagcaggttcaccagctttatgatgacagttttcccatggaaatcagacagtacctggcacagtggttagaaaagcaagactgggagcacgctgccaatgatgtttcatttgccaccatccgttttcatgacctcctgtcacagctggatgatcaatatagtcgcttttctttggagaataacttcttgctacagcataacataaggaaaagcaagcgtaatcttcaggataattttcaggaagacccaatccagatgtctatgatcatttacagctgtctgaaggaagaaaggaaaattctggaaaacgcccagagatttaatcaggctcagtcggggaatattcagagcacagtgatgttagacaaacagaaagagcttgacagtaaagtcagaaatgtgaaggacaaggttatgtgtatagagcatgaaatcaagagcctggaagatttacaagatgaatatgacttcaaatgcaaaaccttgcagaacagaggaagtagttcacaaaataatagagttgctgaatgtcactgaacttacccagaatgccctgattaatgatgaactagtggagtggaagcggagacagcagagcgcctgtattggggggccgcccaatgcttgcttggatcagctgcagaactggttcactatagttgcggagagtctgcagcaagttcggcagcagcttaaaaagttggaggaattggaacagaaatacacctacgaacatgaccctatcacaaaaaacaaacaagtgttatgggaccgcaccttcagtcttttccagcagctcattcagagctcgtttgtggtggaaagacagccctgcatgccaacgcaccctcagaggccgctggtcttgaagacaggggtccagttcactgtgaagttgagactgttggtgaaattgcaagagctgaattataatttgaaagtcaaagtcttatttgataaagatgtgaatgagagaaatacagtaaaaggatttaggaagttcaacattttgggcacgcacacaaaagtgatgaacatggaggagtccaccaatggcagtctggcggctgaatttcggcacctgcaattgaaagaacagaaaaatgctggcaccagaacgaatgagggtcctctcatcgttactgaagagcttcactcccttagttttgaaacccaattgtgccagcctggtttggtaattgacctcgagacgacctctctgcccgttgtggtgatctccaacgtcagccagctcccgagcggttgggcctccatcctttggtacaacatgctggtggcggaacccaggaatctgtccttcttcctgactccaccatgtgcacgatgggctcagctttcagaagtgctgagttggcagttttcttctgtcaccaaaagaggtctcaatgtggaccagctgaacatgttgggagagaagcttcttggtcctaacgccagccccgatggtctcattccgtggacgaggttttgtaaggaaaatataaatgataaaaattttcccttctggctttggattgaaagcatcctagaactcattaaaaaacacctgctccctctctggaatgatgggtgcatcatgggcttcatcagcaaggagcgagagcgtgccctgttgaaggaccagcagccggggaccttcctgctgcggttcagtgagagctcccgggaaggggccatcacattcacatgggtggagcggtcccagaacggaggcgaacctgacttccatgcggttgaaccctacacgaagaaagaactttctgctgttactttccctgacatcattcgcaattacaaagtcatggctgctgagaatattcctgagaatcccctgaagtatctgtatccaaatattgacaaagaccatgcctttggaaagtattactccaggccaaaggaagcaccagagccaatggaacttgatggccctaaaggaactggatatatcaagactgagttgatttctgtgtctgaagtgtaagtgaacacagaagagtgacatgtttacaaacctcaagccagccttgctcctggctggggcctgttgaagatgcttgtattttacttttccattgtaattgctatcgccatcacagctgaacttgttgagatccccgtgttactgcctatcagcattttactactttaaaaaaaaaaaaaaa

SEQ ID NO: 181588 - DNA, 736 bp, Homo sapiens
  Payload ID: 15765
  Gene Symbol: STAT1
  Gene Name: signal transducer and activator of transcription 1, 91kDa
  ENST ID: ENST00000424722
  CDS Start-End: 196-736
gggggccgggcgccagcgctgccttttctcctgccgggtagtttcgctttcctgcgcagagtctgcggaggggctcggctgcaccggggggatcgcgcctggcagaccccagaccgagcagaggcgacccagcgcgctcgggagaggctgcaccgccgcgcccccgcctagcccttccggatcctgcgcgcagagatgtctcagtggtacgaacttcagcagcttgactcaaaattcctggagcaggttcaccagctttatgatgacagttttcccatggaaatcagacagtacctggcacagtggttagaaaagcaagactgggagcacgctgccaatgatgtttcatttgccaccatccgttttcatgacctcctgtcacagctggatgatcaatatagtcgcttttctttggagaataacttcttgctacagcataacataaggaaaagcaagcgtaatcttcaggataattttcaggaagacccaatccagatgtctatgatcatttacagctgtctgaaggaagaaaggaaaattctggaaaacgcccagagatttaatcaggctcagtcggggaatattcagagcacagtgatgttagacaaacagaaagagcttgacagtaaagtcagaaatgtgaaggacaaggttatgtgtatagagcatgaaatcaagagcctggaagatttacaagatgaatatgacttcaaatgcaaaaccttgcagaacagag

SEQ ID NO: 181589 - DNA, 572 bp, Homo sapiens
  Payload ID: 15765
  Gene Symbol: STAT1
  Gene Name: signal transducer and activator of transcription 1, 91kDa
  ENST ID: ENST00000454414
  CDS Start-End: 123-572
aaactgcaccgcgcaaagccaggggcgtgggcgggcccgggctgctctacctgcgctcggaaagctagggctccaaagcgttcctgagcggtttttgaccgcgaatgtgatagtgctcatggatgtctcagtggtacgaacttcagcagcttgactcaaaattcctggagcaggttcaccagctttatgatgacagttttcccatggaaatcagacagtacctggcacagtggttagaaaagcaagactgggagcacgctgccaatgatgtttcatttgccaccatccgttttcatgacctcctgtcacagctggatgatcaatatagtcgcttttctttggagaataacttcttgctacagcataacataaggaaaagcaagcgtaatcttcaggataattttcaggaagacccaatccagatgtctatgatcatttacagctgtctgaaggaagaaaggaaaattctggaaaacgcccagagatttaatcaggctcagtcggggaatattcagagcacagtgatgttagacaaacagaaagagcttgacagtaaagtcagaaatgtgaag

SEQ ID NO: 181590 - DNA, 567 bp, Homo sapiens
  Payload ID: 15765
  Gene Symbol: STAT1
  Gene Name: signal transducer and activator of transcription 1, 91kDa
  ENST ID: ENST00000432058
  CDS Start-End: 359-567
gcagaccgagcctgaggacgcctatagaaactgccagaccccaacctctggttcaagggcagctacccaggctggctgagggtcacagcttaccagacaggacaagatctgagtcagtgcaagtgcaaactgtgtagatagcgaagtgaagcgggtaaaagagaccttttcaggacaaggaaagaaacggtggaagtgcaaggaaagtttcatttgctgtatgccatcctcgagagctgtctaggttaacgttcgcactctgtgtatataacctcgacagtcttggcacctaacgtgctgtgcgtagctgctcctttggttgaatccccaggcccttgttggggcacaaggtggcaggatgtctcagtggtacgaacttcagcagcttgactcaaaattcctggagcaggttcaccagctttatgatgacagttttcccatggaaatcagacagtacctggcacagtggttagaaaagcaagactgggagcacgctgccaatgatgtttcatttgccaccatccgttttcatgacctcctgtcacagctggatgatcaatatagtcg

SEQ ID NO: 181591 - DNA, 4216 bp, Homo sapiens
  Payload ID: 15765
  Gene Symbol: STAT1
  Gene Name: signal transducer and activator of transcription 1, 91kDa
  ENST ID: ENST00000540176
  CDS Start-End: 389-970
gctgagcgcggagccgcccggtgattggtgggggcggaagggggccgggcgccagcgctgccttttctcctgccgggtagtttcgctttcctgcgcagagtctgcggaggggctcggctgcaccggggggatcgcgcctggcagaccccagaccgagcagaggcgacccagcgcgctcgggagaggctgcaccgccgcgcccccgcctagcccttccggatcctgcgcgcagaaaagtttcatttgctgtatgccatcctcgagagctgtctaggttaacgttcgcactctgtgtatataacctcgacagtcttggcacctaacgtgctgtgcgtagctgctcctttggttgaatccccaggcccttgttggggcacaaggtggcaggatgtctcagtggtacgaacttcagcagcttgactcaaaattcctggagcaggttcaccagctttatgatgacagttttcccatggaaatcagacagtacctggcacagtggttagaaaagcaagactgggagcacgctgccaatgatgtttcatttgccaccatccgttttcatgacctcctgtcacagctggatgatcaatatagtcgcttttctttggagaataacttcttgctacagcataacataaggaaaagcaagcgtaatcttcaggataattttcaggaagacccaatccagatgtctatgatcatttacagctgtctgaaggaagaaaggaaaattctggaaaacgcccagagatttaatcaggctcagtcggggaatattcagagcacagtgatgttagacaaacagaaagagcttgacagtaaagtcagaaatgtgaaggacaaggttatgtgtatagagcatgaaatcaagagcctggaagatttacaagatgaatatgacttcaaatgcaaaaccttgcagaacagaggaagtagttcacaaaataatagagttgctgaatgtcactgaacttacccagaatgccctgattaatgatgaactagtggagtggaagcggagacagcagagcgcctgtattggggggccgcccaatgcttgcttggatcagctgcagaactggttcactatagttgcggagagtctgcagcaagttcggcagcagcttaaaaagttggaggaattggaacagaaatacacctacgaacatgaccctatcacaaaaaacaaacaagtgttatgggaccgcaccttcagtcttttccagcagctcattcagagctcgtttgtggtggaaagacagccctgcatgccaacgcaccctcagaggccgctggtcttgaagacaggggtccagttcactgtgaagttgagactgttggtgaaattgcaagagctgaattataatttgaaagtcaaagtcttatttgataaagatgtgaatgagagaaatacagtaaaaggatttaggaagttcaacattttgggcacgcacacaaaagtgatgaacatggaggagtccaccaatggcagtctggcggctgaatttcggcacctgcaattgaaagaacagaaaaatgctggcaccagaacgaatgagggtcctctcatcgttactgaagagcttcactcccttagttttgaaacccaattgtgccagcctggtttggtaattgacctcgagacgacctctctgcccgttgtggtgatctccaacgtcagccagctcccgagcggttgggcctccatcctttggtacaacatgctggtggcggaacccaggaatctgtccttcttcctgactccaccatgtgcacgatgggctcagctttcagaagtgctgagttggcagttttcttctgtcaccaaaagaggtctcaatgtggaccagctgaacatgttgggagagaagcttcttggtcctaacgccagccccgatggtctcattccgtggacgaggttttgtaaggaaaatataaatgataaaaattttcccttctggctttggattgaaagcatcctagaactcattaaaaaacacctgctccctctctggaatgatgggtgcatcatgggcttcatcagcaaggagcgagagcgtgccctgttgaaggaccagcagccggggaccttcctgctgcggttcagtgagagctcccgggaaggggccatcacattcacatgggtggagcggtcccagaacggaggcgaacctgacttccatgcggttgaaccctacacgaagaaagaactttctgctgttactttccctgacatcattcgcaattacaaagtcatggctgctgagaatattcctgagaatcccctgaagtatctgtatccaaatattgacaaagaccatgcctttggaaagtattactccaggccaaaggaagcaccagagccaatggaacttgatggccctaaaggaactggatatatcaagactgagttgatttctgtgtctgaagttcacccttctagacttcagaccacagacaacctgctccccatgtctcctgaggagtttgacgaggtgtctcggatagtgggctctgtagaattcgacagtatgatgaacacagtatagagcatgaatttttttcatcttctctggcgacagttttccttctcatctgtgattccctcctgctactctgttccttcacatcctgtgtttctagggaaatgaaagaaaggccagcaaattcgctgcaacctgttgatagcaagtgaatttttctctaactcagaaacatcagttactctgaagggcatcatgcatcttactgaaggtaaaattgaaaggcattctctgaagagtgggtttcacaagtgaaaaacatccagatacacccaaagtatcaggacgagaatgagggtcctttgggaaaggagaagttaagcaacatctagcaaatgttatgcataaagtcagtgcccaactgttataggttgttggataaatcagtggttatttagggaactgcttgacgtaggaacggtaaatttctgtgggagaattcttacatgttttctttgctttaagtgtaactggcagttttccattggtttacctgtgaaatagttcaaagccaagtttatatacaattatatcagtcctctttcaaaggtagccatcatggatctggtagggggaaaatgtgtattttattacatctttcacattggctatttaaagacaaagacaaattctgtttcttgagaagagaatattagctttactgtttgttatggcttaatgacactagctaatatcaatagaaggatgtacatttccaaattcacaagttgtgtttgatatccaaagctgaatacattctgctttcatcttggtcacatacaattatttttacagttctcccaagggagttaggctattcacaaccactcattcaaaagttgaaattaaccatagatgtagataaactcagaaatttaattcatgtttcttaaatgggctactttgtcctttttgttattagggtggtatttagtctattagccacaaaattgggaaaggagtagaaaaagcagtaactgacaacttgaataatacaccagagataatatgagaatcagatcatttcaaaactcatttcctatgtaactgcattgagaactgcatatgtttcgctgatatatgtgtttttcacatttgcgaatggttccattctctctcctgtactttttccagacacttttttgagtggatgatgtttcgtgaagtatactgtatttttacctttttccttccttatcactgacacaaaaagtagattaagagatgggtttgacaaggttcttcccttttacatactgctgtctatgtggctgtatcttgtttttccactactgctaccacaactatattatcatgcaaatgctgtattcttctttggtggagataaagatttcttgagttttgttttaaaattaaagctaaagtatctgtattgcattaaatataatatgcacacagtgctttccgtggcactgcatacaatctgaggcctcctctctcagtttttatatagatggcgagaacctaagtttcagttgattttacaattgaaatgactaaaaaacaaagaagacaacattaaaacaatattgtttctaattgctgaggtttagctgtcagttctttttgccctttgggaattcggcatggtttcattttactgcactagccaagagactttacttttaagaagtattaaaattctaaaattc

SEQ ID NO: 181592 - DNA, 3259 bp, Homo sapiens
  Payload ID: 15766
  Gene Symbol: STAT2
  Gene Name: signal transducer and activator of transcription 2, 113kDa
  Uniprot ID: P52630
  ENST ID: ENST00000314128
  CDS Start-End: 25-2580
actgcaaccctaatcagagcccaaatggcgcagtgggaaatgctgcagaatcttgacagcccctttcaggatcagctgcaccagctttactcgcacagcctcctgcctgtggacattcgacagtacttggctgtctggattgaagaccagaactggcaggaagctgcacttgggagtgatgattccaaggctaccatgctattcttccacttcttggatcagctgaactatgagtgtggccgttgcagccaggacccagagtccttgttgctgcagcacaatttgcggaaattctgccgggacattcagcccttttcccaggatcctacccagttggctgagatgatctttaacctccttctggaagaaaaaagaattttgatccaggctcagagggcccaattggaacaaggagagccagttctcgaaacacctgtggagagccagcaacatgagattgaatcccggatcctggatttaagggctatgatggagaagctggtaaaatccatcagccaactgaaagaccagcaggatgtcttctgcttccgatataagatccaggccaaagggaagacaccctctctggacccccatcagaccaaagagcagaagattctgcaggaaactctcaatgaactggacaaaaggagaaaggaggtgctggatgcctccaaagcactgctaggccgattaactaccctaatcgagctactgctgccaaagttggaggagtggaaggcccagcagcaaaaagcctgcatcagagctcccattgaccacgggttggaacagctggagacatggttcacagctggagcaaagctgttgtttcacctgaggcagctgctgaaggagctgaagggactgagttgcctggttagctatcaggatgaccctctgaccaaaggggtggacctacgcaacgcccaggtcacagagttgctacagcgtctgctccacagagcctttgtggtagaaacccagccctgcatgccccaaactccccatcgacccctcatcctcaagactggcagcaagttcaccgtccgaacaaggctgctggtgagactccaggaaggcaatgagtcactgactgtggaagtctccattgacaggaatcctcctcaattacaaggcttccggaagttcaacattctgacttcaaaccagaaaactttgacccccgagaaggggcagagtcagggtttgatttgggactttggttacctgactctggtggagcaacgttcaggtggttcaggaaagggcagcaataaggggccactaggtgtgacagaggaactgcacatcatcagcttcacggtcaaatatacctaccagggtctgaagcaggagctgaaaacggacaccctccctgtggtgattatttccaacatgaaccagctctcaattgcctgggcttcagttctctggttcaatttgctcagcccaaaccttcagaaccagcagttcttctccaacccccccaaggccccctggagcttgctgggccctgctctcagttggcagttctcctcctatgttggccgaggcctcaactcagaccagctgagcatgctgagaaacaagctgttcgggcagaactgtaggactgaggatccattattgtcctgggctgacttcactaagcgagagagccctcctggcaagttaccattctggacatggctggacaaaattctggagttggtacatgaccacctgaaggatctctggaatgatggacgcatcatgggctttgtgagtcggagccaggagcgccggctgctgaagaagaccatgtctggcacctttctactgcgcttcagtgaatcgtcagaagggggcattacctgctcctgggtggagcaccaggatgatgacaaggtgctcatctactctgtgcaaccgtacacgaaggaggtgctgcagtcactcccgctgactgaaatcatccgccattaccagttgctcactgaggagaatatacctgaaaacccactgcgcttcctctatccccgaatcccccgggatgaagcttttgggtgctactaccaggagaaagttaatctccaggaacggaggaaatacctgaaacacaggctcattgtggtctctaatagacaggtggatgaactgcaacaaccgctggagcttaagccagagccagagctggagtcattagagctggaactagggctggtgccagagccagagctcagcctggacttagagccactgctgaaggcagggctggatctggggccagagctagagtctgtgctggagtccactctggagcctgtgatagagcccacactatgcatggtatcacaaacagtgccagagccagaccaaggacctgtatcacagccagtgccagagccagatttgccctgtgatctgagacatttgaacactgagccaatggaaatcttcagaaactgtgtaaagattgaagaaatcatgccgaatggtgacccactgttggctggccagaacaccgtggatgaggtttacgtctcccgccccagccacttctacactgatggacccttgatgccttctgacttctaggaaccacatttcctctgttcttttcatatctcttgcccttcctactcctcatagcatgatattgttctccaaggatgggaatcaggcatgtgtcccttccaagctgtgttaactgttcaaactcaggcctgtgtgactccattggggtgagaggtgaaagcataacatgggtacagaggggacaacaatgaatcagaacagatgctgagccataggtctaaataggatcctggaggctgcctgctgtgctgggaggtataggggtcctgggggcaggccagggcagttgacaggtacttggagggctcagggcagtggcttctttccagtatggaaggatttcaacattttaatagttggttaggctaaactggtgcatactggcattggcccttggtggggagcacagacacaggataggactccatttctttcttccattccttcatgtctaggataacttgctttcttctttcctttactcctggctcaagccctgaatttcttcttttcctgcaggggttgagagctttctgccttagcctaccatgtgaaactctaccctgaagaaagggatggataggaagtagacctctttttcttaccagtctcctcccctactctgcccctaagctggctgtacctgttcctcccccataaaatgatcctgccaatctaa

SEQ ID NO: 181593 - DNA, 1548 bp, Homo sapiens
  Payload ID: 15766
  Gene Symbol: STAT2
  Gene Name: signal transducer and activator of transcription 2, 113kDa
  ENST ID: ENST00000418572
  CDS Start-End: 77-1459
agctcatactagggacgggaagtcgcgaccagagccattggagggcgcggggactgcaaccctaatcagagcccaaatggcgcagtgggaaatgctgcagaatcttgacagcccctttcaggatcagctgcaccagctttactcgcacagcctcctgcctgtggacattcgacagtacttggctgtctggattgaagaccagaactggcaggaagctgcacttgggagtgatgattccaaggctaccatgctattcttccacttcttggatcagctgaactatgagtgtggccgttgcagccaggacccagagtccttgttgctgcagcacaatttgcggaaattctgccgggacattcaggatcctacccagttggctgagatgatctttaacctccttctggaagaaaaaagaattttgatccaggctcagagggcccaattggaacaaggagagccagttctcgaaacacctgtggagagccagcaacatgagattgaatcccggatcctggatttaagggctatgatggagaagctggtaaaatccatcagccaactgaaagaccagcaggatgtcttctgcttccgatataagatccaggccaaagggaagacaccctctctggacccccatcagaccaaagagcagaagattctgcaggaaactctcaatgaactggacaaaaggagaaaggaggtgctggatgcctccaaagcactgctaggccgattaactaccctaatcgagctactgctgccaaagttggaggagtggaaggcccagcagcaaaaagcctgcatcagagctcccattgaccacgggttggaacagctggagacatggttcacagctggagcaaagctgttgtttcacctgaggcagctgctgaaggagctgaagggactgagttgcctggttagctatcaggatgaccctctgaccaaaggggtggacctacgcaacgcccaggtcacagagttgctacagcgtctgctccacagagcctttgtggtagaaacccagccctgcatgccccaaactccccatcgacccctcatcctcaagactggcagcaagttcaccgtccgaacaaggctgctggtgagactccaggaaggcaatgagtcactgactgtggaagtctccattgacaggaatcctcctcaattacaaggcttccggaagttcaacattctgacttcaaaccagaaaactttgacccccgagaaggggcagagtcagggtttgatttgggactttggttacctgactctggtggagcaacgttcaggtggttcaggaaagggcagcaataaggggccactaggtgtgacagaggaactgcacatcatcagcttcacggtcaaatatacctaccagggtctgaagcaggagctgaaagtgagtgaaaatggagggcaaggagagagaaagcagctttggaagaaggcataagaaggggataaacagaagcctcttgggaaccagcagttcttctccaacccccccaaggccccctggagcttgctgggccctgctctcag

SEQ ID NO: 181594 - DNA, 3073 bp, Homo sapiens
  Payload ID: 15766
  Gene Symbol: STAT2
  Gene Name: signal transducer and activator of transcription 2, 113kDa
  Uniprot ID: P52630
  ENST ID: ENST00000557235
  CDS Start-End: 77-2620
agctcatactagggacgggaagtcgcgaccagagccattggagggcgcggggactgcaaccctaatcagagcccaaatggcgcagtgggaaatgctgcagaatcttgacagcccctttcaggatcagctgcaccagctttactcgcacagcctcctgcctgtggacattcgacagtacttggctgtctggattgaagaccagaactggcaggaagctgcacttgggagtgatgattccaaggctaccatgctattcttccacttcttggatcagctgaactatgagtgtggccgttgcagccaggacccagagtccttgttgctgcagcacaatttgcggaaattctgccgggacattcaggatcctacccagttggctgagatgatctttaacctccttctggaagaaaaaagaattttgatccaggctcagagggcccaattggaacaaggagagccagttctcgaaacacctgtggagagccagcaacatgagattgaatcccggatcctggatttaagggctatgatggagaagctggtaaaatccatcagccaactgaaagaccagcaggatgtcttctgcttccgatataagatccaggccaaagggaagacaccctctctggacccccatcagaccaaagagcagaagattctgcaggaaactctcaatgaactggacaaaaggagaaaggaggtgctggatgcctccaaagcactgctaggccgattaactaccctaatcgagctactgctgccaaagttggaggagtggaaggcccagcagcaaaaagcctgcatcagagctcccattgaccacgggttggaacagctggagacatggttcacagctggagcaaagctgttgtttcacctgaggcagctgctgaaggagctgaagggactgagttgcctggttagctatcaggatgaccctctgaccaaaggggtggacctacgcaacgcccaggtcacagagttgctacagcgtctgctccacagagcctttgtggtagaaacccagccctgcatgccccaaactccccatcgacccctcatcctcaagactggcagcaagttcaccgtccgaacaaggctgctggtgagactccaggaaggcaatgagtcactgactgtggaagtctccattgacaggaatcctcctcaattacaaggcttccggaagttcaacattctgacttcaaaccagaaaactttgacccccgagaaggggcagagtcagggtttgatttgggactttggttacctgactctggtggagcaacgttcaggtggttcaggaaagggcagcaataaggggccactaggtgtgacagaggaactgcacatcatcagcttcacggtcaaatatacctaccagggtctgaagcaggagctgaaaacggacaccctccctgtggtgattatttccaacatgaaccagctctcaattgcctgggcttcagttctctggttcaatttgctcagcccaaaccttcagaaccagcagttcttctccaacccccccaaggccccctggagcttgctgggccctgctctcagttggcagttctcctcctatgttggccgaggcctcaactcagaccagctgagcatgctgagaaacaagctgttcgggcagaactgtaggactgaggatccattattgtcctgggctgacttcactaagcgagagagccctcctggcaagttaccattctggacatggctggacaaaattctggagttggtacatgaccacctgaaggatctctggaatgatggacgcatcatgggctttgtgagtcggagccaggagcgccggctgctgaagaagaccatgtctggcacctttctactgcgcttcagtgaatcgtcagaagggggcattacctgctcctgggtggagcaccaggatgatgacaaggtgctcatctactctgtgcaaccgtacacgaaggaggtgctgcagtcactcccgctgactgaaatcatccgccattaccagttgctcactgaggagaatatacctgaaaacccactgcgcttcctctatccccgaatcccccgggatgaagcttttgggtgctactaccaggagaaagttaatctccaggaacggaggaaatacctgaaacacaggctcattgtggtctctaatagacaggtggatgaactgcaacaaccgctggagcttaagccagagccagagctggagtcattagagctggaactagggctggtgccagagccagagctcagcctggacttagagccactgctgaaggcagggctggatctggggccagagctagagtctgtgctggagtccactctggagcctgtgatagagcccacactatgcatggtatcacaaacagtgccagagccagaccaaggacctgtatcacagccagtgccagagccagatttgccctgtgatctgagacatttgaacactgagccaatggaaatcttcagaaactgtgtaaagattgaagaaatcatgccgaatggtgacccactgttggctggccagaacaccgtggatgaggtttacgtctcccgccccagccacttctacactgatggacccttgatgccttctgacttctaggaaccacatttcctctgttcttttcatatctcttgcccttcctactcctcatagcatgatattgttctccaaggatgggaatcaggcatgtgtcccttccaagctgtgttaactgttcaaactcaggcctgtgtgactccattggggtgagaggtgaaagcataacatgggtacagaggggacaacaatgaatcagaacagatgctgagccataggtctaaataggatcctggaggctgcctgctgtgctgggaggtataggggtcctgggggcaggccagggcagttgacaggtacttggagggctcagggcagtggcttctttccagtatggaaggatttcaacattttaatagttggttaggctaaactggtgcatactggcattggcccttggtggggagcacagacacaggataggactccatttctttcttccattccttcatgtct

SEQ ID NO: 181595 - DNA, 603 bp, Homo sapiens
  Payload ID: 15766
  Gene Symbol: STAT2
  Gene Name: signal transducer and activator of transcription 2, 113kDa
  ENST ID: ENST00000555646
  CDS Start-End: 58-255
aagtcgcgaccagagccattggagggcgcggggactgcaaccctaatcagagcccaaatggcgcagtgggaaatgctgcagaatcttgacagcccctttcaggatcagctgcaccagctttactcgcacagcctcctgcctgtggacattcgacagtacttggctgtctggattgaagaccagaactggaagctgcacttgggagtgatgattccaaggctaccatgctattcttccacttcttggatcagctgaactatgagtgtggccgttgcagccaggacccagagtccttgttgctgcagcacaatttgcggaaattctgccgggacattcagcccttttcccaggatcctacccagttggctgagatgatctttaacctccttctggaagaaaaaagaattttgatccaggctcagagggcccaattggaacaaggagagccagttctcgaaacacctgtggagagccagcaacatgagattgaatcccggatcctggatttaagggctatgatggagaagctggtaaaatccatcagccaactgaaagaccagcaggatgtcttctgcttccgatataagatccaggccaaaggta

SEQ ID NO: 181596 - DNA, 5047 bp, Homo sapiens
  Payload ID: 15767
  Gene Symbol: STAT3
  Gene Name: signal transducer and activator of transcription 3 (acute-phase response factor)
  Uniprot ID: P40763
  ENST ID: ENST00000264657
  CDS Start-End: 314-2626
gaattatgcatgacggcgtgcctcggccaggctggggctgggcgaggattggctgaaggggctgtaattcagcggtttccggagctgcggcggcgcagactgggagggggagccgggggttccgacgtcgcagccgagggaacaagccccaaccggatcctggacaggcaccccggcttggcgctgtctctccccctcggctcggagaggcccttcggcctgagggagcctcgccgcccgtccccggcacacgcgcagccccggcctctcggcctctgccggagaaacagttgggacccctgattttagcaggatggcccaatggaatcagctacagcagcttgacacacggtacctggagcagctccatcagctctacagtgacagcttcccaatggagctgcggcagtttctggccccttggattgagagtcaagattgggcatatgcggccagcaaagaatcacatgccactttggtgtttcataatctcctgggagagattgaccagcagtatagccgcttcctgcaagagtcgaatgttctctatcagcacaatctacgaagaatcaagcagtttcttcagagcaggtatcttgagaagccaatggagattgcccggattgtggcccggtgcctgtgggaagaatcacgccttctacagactgcagccactgcggcccagcaagggggccaggccaaccaccccacagcagccgtggtgacggagaagcagcagatgctggagcagcaccttcaggatgtccggaagagagtgcaggatctagaacagaaaatgaaagtggtagagaatctccaggatgactttgatttcaactataaaaccctcaagagtcaaggagacatgcaagatctgaatggaaacaaccagtcagtgaccaggcagaagatgcagcagctggaacagatgctcactgcgctggaccagatgcggagaagcatcgtgagtgagctggcggggcttttgtcagcgatggagtacgtgcagaaaactctcacggacgaggagctggctgactggaagaggcggcaacagattgcctgcattggaggcccgcccaacatctgcctagatcggctagaaaactggataacgtcattagcagaatctcaacttcagacccgtcaacaaattaagaaactggaggagttgcagcaaaaagtttcctacaaaggggaccccattgtacagcaccggccgatgctggaggagagaatcgtggagctgtttagaaacttaatgaaaagtgcctttgtggtggagcggcagccctgcatgcccatgcatcctgaccggcccctcgtcatcaagaccggcgtccagttcactactaaagtcaggttgctggtcaaattccctgagttgaattatcagcttaaaattaaagtgtgcattgacaaagactctggggacgttgcagctctcagaggatcccggaaatttaacattctgggcacaaacacaaaagtgatgaacatggaagaatccaacaacggcagcctctctgcagaattcaaacacttgaccctgagggagcagagatgtgggaatgggggccgagccaattgtgatgcttccctgattgtgactgaggagctgcacctgatcacctttgagaccgaggtgtatcaccaaggcctcaagattgacctagagacccactccttgccagttgtggtgatctccaacatctgtcagatgccaaatgcctgggcgtccatcctgtggtacaacatgctgaccaacaatcccaagaatgtaaacttttttaccaagcccccaattggaacctgggatcaagtggccgaggtcctgagctggcagttctcctccaccaccaagcgaggactgagcatcgagcagctgactacactggcagagaaactcttgggacctggtgtgaattattcagggtgtcagatcacatgggctaaattttgcaaagaaaacatggctggcaagggcttctccttctgggtctggctggacaatatcattgaccttgtgaaaaagtacatcctggccctttggaacgaagggtacatcatgggctttatcagtaaggagcgggagcgggccatcttgagcactaagcctccaggcaccttcctgctaagattcagtgaaagcagcaaagaaggaggcgtcactttcacttgggtggagaaggacatcagcggtaagacccagatccagtccgtggaaccatacacaaagcagcagctgaacaacatgtcatttgctgaaatcatcatgggctataagatcatggatgctaccaatatcctggtgtctccactggtctatctctatcctgacattcccaaggaggaggcattcggaaagtattgtcggccagagagccaggagcatcctgaagctgacccaggtagcgctgccccatacctgaagaccaagtttatctgtgtgacaccaacgacctgcagcaataccattgacctgccgatgtccccccgcactttagattcattgatgcagtttggaaataatggtgaaggtgctgaaccctcagcaggagggcagtttgagtccctcacctttgacatggagttgacctcggagtgcgctacctcccccatgtgaggagctgagaacggaagctgcagaaagatacgactgaggcgcctacctgcattctgccacccctcacacagccaaaccccagatcatctgaaactactaactttgtggttccagattttttttaatctcctacttctgctatctttgagcaatctgggcacttttaaaaatagagaaatgagtgaatgtgggtgatctgcttttatctaaatgcaaataaggatgtgttctctgagacccatgatcaggggatgtggcggggggtggctagagggagaaaaaggaaatgtcttgtgttgttttgttcccctgccctcctttctcagcagctttttgttattgttgttgttgttcttagacaagtgcctcctggtgcctgcggcatccttctgcctgtttctgtaagcaaatgccacaggccacctatagctacatactcctggcattgcactttttaaccttgctgacatccaaatagaagataggactatctaagccctaggtttctttttaaattaagaaataataacaattaaagggcaaaaaacactgtatcagcatagcctttctgtatttaagaaacttaagcagccgggcatggtggctcacgcctgtaatcccagcactttgggaggccgaggcggatcataaggtcaggagatcaagaccatcctggctaacacggtgaaaccccgtctctactaaaagtacaaaaaattagctgggtgtggtggtgggcgcctgtagtcccagctactcgggaggctgaggcaggagaatcgcttgaacctgagaggcggaggttgcagtgagccaaaattgcaccactgcacactgcactccatcctgggcgacagtctgagactctgtctcaaaaaaaaaaaaaaaaaaaagaaacttcagttaacagcctccttggtgctttaagcattcagcttccttcaggctggtaatttatataatccctgaaacgggcttcaggtcaaacccttaagacatctgaagctgcaacctggcctttggtgttgaaataggaaggtttaaggagaatctaagcattttagacttttttttataaatagacttattttcctttgtaatgtattggccttttagtgagtaaggctgggcagagggtgcttacaaccttgactccctttctccctggacttgatctgctgtttcagaggctaggttgtttctgtgggtgccttatcagggctgggatacttctgattctggcttccttcctgccccaccctcccgaccccagtccccctgatcctgctagaggcatgtctccttgcgtgtctaaaggtccctcatcctgtttgttttaggaatcctggtctcaggacctcatggaagaagagggggagagagttacaggttggacatgatgcacactatggggccccagcgacgtgtctggttgagctcagggaatatggttcttagccagtttcttggtgatatccagtggcacttgtaatggcgtcttcattcagttcatgcagggcaaaggcttactgataaacttgagtctgccctcgtatgagggtgtatacctggcctccctctgaggctggtgactcctccctgctggggccccacaggtgaggcagaacagctagagggcctccccgcctgcccgccttggctggctagctcgcctctcctgtgcgtatgggaacacctagcacgtgctggatgggctgcctctgactcagaggcatggccggatttggcaactcaaaaccaccttgcctcagctgatcagagtttctgtggaattctgtttgttaaatcaaattagctggtctctgaattaagggggagacgaccttctctaagatgaacagggttcgccccagtcctcctgcctggagacagttgatgtgtcatgcagagctcttacttctccagcaacactcttcagtacataataagcttaactgataaacagaatatttagaaaggtgagacttgggcttaccattgggtttaaatcatagggacctagggcgagggttcagggcttctctggagcagatattgtcaagttcatggccttaggtagcatgtatctggtcttaactctgattgtagcaaaagttctgagaggagctgagccctgttgtggcccattaaagaacagggtcctcaggccctgcccgcttcctgtccactgccccctccccatccccagcccagccgagggaatcccgtgggttgcttacctacctataaggtggtttataagctgctgtcctggccactgcattcaaattccaatgtgtacttcatagtgtaaaaatttatattattgtgaggttttttgtcttttttttttttttttttttttggtatattgctgtatctactttaacttccagaaataaacgttatataggaaccgtc

SEQ ID NO: 181597 - DNA, 2615 bp, Homo sapiens
  Payload ID: 15767
  Gene Symbol: STAT3
  Gene Name: signal transducer and activator of transcription 3 (acute-phase response factor)
  ENST ID: ENST00000389272
  CDS Start-End: 320-2338
gggaacaagccccaaccggatcctggacaggcaccccggcttggcgctgtctctccccctcggctcggagaggcccttcggcctgagggagcctcgccgcccgtccccggcacacgcgcagccccggcctctcggcctctgccggagaaacagggcatatgcggccagcaaagaatcacatgccactttggtgtttcataatctcctgggagagattgaccagcagtatagccgcttcctgcaagagtcgaatgttctctatcagcacaatctacgaagaatcaagcagtttcttcagagcaggtatcttgagaagccaatggagattgcccggattgtggcccggtgcctgtgggaagaatcacgccttctacagactgcagccactgcggcccagcaagggggccaggccaaccaccccacagcagccgtggtgacggagaagcagcagatgctggagcagcaccttcaggatgtccggaagagagtgcaggatctagaacagaaaatgaaagtggtagagaatctccaggatgactttgatttcaactataaaaccctcaagagtcaaggagacatgcaagatctgaatggaaacaaccagtcagtgaccaggcagaagatgcagcagctggaacagatgctcactgcgctggaccagatgcggagaagcatcgtgagtgagctggcggggcttttgtcagcgatggagtacgtgcagaaaactctcacggacgaggagctggctgactggaagaggcggcaacagattgcctgcattggaggcccgcccaacatctgcctagatcggctagaaaactggataacgtcattagcagaatctcaacttcagacccgtcaacaaattaagaaactggaggagttgcagcaaaaagtttcctacaaaggggaccccattgtacagcaccggccgatgctggaggagagaatcgtggagctgtttagaaacttaatgaaaagtgcctttgtggtggagcggcagccctgcatgcccatgcatcctgaccggcccctcgtcatcaagaccggcgtccagttcactactaaagtcaggttgctggtcaaattccctgagttgaattatcagcttaaaattaaagtgtgcattgacaaagactctggggacgttgcagctctcagaggatcccggaaatttaacattctgggcacaaacacaaaagtgatgaacatggaagaatccaacaacggcagcctctctgcagaattcaaacacttgaccctgagggagcagagatgtgggaatgggggccgagccaattgtgatgcttccctgattgtgactgaggagctgcacctgatcacctttgagaccgaggtgtatcaccaaggcctcaagattgacctagagacccactccttgccagttgtggtgatctccaacatctgtcagatgccaaatgcctgggcgtccatcctgtggtacaacatgctgaccaacaatcccaagaatgtaaacttttttaccaagcccccaattggaacctgggatcaagtggccgaggtcctgagctggcagttctcctccaccaccaagcgaggactgagcatcgagcagctgactacactggcagagaaactcttgggacctggtgtgaattattcagggtgtcagatcacatgggctaaattttgcaaagaaaacatggctggcaagggcttctccttctgggtctggctggacaatatcattgaccttgtgaaaaagtacatcctggccctttggaacgaagggtacatcatgggctttatcagtaaggagcgggagcgggccatcttgagcactaagcctccaggcaccttcctgctaagattcagtgaaagcagcaaagaaggaggcgtcactttcacttgggtggagaaggacatcagcggtaagacccagatccagtccgtggaaccatacacaaagcagcagctgaacaacatgtcatttgctgaaatcatcatgggctataagatcatggatgctaccaatatcctggtgtctccactggtctatctctatcctgacattcccaaggaggaggcattcggaaagtattgtcggccagagagccaggagcatcctgaagctgacccaggtagcgctgccccatacctgaagaccaagtttatctgtgtgacaccaacgacctgcagcaataccattgacctgccgatgtccccccgcactttagattcattgatgcagtttggaaataatggtgaaggtgctgaaccctcagcaggagggcagtttgagtccctcacctttgacatggagttgacctcggagtgcgctacctcccccatgtgaggagctgagaacggaagctgcagaaagatacgactgaggcgcctacctgcattctgccacccctcacacagccaaaccccagatcatctgaaactactaactttgtggttccagattttttttaatctcctacttctgctatctttgagcaatctgggcacttttaaaaatagagaaatgagtgaatgtgggtgatctgcttttatctaaatgcaaataaggatgtgttctctgagacccatgatcaggggatgtggcggggggtggctagagggag

SEQ ID NO: 181598 - DNA, 2633 bp, Homo sapiens
  Payload ID: 15767
  Gene Symbol: STAT3
  Gene Name: signal transducer and activator of transcription 3 (acute-phase response factor)
  Uniprot ID: P40763
  ENST ID: ENST00000404395
  CDS Start-End: 138-2447
ggatcctggacaggcaccccggcttggcgctgtctctccccctcggctcggagaggcccttcggcctgagggagcctcgccgcccgtccccggcacacgcgcagccccggcctctcggcctctgccggagaaacaggatggcccaatggaatcagctacagcagcttgacacacggtacctggagcagctccatcagctctacagtgacagcttcccaatggagctgcggcagtttctggccccttggattgagagtcaagattgggcatatgcggccagcaaagaatcacatgccactttggtgtttcataatctcctgggagagattgaccagcagtatagccgcttcctgcaagagtcgaatgttctctatcagcacaatctacgaagaatcaagcagtttcttcagagcaggtatcttgagaagccaatggagattgcccggattgtggcccggtgcctgtgggaagaatcacgccttctacagactgcagccactgcggcccagcaagggggccaggccaaccaccccacagcagccgtggtgacggagaagcagcagatgctggagcagcaccttcaggatgtccggaagagagtgcaggatctagaacagaaaatgaaagtggtagagaatctccaggatgactttgatttcaactataaaaccctcaagagtcaaggagacatgcaagatctgaatggaaacaaccagtcagtgaccaggcagaagatgcagcagctggaacagatgctcactgcgctggaccagatgcggagaagcatcgtgagtgagctggcggggcttttgtcagcgatggagtacgtgcagaaaactctcacggacgaggagctggctgactggaagaggcggcaacagattgcctgcattggaggcccgcccaacatctgcctagatcggctagaaaactggataacgtcattagcagaatctcaacttcagacccgtcaacaaattaagaaactggaggagttgcagcaaaaagtttcctacaaaggggaccccattgtacagcaccggccgatgctggaggagagaatcgtggagctgtttagaaacttaatgaaaagtgcctttgtggtggagcggcagccctgcatgcccatgcatcctgaccggcccctcgtcatcaagaccggcgtccagttcactactaaagtcaggttgctggtcaaattccctgagttgaattatcagcttaaaattaaagtgtgcattgacaaagactctggggacgttgcagctctcagaggatcccggaaatttaacattctgggcacaaacacaaaagtgatgaacatggaagaatccaacaacggcagcctctctgcagaattcaaacacttgaccctgagggagcagagatgtgggaatgggggccgagccaattgtgatgcttccctgattgtgactgaggagctgcacctgatcacctttgagaccgaggtgtatcaccaaggcctcaagattgacctagagacccactccttgccagttgtggtgatctccaacatctgtcagatgccaaatgcctgggcgtccatcctgtggtacaacatgctgaccaacaatcccaagaatgtaaacttttttaccaagcccccaattggaacctgggatcaagtggccgaggtcctgagctggcagttctcctccaccaccaagcgaggactgagcatcgagcagctgactacactggcagagaaactcttgggacctggtgtgaattattcagggtgtcagatcacatgggctaaattttgcaaagaaaacatggctggcaagggcttctccttctgggtctggctggacaatatcattgaccttgtgaaaaagtacatcctggccctttggaacgaagggtacatcatgggctttatcagtaaggagcgggagcgggccatcttgagcactaagcctccaggcaccttcctgctaagattcagtgaaagcagcaaagaaggaggcgtcactttcacttgggtggagaaggacatcagcggtaagacccagatccagtccgtggaaccatacacaaagcagcagctgaacaacatgtcatttgctgaaatcatcatgggctataagatcatggatgctaccaatatcctggtgtctccactggtctatctctatcctgacattcccaaggaggaggcattcggaaagtattgtcggccagagagccaggagcatcctgaagctgacccaggcgctgccccatacctgaagaccaagtttatctgtgtgacaccaacgacctgcagcaataccattgacctgccgatgtccccccgcactttagattcattgatgcagtttggaaataatggtgaaggtgctgaaccctcagcaggagggcagtttgagtccctcacctttgacatggagttgacctcggagtgcgctacctcccccatgtgaggagctgagaacggaagctgcagaaagatacgactgaggcgcctacctgcattctgccacccctcacacagccaaaccccagatcatctgaaactactaactttgtggttccagattttttttaatctcctacttctgctatctttgagcaatctgggcacttttaaaaatagagaaatgagtgaa

SEQ ID NO: 181599 - DNA, 3319 bp, Homo sapiens
  Payload ID: 15767
  Gene Symbol: STAT3
  Gene Name: signal transducer and activator of transcription 3 (acute-phase response factor)
  Uniprot ID: P40763
  ENST ID: ENST00000585517
  CDS Start-End: 166-2334
gcagccgagggaacaagccccaaccggatcctggacaggcaccccggcttggcgctgtctctccccctcggctcggagaggcccttcggcctgagggagcctcgccgcccgtccccggcacacgcgcagccccggcctctcggcctctgccggagaaacagcaggatggcccaatggaatcagctacagcagcttgacacacggtacctggagcagctccatcagctctacagtgacagcttcccaatggagctgcggcagtttctggccccttggattgagagtcaagattgggcatatgcggccagcaaagaatcacatgccactttggtgtttcataatctcctgggagagattgaccagcagtatagccgcttcctgcaagagtcgaatgttctctatcagcacaatctacgaagaatcaagcagtttcttcagagcaggtatcttgagaagccaatggagattgcccggattgtggcccggtgcctgtgggaagaatcacgccttctacagactgcagccactgcggcccagcaagggggccaggccaaccaccccacagcagccgtggtgacggagaagcagcagatgctggagcagcaccttcaggatgtccggaagagagtgcaggatctagaacagaaaatgaaagtggtagagaatctccaggatgactttgatttcaactataaaaccctcaagagtcaaggagacatgcaagatctgaatggaaacaaccagtcagtgaccaggcagaagatgcagcagctggaacagatgctcactgcgctggaccagatgcggagaagcatcgtgagtgagctggcggggcttttgtcagcgatggagtacgtgcagaaaactctcacggacgaggagctggctgactggaagaggcggcaacagattgcctgcattggaggcccgcccaacatctgcctagatcggctagaaaactggataacgtcattagcagaatctcaacttcagacccgtcaacaaattaagaaactggaggagttgcagcaaaaagtttcctacaaaggggaccccattgtacagcaccggccgatgctggaggagagaatcgtggagctgtttagaaacttaatgaaaagtgcctttgtggtggagcggcagccctgcatgcccatgcatcctgaccggcccctcgtcatcaagaccggcgtccagttcactactaaagtcaggttgctggtcaaattccctgagttgaattatcagcttaaaattaaagtgtgcattgacaaagactctggggacgttgcagctctcagaggatcccggaaatttaacattctgggcacaaacacaaaagtgatgaacatggaagaatccaacaacggcagcctctctgcagaattcaaacacttgaccctgagggagcagagatgtgggaatgggggccgagccaattgtgatgcttccctgattgtgactgaggagctgcacctgatcacctttgagaccgaggtgtatcaccaaggcctcaagattgacctagagacccactccttgccagttgtggtgatctccaacatctgtcagatgccaaatgcctgggcgtccatcctgtggtacaacatgctgaccaacaatcccaagaatgtaaacttttttaccaagcccccaattggaacctgggatcaagtggccgaggtcctgagctggcagttctcctccaccaccaagcgaggactgagcatcgagcagctgactacactggcagagaaactcttgggacctggtgtgaattattcagggtgtcagatcacatgggctaaattttgcaaagaaaacatggctggcaagggcttctccttctgggtctggctggacaatatcattgaccttgtgaaaaagtacatcctggccctttggaacgaagggtacatcatgggctttatcagtaaggagcgggagcgggccatcttgagcactaagcctccaggcaccttcctgctaagattcagtgaaagcagcaaagaaggaggcgtcactttcacttgggtggagaaggacatcagcggtaagacccagatccagtccgtggaaccatacacaaagcagcagctgaacaacatgtcatttgctgaaatcatcatgggctataagatcatggatgctaccaatatcctggtgtctccactggtctatctctatcctgacattcccaaggaggaggcattcggaaagtattgtcggccagagagccaggagcatcctgaagctgacccaggtagcgctgccccatacctgaagaccaagtttatctgtgtgacaccattcattgatgcagtttggaaataatggtgaaggtgctgaaccctcagcaggagggcagtttgagtccctcacctttgacatggagttgacctcggagtgcgctacctcccccatgtgaggagctgagaacggaagctgcagaaagatacgactgaggcgcctacctgcattctgccacccctcacacagccaaaccccagatcatctgaaactactaactttgtggttccagattttttttaatctcctacttctgctatctttgagcaatctgggcacttttaaaaatagagaaatgagtgaatgtgggtgatctgcttttatctaaatgcaaataaggatgtgttctctgagacccatgatcaggggatgtggcggggggtggctagagggagaaaaaggaaatgtcttgtgttgttttgttcccctgccctcctttctcagcagctttttgttattgttgttgttgttcttagacaagtgcctcctggtgcctgcggcatccttctgcctgtttctgtaagcaaatgccacaggccacctatagctacatactcctggcattgcactttttaaccttgctgacatccaaatagaagataggactatctaagccctaggtttctttttaaattaagaaataataacaattaaagggcaaaaaacactgtatcagcatagcctttctgtatttaagaaacttaagcagccgggcatggtggctcacgcctgtaatcccagcactttgggaggccgaggcggatcataaggtcaggagatcaagaccatcctggctaacacggtgaaaccccgtctctactaaaagtacaaaaaattagctgggtgtggtggtgggcgcctgtagtcccagctactcgggaggctgaggcaggagaatcgcttgaacctgagaggcggaggttgcagtgagccaaaattgcaccactgcacactgcactccatcctgggcgacagtctgagactctgtctcaaaaaaaaaaaaaaaaaa

SEQ ID NO: 181600 - DNA, 571 bp, Homo sapiens
  Payload ID: 15767
  Gene Symbol: STAT3
  Gene Name: signal transducer and activator of transcription 3 (acute-phase response factor)
  ENST ID: ENST00000588065
  CDS Start-End: 320-571
gggggttccgacgtcgcagccgagggaacaagccccaaccggatcctggacaggcaccccggcttggcgctgtctctccccctcggctcggagaggcccttcggcctgagggagcctcgccgcccgtccccggcacacgcgcagccccggcctctcggcctctgccggagaaacaggcacagccaccacttcacttacattgtgggattataatttcatgagtagtggaatttccttaaccttctcttgtgtgggagctgaaggacaaaatgagatattctctgaagagtggttacatcatgcaaaactatgatgtgtaatgaggatggcccaatggaatcagctacagcagcttgacacacggtacctggagcagctccatcagctctacagtgacagcttcccaatggagctgcggcagtttctggccccttggattgagagtcaagattgggcatatgcggccagcaaagaatcacatgccactttggtgtttcataatctcctgggagagattgaccagcagtatagccgcttcctgcaagagtcgaatgttctctatcagcacaat

SEQ ID NO: 181601 - DNA, 2772 bp, Homo sapiens
  Payload ID: 15767
  Gene Symbol: STAT3
  Gene Name: signal transducer and activator of transcription 3 (acute-phase response factor)
  Uniprot ID: P40763
  ENST ID: ENST00000588969
  CDS Start-End: 206-2518
gcggcggcgcagactgggagggggagccgggggttccgacgtcgcagccgagggaacaagccccaaccggatcctggacaggcaccccggcttggcgctgtctctccccctcggctcggagaggcccttcggcctgagggagcctcgccgcccgtccccggcacacgcgcagccccggcctctcggcctctgccggagaaacaggatggcccaatggaatcagctacagcagcttgacacacggtacctggagcagctccatcagctctacagtgacagcttcccaatggagctgcggcagtttctggccccttggattgagagtcaagattgggcatatgcggccagcaaagaatcacatgccactttggtgtttcataatctcctgggagagattgaccagcagtatagccgcttcctgcaagagtcgaatgttctctatcagcacaatctacgaagaatcaagcagtttcttcagagcaggtatcttgagaagccaatggagattgcccggattgtggcccggtgcctgtgggaagaatcacgccttctacagactgcagccactgcggcccagcaagggggccaggccaaccaccccacagcagccgtggtgacggagaagcagcagatgctggagcagcaccttcaggatgtccggaagagagtgcaggatctagaacagaaaatgaaagtggtagagaatctccaggatgactttgatttcaactataaaaccctcaagagtcaaggagacatgcaagatctgaatggaaacaaccagtcagtgaccaggcagaagatgcagcagctggaacagatgctcactgcgctggaccagatgcggagaagcatcgtgagtgagctggcggggcttttgtcagcgatggagtacgtgcagaaaactctcacggacgaggagctggctgactggaagaggcggcaacagattgcctgcattggaggcccgcccaacatctgcctagatcggctagaaaactggataacgtcattagcagaatctcaacttcagacccgtcaacaaattaagaaactggaggagttgcagcaaaaagtttcctacaaaggggaccccattgtacagcaccggccgatgctggaggagagaatcgtggagctgtttagaaacttaatgaaaagtgcctttgtggtggagcggcagccctgcatgcccatgcatcctgaccggcccctcgtcatcaagaccggcgtccagttcactactaaagtcaggttgctggtcaaattccctgagttgaattatcagcttaaaattaaagtgtgcattgacaaagactctggggacgttgcagctctcagaggatcccggaaatttaacattctgggcacaaacacaaaagtgatgaacatggaagaatccaacaacggcagcctctctgcagaattcaaacacttgaccctgagggagcagagatgtgggaatgggggccgagccaattgtgatgcttccctgattgtgactgaggagctgcacctgatcacctttgagaccgaggtgtatcaccaaggcctcaagattgacctagagacccactccttgccagttgtggtgatctccaacatctgtcagatgccaaatgcctgggcgtccatcctgtggtacaacatgctgaccaacaatcccaagaatgtaaacttttttaccaagcccccaattggaacctgggatcaagtggccgaggtcctgagctggcagttctcctccaccaccaagcgaggactgagcatcgagcagctgactacactggcagagaaactcttgggacctggtgtgaattattcagggtgtcagatcacatgggctaaattttgcaaagaaaacatggctggcaagggcttctccttctgggtctggctggacaatatcattgaccttgtgaaaaagtacatcctggccctttggaacgaagggtacatcatgggctttatcagtaaggagcgggagcgggccatcttgagcactaagcctccaggcaccttcctgctaagattcagtgaaagcagcaaagaaggaggcgtcactttcacttgggtggagaaggacatcagcggtaagacccagatccagtccgtggaaccatacacaaagcagcagctgaacaacatgtcatttgctgaaatcatcatgggctataagatcatggatgctaccaatatcctggtgtctccactggtctatctctatcctgacattcccaaggaggaggcattcggaaagtattgtcggccagagagccaggagcatcctgaagctgacccaggtagcgctgccccatacctgaagaccaagtttatctgtgtgacaccaacgacctgcagcaataccattgacctgccgatgtccccccgcactttagattcattgatgcagtttggaaataatggtgaaggtgctgaaccctcagcaggagggcagtttgagtccctcacctttgacatggagttgacctcggagtgcgctacctcccccatgtgaggagctgagaacggaagctgcagaaagatacgactgaggcgcctacctgcattctgccacccctcacacagccaaaccccagatcatctgaaactactaactttgtggttccagattttttttaatctcctacttctgctatctttgagcaatctgggcacttttaaaaatagagaaatgagtgaatgtgggtgatctgcttttatctaaatgcaaataaggatgtgttctctgagacccatgatcaggggatg

SEQ ID NO: 181602 - DNA, 2769 bp, Homo sapiens
  Payload ID: 15768
  Gene Symbol: STAT4
  Gene Name: signal transducer and activator of transcription 4
  Uniprot ID: Q14765
  ENST ID: ENST00000358470
  CDS Start-End: 259-2505
aaggctactcaaggagagtaggaggaggctaggtcaggaagggcaagcactggtggcctacccaggacttggcccaaccctctgggtcaggtcaccctcgtcggagtgagcggaccccgctggaattggagcccagtaaggtctatgagtttggtgttttgatcctggctacccatcccttccatcccaggggtggttcaccaggctgagtggagccttatactagggagagaggaagctgaagaactgggctccagcatgtctcagtggaatcaagtccaacagttagaaatcaagtttttggagcaggtggatcaattctatgatgacaactttcccatggaaattcggcatctgttggcccaatggattgaaaatcaagactgggaggcagcttctaacaatgaaaccatggcaacgattcttcttcaaaacttgttaatacaactggatgaacagttaggtcgtgtttccaaagagaaaaacctactcttgatacacaatctaaaaagaattaggaaggtccttcagggaaaatttcatggaaatccaatgcatgtagctgtggttatttcaaactgtttaagggaagagaggagaatattggctgcagccaacatgcctgtccaggggcctctagagaaatccttacaaagttcttcagtttcagaaagacagaggaatgtggagcacaaagtggctgccattaaaaacagtgtgcagatgacagaacaagataccaaatacttagaagatctgcaagacgaatttgactacaggtataaaacaattcagacaatggatcagagtgacaagaatagtgccatggtgaatcaggaagttttgacactgcaggaaatgcttaacagcctcgatttcaagagaaaggaggctctcagtaaaatgacccaaatcatccatgagacagacctgttaatgaacaccatgctcatagaagagctgcaagactggaagcggcggcagcaaatcgcctgcatcgggggtccactccacaatgggctcgaccagcttcagaactgctttacactattggcagaaagtcttttccaactgagaaggcaattggagaaactagaggagcaatctaccaaaatgacatatgaaggtgatcccattccaatgcaaagaactcacatgctagaaagagtcaccttcttgatctacaaccttttcaagaactcatttgtggttgagcgacagccatgtatgccaacccaccctcagaggccgttggtacttaaaaccctaattcagttcactgtaaaactaaggctactaataaaattgccagaactaaactatcaggtaaaggttaaggcatcaattgacaagaatgtttcaactctaagcaaccgaagatttgtactttgtggaactaatgtcaaagccatgtctattgaagaatcttccaatgggagtctctcagtagaatttcgacatttgcaaccaaaggaaatgaagtccagtgctggaggtaaaggaaatgagggctgtcacatggtgactgaagaacttcattccataacgtttgaaacacagatctgcctctatggcctgaccatagatttggagaccagctcattgcctgtggtgatgatttccaatgtcagtcagttacctaatgcttgggcatccatcatttggtacaacgtgtcaaccaacgattcccagaacttggttttctttaataatcctccacctgccacattgagtcaactactggaggtgatgagctggcagttttcatcgtacgttggtcgtggtcttaactcagatcaactccatatgctggcagagaagcttacagtccaatctagctacagtgatggtcacctcacctgggccaagttctgcaaggaacatttacctggtaaatcatttaccttttggacatggcttgaagcaatattggatctaattaagaaacacattcttcccctttggattgatgggtatgtcatgggctttgttagcaaagagaaggaacggctgttgctaaaggataaaatgcctggcacctttttattaagattcagtgaaagccatctcggaggaataactttcacctgggtggaccattctgaaagtggggaagtgagattccactctgtagaaccctacaataaaggccggttgtctgctctgccattcgctgacatcctgcgagactacaaagttattatggctgaaaacattcctgaaaaccctctgaagtacctatatcctgacattcccaaagacaaagccttcggtaaacactacagctctcagccttgcgaagtttcaagaccaacagaaaggggtgacaaaggttatgttccttctgtttttatccccatctcaacaatccgaagtgattcaacagagccacattctccatcagaccttcttcccatgtctccaagtgtgtatgcggtgttgagagaaaacctgagtcccacaacaattgaaactgcaatgaagtctccttattctgctgaatgacaggataaactctgacgcaccaagaaaggaagcaaatgaaaaagtttaaagactgttctttgcccaataaccacattttatttcttcagctttgtaaataccaggttctaggaaatgtttgacatctgaagctctcttcacactcccgtggcactcctcaattgggagtgttgtgactgaaatgcttgaaaccaaagcttcagataaacttgcaagataagacaactttaagaaaccagtgttaataacaatattaacagaaga

SEQ ID NO: 181603 - DNA, 2822 bp, Homo sapiens
  Payload ID: 15768
  Gene Symbol: STAT4
  Gene Name: signal transducer and activator of transcription 4
  Uniprot ID: Q14765
  ENST ID: ENST00000392320
  CDS Start-End: 316-2562
tttttcctggcactgctgagccacctgcagttgcgagagccgctgggagggataagagggaagaggacgcccggtgaaggggctccagcctggcagtttctgcgtgttagcatttctagaatagagtgggtgggaactgacccaagtaaagtcccagagactcgaacactgacgcacaggaaagcctcaagtgggaggagaaatgcaaatcccctactgatgatggcgtcagcggctttctcctagggactgtgaggggcgcttctgactttggacttgagcactgcctgggacctgtgctgagagagcgctagcatgtctcagtggaatcaagtccaacagttagaaatcaagtttttggagcaggtggatcaattctatgatgacaactttcccatggaaattcggcatctgttggcccaatggattgaaaatcaagactgggaggcagcttctaacaatgaaaccatggcaacgattcttcttcaaaacttgttaatacaactggatgaacagttaggtcgtgtttccaaagagaaaaacctactcttgatacacaatctaaaaagaattaggaaggtccttcagggaaaatttcatggaaatccaatgcatgtagctgtggttatttcaaactgtttaagggaagagaggagaatattggctgcagccaacatgcctgtccaggggcctctagagaaatccttacaaagttcttcagtttcagaaagacagaggaatgtggagcacaaagtggctgccattaaaaacagtgtgcagatgacagaacaagataccaaatacttagaagatctgcaagacgaatttgactacaggtataaaacaattcagacaatggatcagagtgacaagaatagtgccatggtgaatcaggaagttttgacactgcaggaaatgcttaacagcctcgatttcaagagaaaggaggctctcagtaaaatgacccaaatcatccatgagacagacctgttaatgaacaccatgctcatagaagagctgcaagactggaagcggcggcagcaaatcgcctgcatcgggggtccactccacaatgggctcgaccagcttcagaactgctttacactattggcagaaagtcttttccaactgagaaggcaattggagaaactagaggagcaatctaccaaaatgacatatgaaggtgatcccattccaatgcaaagaactcacatgctagaaagagtcaccttcttgatctacaaccttttcaagaactcatttgtggttgagcgacagccatgtatgccaacccaccctcagaggccgttggtacttaaaaccctaattcagttcactgtaaaactaaggctactaataaaattgccagaactaaactatcaggtaaaggttaaggcatcaattgacaagaatgtttcaactctaagcaaccgaagatttgtactttgtggaactaatgtcaaagccatgtctattgaagaatcttccaatgggagtctctcagtagaatttcgacatttgcaaccaaaggaaatgaagtccagtgctggaggtaaaggaaatgagggctgtcacatggtgactgaagaacttcattccataacgtttgaaacacagatctgcctctatggcctgaccatagatttggagaccagctcattgcctgtggtgatgatttccaatgtcagtcagttacctaatgcttgggcatccatcatttggtacaacgtgtcaaccaacgattcccagaacttggttttctttaataatcctccacctgccacattgagtcaactactggaggtgatgagctggcagttttcatcgtacgttggtcgtggtcttaactcagatcaactccatatgctggcagagaagcttacagtccaatctagctacagtgatggtcacctcacctgggccaagttctgcaaggaacatttacctggtaaatcatttaccttttggacatggcttgaagcaatattggatctaattaagaaacacattcttcccctttggattgatgggtatgtcatgggctttgttagcaaagagaaggaacggctgttgctaaaggataaaatgcctggcacctttttattaagattcagtgaaagccatctcggaggaataactttcacctgggtggaccattctgaaagtggggaagtgagattccactctgtagaaccctacaataaaggccggttgtctgctctgccattcgctgacatcctgcgagactacaaagttattatggctgaaaacattcctgaaaaccctctgaagtacctatatcctgacattcccaaagacaaagccttcggtaaacactacagctctcagccttgcgaagtttcaagaccaacagaaaggggtgacaaaggttatgttccttctgtttttatccccatctcaacaatccgaagtgattcaacagagccacattctccatcagaccttcttcccatgtctccaagtgtgtatgcggtgttgagagaaaacctgagtcccacaacaattgaaactgcaatgaagtctccttattctgctgaatgacaggataaactctgacgcaccaagaaaggaagcaaatgaaaaagtttaaagactgttctttgcccaataaccacattttatttcttcagctttgtaaataccaggttctaggaaatgtttgacatctgaagctctcttcacactcccgtggcactcctcaattgggagtgttgtgactgaaatgcttgaaaccaaagcttcagataaacttgcaagataagacaactttaagaaaccagtgttaataacaatattaacag

SEQ ID NO: 181604 - DNA, 709 bp, Homo sapiens
  Payload ID: 15768
  Gene Symbol: STAT4
  Gene Name: signal transducer and activator of transcription 4
  ENST ID: ENST00000409995
  CDS Start-End: 27-380
gggacctgtgctgagagagcgctagcatgtctcagtggaatcaagtccaacagttagaaatcaagtttttggagcaggtggatcaattctatgatgacaactttcccatggaaattcggcatctgttggcccaatggattgaaaatcaagactgggaggcagcttctaacaatgaaaccatggcaacgattcttcttcaaaacttgttaatacaactggatgaacagttaggtcgtgtttccaaagagaaaaacctactcttgatacacaatctaaaaagaattaggaaggtccttcagtccccagggttggctacagcacagctgcccttggatcgacatggagaaacctgcattcaaaggtccaaatcttgtccctaggacttagcttcttcacctgggacattcagatgatactaattgaggaaaccaagatacaggaatttagtacccatctattccttctaatacaaaacatcggagaattctggcttttgcaaactgttgttgacattttatacccagatgttaccattacctttgaagcctcttgtgcctcctccctgacaccactctgctctctttccgcctggagcaaccactgacccaaaatttgcatttgtcattttttttctttttgttgccattttaccacatacatttgcatccctaaacaataaagtgtctaggtttgaaagctgctaaatcca

SEQ ID NO: 181605 - DNA, 548 bp, Homo sapiens
  Payload ID: 15768
  Gene Symbol: STAT4
  Gene Name: signal transducer and activator of transcription 4
  ENST ID: ENST00000413064
  CDS Start-End: 258-548
aggtcaggaagggcaagcactggtggcctacccaggacttggcccaaccctctgggtcaggtcaccctcgtcggagtgagcggaccccgctggaattggagcccagtaaggtctatgagtttggtgttttgatcctggctacccatcccttccatcccaggggtggttcaccaggctgagtggagccttatactagggagagaggaagctgaagaactgggctccaggtggatcaattctatgatgacaactttcccatggaaattcggcatctgttggcccaatggattgaaaatcaagactgggaggcagcttctaacaatgaaaccatggcaacgattcttcttcaaaacttgttaatacaactggatgaacagttaggtcgtgtttccaaagagaaaaacctactcttgatacacaatctaaaaagaattaggaaggtccttcagggaaaatttcatggaaatccaatgcatgtagctgtggttatttcaaactgtttaagggaagagaggagaatattggctgcagccaacatgcctgtccag

SEQ ID NO: 181606 - DNA, 569 bp, Homo sapiens
  Payload ID: 15768
  Gene Symbol: STAT4
  Gene Name: signal transducer and activator of transcription 4
  ENST ID: ENST00000450994
  CDS Start-End: 333-569
aggggcaaggctactcaaggagagtaggaggaggctaggtcaggaagggcaagcactggtggcctacccaggacttggcccaaccctctgggtcaggtcaccctcgtcggagtgagcggaccccgctggaattggagcccagtaaggtctatgagtttggtgttttgatcctggctacccatcccttccatcccaggggtggttcaccaggctgagtggagccttatactagggagagaggaagctgaagaactgggctccagggactgtgaggggcgcttctgactttggacttgagcactgcctgggacctgtgctgagagagcgctagcatgtctcagtggaatcaagtccaacagttagaaatcaagtttttggagcaggtggatcaattctatgatgacaactttcccatggaaattcggcatctgttggcccaatggattgaaaatcaagactgggaggcagcttctaacaatgaaaccatggcaacgattcttcttcaaaacttgttaatacaactggatgaacagttaggtcgtgtttccaaagagaaaaacctactcttg

SEQ ID NO: 181607 - DNA, 474 bp, Homo sapiens
  Payload ID: 15768
  Gene Symbol: STAT4
  Gene Name: signal transducer and activator of transcription 4
  ENST ID: ENST00000432798
  CDS Start-End: 399-474
ggggcaaggctactcaaggagagtaggaggaggctaggtcaggaagggcaagcactggtggcctacccaggacttggcccaaccctctgggtcaggtcaccctcgtcggagtgagcggaccccgctggaattggagcccagtaaggtctatgagtttggtgttttgatcctggctacccatcccttccatcccaggggtggttcaccaggctgagtggagccttatactagggagagaggaagctgaagaactgggctccaggaaagcctcaagtgggaggagaaatgcaaatcccctactgatgatggcgtcagcggctttctcctagggactgtgaggggcgcttctgactttggacttgagcactgcctgggacctgtgctgagagagcgctagcatgtctcagtggaatcaagtccaacagttagaaatcaagtttttggagcaggtggatcaattctatgatgacaact

SEQ ID NO: 181608 - DNA, 4301 bp, Homo sapiens
  Payload ID: 15769
  Gene Symbol: STAT5A
  Gene Name: signal transducer and activator of transcription 5A
  Uniprot ID: P42229
  ENST ID: ENST00000345506
  CDS Start-End: 643-3027
agacaggatattcactgctgtggcaaggcctgtagagagtttcgaagttaggaggactcaagacggtccctccctggacttttctgaaggggctcaaaagatgacacgcgccagagctggaaggcgtcgccaattggtccacttttccctcctccctttttgcggatgagaaaactgaggcccaggtttgggatttccagagcccgggatttcccggcaacgcccgacaaccacattcccccggctattctgacccgccccggttccgggacgctccctgggagccgccgccgagggcctgctgggactcccgggggaccccgccgtcggggcagcccccacgcccggcgccgcccgccgggaacggccgccgctgttgcgcacttgcaggggagccggcgactgagggcgaggcagggagggagcaagcggggctgggagggctgctggcgcgggctcgcgcgctgtgtatggtctatcgcaggcagctgacctttgaggaggaaatcgctgctctccgctccttcctgtagtaacagccgccgctgccgccgccgccaggaaccccggccgggagcgagagccgcggggcgcagagccggcccggctgccggacggtgcggccccaccaggtgaacggccatggcgggctggatccaggcccagcagctgcagggagacgcgctgcgccagatgcaggtgctgtacggccagcacttccccatcgaggtccggcactacttggcccagtggattgagagccagccatgggatgccattgacttggacaatccccaggacagagcccaagccacccagctcctggagggcctggtgcaggagctgcagaagaaggcggagcaccaggtgggggaagatgggtttttactgaagatcaagctggggcactacgccacgcagctccagaaaacatatgaccgctgccccctggagctggtccgctgcatccggcacattctgtacaatgaacagaggctggtccgagaagccaacaattgcagctctccggctgggatcctggttgacgccatgtcccagaagcaccttcagatcaaccagacatttgaggagctgcgactggtcacgcaggacacagagaatgagctgaagaaactgcagcagactcaggagtacttcatcatccagtaccaggagagcctgaggatccaagctcagtttgcccagctggcccagctgagcccccaggagcgtctgagccgggagacggccctccagcagaagcaggtgtctctggaggcctggttgcagcgtgaggcacagacactgcagcagtaccgcgtggagctggccgagaagcaccagaagaccctgcagctgctgcggaagcagcagaccatcatcctggatgacgagctgatccagtggaagcggcggcagcagctggccgggaacggcgggccccccgagggcagcctggacgtgctacagtcctggtgtgagaagttggccgagatcatctggcagaaccggcagcagatccgcagggctgagcacctctgccagcagctgcccatccccggcccagtggaggagatgctggccgaggtcaacgccaccatcacggacattatctcagccctggtgaccagcacattcatcattgagaagcagcctcctcaggtcctgaagacccagaccaagtttgcagccaccgtacgcctgctggtgggcgggaagctgaacgtgcacatgaatcccccccaggtgaaggccaccatcatcagtgagcagcaggccaagtctctgcttaaaaatgagaacacccgcaacgagtgcagtggtgagatcctgaacaactgctgcgtgatggagtaccaccaagccacgggcaccctcagtgcccacttcaggaacatgtcactgaagaggatcaagcgtgctgaccggcggggtgcagagtccgtgacagaggagaagttcacagtcctgtttgagtctcagttcagtgttggcagcaatgagcttgtgttccaggtgaagactctgtccctacctgtggttgtcatcgtccacggcagccaggaccacaatgccacggctactgtgctgtgggacaatgcctttgctgagccgggcagggtgccatttgccgtgcctgacaaagtgctgtggccgcagctgtgtgaggcgctcaacatgaaattcaaggccgaagtgcagagcaaccggggcctgaccaaggagaacctcgtgttcctggcgcagaaactgttcaacaacagcagcagccacctggaggactacagtggcctgtccgtgtcctggtcccagttcaacagggagaacttgccgggctggaactacaccttctggcagtggtttgacggggtgatggaggtgttgaagaagcaccacaagccccactggaatgatggggccatcctaggttttgtgaataagcaacaggcccacgacctgctcatcaacaagcccgacgggaccttcttgttgcgctttagtgactcagaaatcgggggcatcaccatcgcctggaagtttgactccccggaacgcaacctgtggaacctgaaaccattcaccacgcgggatttctccatcaggtccctggctgaccggctgggggacctgagctatctcatctatgtgtttcctgaccgccccaaggatgaggtcttctccaagtactacactcctgtgctggctaaagctgttgatggatatgtgaaaccacagatcaagcaagtggtccctgagtttgtgaatgcatctgcagatgctgggggcagcagcgccacgtacatggaccaggccccctccccagctgtgtgcccccaggctccctataacatgtacccacagaaccctgaccatgtactcgatcaggatggagaattcgacctggatgagaccatggatgtggccaggcacgtggaggaactcttacgccgaccaatggacagtcttgactcccgcctctcgccccctgccggtcttttcacctctgccagaggctccctctcatgaatgtttgaatcccacgcttctctttggaaacaatatgcaatgtgaagcggtcgtgttgtgagtttagtaaggctgtgtacactgacacctttgcaggcatgcatgtgcttgtgtgtgtgtgtgtgtgtgtgtccttgtgcatgagctacgcctgcctcccctgtgcagtcctgggatgtggctgcagcagcggtggcctcttttcagatcatggcatccaagagtgcgccgagtctgtctctgtcatggtagagaccgagcctctgtcactgcaggcactcaatgcagccagacctattcctcctgggcccctcatctgctcagcagctatttgaatgagatgattcagaaggggaggggagacaggtaacgtctgtaagctgaagtttcactccggagtgagaagctttgccctcctaagagagagagacagagagacagagagagagaaagagagagtgtgtgggtctatgtaaatgcatctgtcctcatgtgttgatgtaaccgattcatctctcagaagggaggctggggttcattttcgagtagtattttatactttagtgaacgtggactccagactctctgtgaaccctatgagagcgcgtctgggcccggccatgtccttagcacaggggggccgccggtttgagtgagggtttctgagctgctctgaattagtccttgcttggctgcttggccttgggcttcattcaagtctatgatgctgttgcccacgtttcccgggatatatattctctcccctccgttgggccccagccttctttgcttgcctctctgtttgtaaccttgtcgacaaagaggtagaaaagattgggtctaggatatggtgggtggacaggggccccgggacttggagggttggtcctcttgcctcctggaaaaaacaaaaacaaaaaactgcagtgaaagacaagctgcaaatcagccatgtgctgcgtgcctgtggaatctggagtgaggggtaaaagctgatctggtttgactccgctggaggtggggcctggagcaggccttgcgctgttgcgtaactggctgtgttctggtgaggccttgctcccaaccccacacgctcctccctctgaggctgtaggactcgcagtcaggggcagctgaccatggaagattgagagcccaaggtttaaacttctctgaagggaggtggggatgagaagaggggtttttttgtactttgtacaaagaccacacatttgtgtaaacagtgttttggaataaaatatttttttcataaa

SEQ ID NO: 181609 - DNA, 515 bp, Homo sapiens
  Payload ID: 15769
  Gene Symbol: STAT5A
  Gene Name: signal transducer and activator of transcription 5A
  ENST ID: ENST00000444283
  CDS Start-End: 141-515
aacagccgccgctgccgccgccgccaggaaccccggccgggagcgagagccgcggggcgcagagccggcccggctgccggacggtgcggccccaccagaggagagcgcttcagcgctcggctcgccctaggtgaacggccatggcgggctggatccaggcccagcagctgcagggagacgcgctgcgccagatgcaggtgctgtacggccagcacttccccatcgaggtccggcactacttggcccagtggattgagagccagccatgggatgccattgacttggacaatccccaggacagagcccaagccacccagctcctggagggcctggtgcaggagctgcagaagaaggcggagcaccaggtgggggaagatgggtttttactgaagatcaagctggggcactacgccacgcagctccagaaaacatatgaccgctgccccctggagctggtccgctgcatccggcacattctgtacaatgaacagaggctggtccgagaagccaacaat

SEQ ID NO: 181610 - DNA, 3086 bp, Homo sapiens
  Payload ID: 15769
  Gene Symbol: STAT5A
  Gene Name: signal transducer and activator of transcription 5A
  Uniprot ID: P42229
  ENST ID: ENST00000546010
  CDS Start-End: 534-2828
gccagagctggaaggcgtcgccaattggtccacttttccctcctccctttttgcggatgagaaaactgaggcccaggtttgggatttccagagcccgggatttcccggcaacgcccgacaaccacattcccccggctattctgacccgccccggttccgggacgctccctgggagccgccgccgagggcctgctgggactcccgggggaccccgccgtcggggcagcccccacgcccggcgccgcccgccgggaacggccgccgctgttgcgcacttgcaggggagccggcgactgagggcgaggcagggagggagcaagcggggctgggagggctgctggcgcgggctcgcgcgctgtgtatggtctatcgcaggcagctgacctttgaggaggaaatcgctgctctccgctccttcctgtagtaacagccgccgctgccgccgccgccaggaaccccggccgggagcgagagccgcggggcgcagagccggcccggctgccggacggtgcggccccaccaggtgaacggccatggcgggctggatccaggcccagcagctgcagggagacgcgctgcgccagatgcaggtgctgtacggccagcacttccccatcgaggtccggcactacttggcccagtggattgagagccagccatgggatgccattgacttggacaatccccaggacagagcccaagccacccagctcctggagggcctggtgcaggagctgcagaagaaggcggagcaccaggtgggggaagatgggtttttactgaagatcaagctggggcactacgccacgcagctccagtgcagctctccggctgggatcctggttgacgccatgtcccagaagcaccttcagatcaaccagacatttgaggagctgcgactggtcacgcaggacacagagaatgagctgaagaaactgcagcagactcaggagtacttcatcatccagtaccaggagagcctgaggatccaagctcagtttgcccagctggcccagctgagcccccaggagcgtctgagccgggagacggccctccagcagaagcaggtgtctctggaggcctggttgcagcgtgaggcacagacactgcagcagtaccgcgtggagctggccgagaagcaccagaagaccctgcagctgctgcggaagcagcagaccatcatcctggatgacgagctgatccagtggaagcggcggcagcagctggccgggaacggcgggccccccgagggcagcctggacgtgctacagtcctggtgtgagaagttggccgagatcatctggcagaaccggcagcagatccgcagggctgagcacctctgccagcagctgcccatccccggcccagtggaggagatgctggccgaggtcaacgccaccatcacggacattatctcagccctggtgaccagcacattcatcattgagaagcagcctcctcaggtcctgaagacccagaccaagtttgcagccaccgtacgcctgctggtgggcgggaagctgaacgtgcacatgaatcccccccaggtgaaggccaccatcatcagtgagcagcaggccaagtctctgcttaaaaatgagaacacccgcaacgagtgcagtggtgagatcctgaacaactgctgcgtgatggagtaccaccaagccacgggcaccctcagtgcccacttcaggaacatgtcactgaagaggatcaagcgtgctgaccggcggggtgcagagtccgtgacagaggagaagttcacagtcctgtttgagtctcagttcagtgttggcagcaatgagcttgtgttccaggtgaagactctgtccctacctgtggttgtcatcgtccacggcagccaggaccacaatgccacggctactgtgctgtgggacaatgcctttgctgagccgggcagggtgccatttgccgtgcctgacaaagtgctgtggccgcagctgtgtgaggcgctcaacatgaaattcaaggccgaagtgcagagcaaccggggcctgaccaaggagaacctcgtgttcctggcgcagaaactgttcaacaacagcagcagccacctggaggactacagtggcctgtccgtgtcctggtcccagttcaacagggagaacttgccgggctggaactacaccttctggcagtggtttgacggggtgatggaggtgttgaagaagcaccacaagccccactggaatgatggggccatcctaggttttgtgaataagcaacaggcccacgacctgctcatcaacaagcccgacgggaccttcttgttgcgctttagtgactcagaaatcgggggcatcaccatcgcctggaagtttgactccccggaacgcaacctgtggaacctgaaaccattcaccacgcgggatttctccatcaggtccctggctgaccggctgggggacctgagctatctcatctatgtgtttcctgaccgccccaaggatgaggtcttctccaagtactacactcctgtgctggctaaagctgttgatggatatgtgaaaccacagatcaagcaagtggtccctgagtttgtgaatgcatctgcagatgctgggggcagcagcgccacgtacatggaccaggccccctccccagctgtgtgcccccaggctccctataacatgtacccacagaaccctgaccatgtactcgatcaggatggagaattcgacctggatgagaccatggatgtggccaggcacgtggaggaactcttacgccgaccaatggacagtcttgactcccgcctctcgccccctgccggtcttttcacctctgccagaggctccctctcatgaatgtttgaatcccacgcttctctttggaaacaatatgcaatgtgaagcggtcgtgttgtgagtttagtaaggctgtgtacactgacacctttgcaggcatgcatgtgcttgtgtgtgtgtgtgtgtgtgtgtccttgtgcatgagctacgcctgcctcccctgtgcagtcctgggatgtggctgcagcagcggtggcctcttttcagatcatggcatccaagagtgcgccgagtctgtctctgtcatggtagagaccg

SEQ ID NO: 181611 - DNA, 835 bp, Homo sapiens
  Payload ID: 15769
  Gene Symbol: STAT5A
  Gene Name: signal transducer and activator of transcription 5A
  ENST ID: ENST00000590726
  CDS Start-End: 411-835
ggaaatcgctgctctccgctccttcctgtagtaacagccgccgctgccgccgccgccaggaaccccggccgggagcgagagccgcggggcgcagagccggcccggctgccggacggtgcggccccaccagggatgccattgacttggacaatccccaggacagagcccaagccacccagctcctggagggcctggtgcaggagctgcagaagaaggcggagcaccaggtgggggaagatgggtttttactgaagatcaagctggggcactacgccacgcagctccagaaaacatatgaccgctgccccctggagctggtccgctgcatccggcacattctgtacaatgaacagaggctggtccgagaagccaacaattgcagctctccggctgggatcctggttgacgccatgtcccagaagcaccttcagatcaaccagacatttgaggagctgcgactggtcacgcaggacacagagaatgagctgaagaaactgcagcagactcaggagtacttcatcatccagtaccaggagagcctgaggatccaagctcagtttgcccagctggcccagctgagcccccaggagcgtctgagccgggagacggccctccagcagaagcaggtgtctctggaggcctggttgcagcgtgaggcacagacactgcagcagtaccgcgtggagctggccgagaagcaccagaagaccctgcagctgctgcggaagcagcagaccatcatcctggatgacgagctgatccagtggaagcggcggcagcagctggccgggaacggcgggccccccgagggcagcctggacgtgctacagtcctg

SEQ ID NO: 181612 - DNA, 3629 bp, Homo sapiens
  Payload ID: 15769
  Gene Symbol: STAT5A
  Gene Name: signal transducer and activator of transcription 5A
  ENST ID: ENST00000588868
  CDS Start-End: 67-2358
gcgagagccgcggggcgcagagccggcccggctgccggacggtgcggccccaccaggtgaacggccatggcgggctggatccaggcccagcagctgcagggagacgcgctgcgccagatgcaggtgctgtacggccagcacttccccatcgaggtccggcactacttggcccagtggattgagagccagccatgggatgccattgacttggacaatccccaggacagagcccaagccacccagctcctggagggcctggtgcaggagctgcagaagaaggcggagcaccaggtgggggaagatgggtttttactgaagatcaagctggggcactacgccacgcagctccagaaaacatatgaccgctgccccctggagctggtccgctgcatccggcacattctgtacaatgaacagaggctggtccgagaagccaacaattgcagctctccggctgggatcctggttgacgccatgtcccagaagcaccttcagatcaaccagacatttgaggagctgcgactggtcacgcaggacacagagaatgagctgaagaaactgcagcagactcaggagtacttcatcatccagtaccaggagagcctgaggatccaagctcagtttgcccagctggcccagctgagcccccaggagcgtctgagccgggagacggccctccagcagaagcaggtgtctctggaggcctggttgcagcgtgaggcacagacactgcagcagtaccgcgtggagctggccgagaagcaccagaagaccctgcagctgctgcggaagcagcagaccatcatcctggatgacgagctgatccagtggaagcggcggcagcagctggccgggaacggcgggccccccgagggcagcctggacgtgctacagtcctggtgtgagaagttggccgagatcatctggcagaaccggcagcagatccgcagggctgagcacctctgccagcagctgcccatccccggcccagtggaggagatgctggccgaggtcaacgccaccatcacggacattatctcagccctggtgaccagcacattcatcattgagaagcagcctcctcaggtcctgaagacccagaccaagtttgcagccaccgtacgcctgctggtgggcgggaagctgaacgtgcacatgaatcccccccaggtgaaggccaccatcatcagtgagcagcaggccaagtctctgcttaaaaatgagaacacccgcaacgagtgcagtggtgagatcctgaacaactgctgcgtgatggagtaccaccaagccacgggcaccctcagtgcccacttcaggaacatgtcactgaagaggatcaagcgtgctgaccggcggggtgcagagtccgtgacagaggagaagttcacagtcctgtttgagtctcagttcagtgttggcagcaatgagcttgtgttccaggtgaagggcagggtgccatttgccgtgcctgacaaagtgctgtggccgcagctgtgtgaggcgctcaacatgaaattcaaggccgaagtgcagagcaaccggggcctgaccaaggagaacctcgtgttcctggcgcagaaactgttcaacaacagcagcagccacctggaggactacagtggcctgtccgtgtcctggtcccagttcaacagggagaacttgccgggctggaactacaccttctggcagtggtttgacggggtgatggaggtgttgaagaagcaccacaagccccactggaatgatggggccatcctaggttttgtgaataagcaacaggcccacgacctgctcatcaacaagcccgacgggaccttcttgttgcgctttagtgactcagaaatcgggggcatcaccatcgcctggaagtttgactccccggaacgcaacctgtggaacctgaaaccattcaccacgcgggatttctccatcaggtccctggctgaccggctgggggacctgagctatctcatctatgtgtttcctgaccgccccaaggatgaggtcttctccaagtactacactcctgtgctggctaaagctgttgatggatatgtgaaaccacagatcaagcaagtggtccctgagtttgtgaatgcatctgcagatgctgggggcagcagcgccacgtacatggaccaggccccctccccagctgtgtgcccccaggctccctataacatgtacccacagaaccctgaccatgtactcgatcaggatggagaattcgacctggatgagaccatggatgtggccaggcacgtggaggaactcttacgccgaccaatggacagtcttgactcccgcctctcgccccctgccggtcttttcacctctgccagaggctccctctcatgaatgtttgaatcccacgcttctctttggaaacaatatgcaatgtgaagcggtcgtgttgtgagtttagtaaggctgtgtacactgacacctttgcaggcatgcatgtgcttgtgtgtgtgtgtgtgtgtgtgtccttgtgcatgagctacgcctgcctcccctgtgcagtcctgggatgtggctgcagcagcggtggcctcttttcagatcatggcatccaagagtgcgccgagtctgtctctgtcatggtagagaccgagcctctgtcactgcaggcactcaatgcagccagacctattcctcctgggcccctcatctgctcagcagctatttgaatgagatgattcagaaggggaggggagacaggtaacgtctgtaagctgaagtttcactccggagtgagaagctttgccctcctaagagagagagacagagagacagagagagagaaagagagagtgtgtgggtctatgtaaatgcatctgtcctcatgtgttgatgtaaccgattcatctctcagaagggaggctggggttcattttcgagtagtattttatactttagtgaacgtggactccagactctctgtgaaccctatgagagcgcgtctgggcccggccatgtccttagcacaggggggccgccggtttgagtgagggtttctgagctgctctgaattagtccttgcttggctgcttggccttgggcttcattcaagtctatgatgctgttgcccacgtttcccgggatatatattctctcccctccgttgggccccagccttctttgcttgcctctctgtttgtaaccttgtcgacaaagaggtagaaaagattgggtctaggatatggtgggtggacaggggccccgggacttggagggttggtcctcttgcctcctggaaaaaacaaaaacaaaaaactgcagtgaaagacaagctgcaaatcagccatgtgctgcgtgcctgtggaatctggagtgaggggtaaaagctgatctggtttgactccgctggaggtggggcctggagcaggccttgcgctgttgcgtaactggctgtgttctggtgaggccttgctcccaaccccacacgctcctccctctgaggctgtaggactcgcagtcaggggcagctgaccatggaagattgagagcccaaggtttaaacttctctgaagggaggtggggatgagaagaggggtttttttgtactttgtacaaagaccacacatttgtgtaaacagtgttttggaataaaatatttttttcat

SEQ ID NO: 181613 - DNA, 1022 bp, Homo sapiens
  Payload ID: 15769
  Gene Symbol: STAT5A
  Gene Name: signal transducer and activator of transcription 5A
  ENST ID: ENST00000587646
  CDS Start-End: 135-824
gtatcttgtgtgtgtgtgaatatttccaactccctcaatctaccttttcccctctcttgtctccctctcagggcagggtgccatttgccgtgcctgacaaagtgctgtggccgcagctgtgtgaggcgctcaacatgaaattcaaggccgaagtgcagagcaaccggggcctgaccaaggagaacctcgtgttcctggcgcagaaactgttcaacaacagcagcagccacctggaggactacagtggcctgtccgtgtcctggtcccagttcaacagggagaacttgccgggctggaactacaccttctggcagtggtttgacggggtgatggaggtgttgaagaagcaccacaagccccactggaatgatggggccatcctaggttttgtgaataagcaacaggcccacgacctgctcatcaacaagcccgacgggaccttcttgttgcgctttagtgactcagaaatcgggggcatcaccatcgcctggaagtttgactccccggaacgcaacctgtggaacctgaaaccattcaccacgcgggatttctccatcaggtccctggctgaccggctgggggacctgagctatctcatctatgtgtttcctgaccgccccaaggatgaggtcttctccaagtactacactcctgtgctggctaaagctgttgatggatatgtgaaaccacagatcaagcaagtggtccctgagtttgtgaatgcatctgcagatgctgggggcagcagcgccacgtacatggaccaggccccctccccagctgtgtgcccccaggctccctataacatgtacccacagaagtaggtggtgttctcatggggtccgcaggggaagaactggggacttggccccaggctggactcctggagggctggcgggcaaaggatccagagctctggttaggcccaagtccaggaggagtgagatcagccaggaaaacagagcattttgaagctagacatagcagggtcaagtcctcactctagtactaactgtgtgatc

SEQ ID NO: 181614 - DNA, 3318 bp, Homo sapiens
  Payload ID: 15769
  Gene Symbol: STAT5A
  Gene Name: signal transducer and activator of transcription 5A
  Uniprot ID: P42229
  ENST ID: ENST00000590949
  CDS Start-End: 743-3127
agatggccggagtaaaagaaggagggaggtgctgcggtggtgggggtgatcttggcttcactagaatccccagttcttcccctctctacagttttgtctctgaggtcacaaaacctgtggcccccaagacacacatgcgcacacacgcgcgtgcacacacacaccccacacatttattttttaatctaggggctcaaaagatgacacgcgccagagctggaaggcgtcgccaattggtccacttttccctcctccctttttgcggatgagaaaactgaggcccaggtttgggatttccagagcccgggatttcccggcaacgcccgacaaccacattcccccggctattctgacccgccccggttccgggacgctccctgggagccgccgccgagggcctgctgggactcccgggggaccccgccgtcggggcagcccccacgcccggcgccgcccgccgggaacggccgccgctgttgcgcacttgcaggggagccggcgactgagggcgaggcagggagggagcaagcggggctgggagggctgctggcgcgggctcgcgcgctgtgtatggtctatcgcaggcagctgacctttgaggaggaaatcgctgctctccgctccttcctgtagtaacagccgccgctgccgccgccgccaggaaccccggccgggagcgagagccgcggggcgcagagccggcccggctgccggacggtgcggccccaccaggtgaacggccatggcgggctggatccaggcccagcagctgcagggagacgcgctgcgccagatgcaggtgctgtacggccagcacttccccatcgaggtccggcactacttggcccagtggattgagagccagccatgggatgccattgacttggacaatccccaggacagagcccaagccacccagctcctggagggcctggtgcaggagctgcagaagaaggcggagcaccaggtgggggaagatgggtttttactgaagatcaagctggggcactacgccacgcagctccagaaaacatatgaccgctgccccctggagctggtccgctgcatccggcacattctgtacaatgaacagaggctggtccgagaagccaacaattgcagctctccggctgggatcctggttgacgccatgtcccagaagcaccttcagatcaaccagacatttgaggagctgcgactggtcacgcaggacacagagaatgagctgaagaaactgcagcagactcaggagtacttcatcatccagtaccaggagagcctgaggatccaagctcagtttgcccagctggcccagctgagcccccaggagcgtctgagccgggagacggccctccagcagaagcaggtgtctctggaggcctggttgcagcgtgaggcacagacactgcagcagtaccgcgtggagctggccgagaagcaccagaagaccctgcagctgctgcggaagcagcagaccatcatcctggatgacgagctgatccagtggaagcggcggcagcagctggccgggaacggcgggccccccgagggcagcctggacgtgctacagtcctggtgtgagaagttggccgagatcatctggcagaaccggcagcagatccgcagggctgagcacctctgccagcagctgcccatccccggcccagtggaggagatgctggccgaggtcaacgccaccatcacggacattatctcagccctggtgaccagcacattcatcattgagaagcagcctcctcaggtcctgaagacccagaccaagtttgcagccaccgtacgcctgctggtgggcgggaagctgaacgtgcacatgaatcccccccaggtgaaggccaccatcatcagtgagcagcaggccaagtctctgcttaaaaatgagaacacccgcaacgagtgcagtggtgagatcctgaacaactgctgcgtgatggagtaccaccaagccacgggcaccctcagtgcccacttcaggaacatgtcactgaagaggatcaagcgtgctgaccggcggggtgcagagtccgtgacagaggagaagttcacagtcctgtttgagtctcagttcagtgttggcagcaatgagcttgtgttccaggtgaagactctgtccctacctgtggttgtcatcgtccacggcagccaggaccacaatgccacggctactgtgctgtgggacaatgcctttgctgagccgggcagggtgccatttgccgtgcctgacaaagtgctgtggccgcagctgtgtgaggcgctcaacatgaaattcaaggccgaagtgcagagcaaccggggcctgaccaaggagaacctcgtgttcctggcgcagaaactgttcaacaacagcagcagccacctggaggactacagtggcctgtccgtgtcctggtcccagttcaacagggagaacttgccgggctggaactacaccttctggcagtggtttgacggggtgatggaggtgttgaagaagcaccacaagccccactggaatgatggggccatcctaggttttgtgaataagcaacaggcccacgacctgctcatcaacaagcccgacgggaccttcttgttgcgctttagtgactcagaaatcgggggcatcaccatcgcctggaagtttgactccccggaacgcaacctgtggaacctgaaaccattcaccacgcgggatttctccatcaggtccctggctgaccggctgggggacctgagctatctcatctatgtgtttcctgaccgccccaaggatgaggtcttctccaagtactacactcctgtgctggctaaagctgttgatggatatgtgaaaccacagatcaagcaagtggtccctgagtttgtgaatgcatctgcagatgctgggggcagcagcgccacgtacatggaccaggccccctccccagctgtgtgcccccaggctccctataacatgtacccacagaaccctgaccatgtactcgatcaggatggagaattcgacctggatgagaccatggatgtggccaggcacgtggaggaactcttacgccgaccaatggacagtcttgactcccgcctctcgccccctgccggtcttttcacctctgccagaggctccctctcatgaatgtttgaatcccacgcttctctttggaaacaatatgcaatgtgaagcggtcgtgttgtgagtttagtaaggctgtgtacactgacacctttgcaggcatgcatgtgcttgtgtgtgtgtgtgtgtgtgtgtccttgtgcatgagctacgcctgcctcccctgtgcagtcctgggatgtggctgcagcagc

SEQ ID NO: 181615 - DNA, 5103 bp, Homo sapiens
  Payload ID: 15770
  Gene Symbol: STAT5B
  Gene Name: signal transducer and activator of transcription 5B
  Uniprot ID: P51692
  ENST ID: ENST00000293328
  CDS Start-End: 170-2533
ggcgggaggagagtcggcggccggagccgtcaccccgggcggggacccagcgcaggcaactccgcgcggcggcccggccgagggagggagcgagcgggcgggcgggcaagccagacagctgggccggagcagccgcgggcgcccgaggggccgagcgagattgtaaaccatggctgtgtggatacaagctcagcagctccaaggagaagcccttcatcagatgcaagcgttatatggccagcattttcccattgaggtgcggcattatttatcccagtggattgaaagccaagcatgggactcagtagatcttgataatccacaggagaacattaaggccacccagctcctggagggcctggtgcaggagctgcagaagaaggcagagcaccaggtgggggaagatgggtttttactgaagatcaagctggggcactatgccacacagctccagaacacgtatgaccgctgccccatggagctggtccgctgcatccgccatatattgtacaatgaacagaggttggtccgagaagccaacaatggtagctctccagctggaagccttgctgatgccatgtcccagaaacacctccagatcaaccagacgtttgaggagctgcgactggtcacgcaggacacagagaatgagttaaaaaagctgcagcagactcaggagtacttcatcatccagtaccaggagagcctgaggatccaagctcagtttggcccgctggcccagctgagcccccaggagcgtctgagccgggagacggccctccagcagaagcaggtgtctctggaggcctggttgcagcgtgaggcacagacactgcagcagtaccgcgtggagctggccgagaagcaccagaagaccctgcagctgctgcggaagcagcagaccatcatcctggatgacgagctgatccagtggaagcggcggcagcagctggccgggaacggcgggccccccgagggcagcctggacgtgctacagtcctggtgtgagaagttggccgagatcatctggcagaaccggcagcagatccgcagggctgagcacctctgccagcagctgcccatccccggcccagtggaggagatgctggccgaggtcaacgccaccatcacggacattatctcagccctggtgaccagcacgttcatcattgagaagcagcctcctcaggtcctgaagacccagaccaagtttgcagccactgtgcgcctgctggtgggcgggaagctgaacgtgcacatgaaccccccccaggtgaaggccaccatcatcagtgagcagcaggccaagtctctgctcaagaacgagaacacccgcaatgattacagtggcgagatcttgaacaactgctgcgtcatggagtaccaccaagccacaggcacccttagtgcccacttcaggaatatgtccctgaaacgaattaagaggtcagaccgtcgtggggcagagtcggtgacagaagaaaaatttacaatcctgtttgaatcccagttcagtgttggtggaaatgagctggtttttcaagtcaagaccctgtccctgccagtggtggtgatcgttcatggcagccaggacaacaatgcgacggccactgttctctgggacaatgcttttgcagagcctggcagggtgccatttgccgtgcctgacaaagtgctgtggccacagctgtgtgaggcgctcaacatgaaattcaaggccgaagtgcagagcaaccggggcctgaccaaggagaacctcgtgttcctggcgcagaaactgttcaacaacagcagcagccacctggaggactacagtggcctgtctgtgtcctggtcccagttcaacagggagaatttaccaggacggaattacactttctggcaatggtttgacggtgtgatggaagtgttaaaaaaacatctcaagcctcattggaatgatggggccattttggggtttgtaaacaagcaacaggcccatgacctactcattaacaagccagatgggaccttcctcctgagattcagtgactcagaaattggcggcatcaccattgcttggaagtttgattctcaggaaagaatgttttggaatctgatgccttttaccaccagagacttctccattcggtccctagccgaccgcttgggagacttgaattaccttatctacgtgtttcctgatcggccaaaagatgaagtatactccaaatactacacaccagttccctgcgagtctgctactgctaaagctgttgatggatacgtgaagccacagatcaagcaagtggtccctgagtttgtgaacgcatctgcagatgccgggggcggcagcgccacgtacatggaccaggccccctccccagctgtgtgtccccaggctcactataacatgtacccacagaaccctgactcagtccttgacaccgatggggacttcgatctggaggacacaatggacgtagcgcggcgtgtggaggagctcctgggccggccaatggacagtcagtggatcccgcacgcacaatcgtgaccccgcgacctctccatcttcagcttcttcatcttcaccagaggaatcactcttgtggatgttttaattccatgaatcgcttctcttttgaaacaatactcataatgtgaagtgttaatactagttgtgaccttagtgtttctgtgcatggtggcaccagcgaagggagtgcgagtatgtgtttgtgtgtgtgtgtgtgtgtgtgtgtgtgtgcgtgtttgcacgttatggtgtttctccctctcactgtctgagagtttagttgtagcagaggggccacagacagaagctgtggtggtttttactttgtgcaaaaaggcagtgagtttcgtgaagcctggaagttggccatgtgtcttaagagtggctggactttgacatgtggctgtttgaataagagaaggacaaagggaggagaaagcacatgtgctccagtgagtcttcgtcactctgtctgccaagcaattgatatataaccgtgattgtctctgcttttcttctgaaatgtagataactgctttttgacaaagagagccttccctctcccccacccctgtgttcttgggtaggaatgggaaaaggggcaacctacaaagattgttggggcaagggaagtcacaagctttcggatgggcggtggcttttcacaaaacatttagctcatcttattctctctttgtcctctctcccctcctgcccgcccgcaccctggaattgccactcagttcctctgggtgtgcacatatgtttggagaaatagaggagagaaaagagggccacgtaactgagagcttacagtgccaatgccgtttgtgttctggccagagtggagtgcgcagccctgactcccaggcgctgagattgttgcctggttacccaggaagctgctgttccggctgcccagcctttctctgagccagcggatgcacagtccgtggccttcttcaggcttattgatgatgctttttgcaaatgttgaatcatggttctgtttctaagttggatcttttttgttttctccttgccaccctaatttgacatcaaaattctctcttgtgcattgggccctgggtcattcaaacccaggtcacctcattccccttctctgttcacacctaatgtcttgaagagtaggtagcagcagtgtgggctgaacctaggccagcttgcttagcgggtcaccctgctgtgaagtcctggcaggtgttggtaatgtgtggaaatgcagtcagcaagtttgctggggagtttgataaaagtataaaacaaaacaaaaaaagcctcggtataattttgttccacgacttcttctgtagctttacaccagaaggaaggaatgggctacagcaggtagtggaggaagaggggggtgagcaggtgtattaaaatagcttacgggtaaggcctaaaaggtcacccctcggccccctctccaaaagaagggcatgggcacccccaggagaggatggccccaaaaaccttatttttatacatgagagtaaataaacatattttttttacaaaaataacttctgaatttatcagtgttttgccgttaaaaatattcctctatagtaaattatttattggaagatgacttttttaaagctgccgtttgccttggcttggtttcatacactgatttatttttctatgccaggcagtagagtctctctgcctctgaggagcaggctacccgcatcccactcagcccctccctacccctcaagatttgatgaaaattccaaccatgaggatgggtgcatcggggaagggtgagaaggagagcctgcctgctcagggatccaggctcgtagagtcactccctgcccgtctcccagagatgcttcaccagcacctgcctctgagacctcgctctctgttccagcaaccctggttggggggtcagacttgatacactttcaggttgggagtggacccaccccagggcctgctgaggacagagcagccaggccgtcctggctcactttgcagttggcactgggttggggaggaagagagctgatgagtgtggcttccctgagctggggtttccctgcttgtccagttgtgagctgtcctcggtgttaccgaggctgtgcctagagagtggagatttttgatgaaaggtgtgctcgctctctgcgttctatcttctctctcctccttgttcctgcaaaccacaagataaaggtagtggtgtgtctcgaccccatcagcctctcacccactcccagacacacacaagtcctcaaaagtttcagctccgtgtgtgagatgtgcaggttttttctagggggtagggggagactaaaatcgaatataacttaaaatgaaagtatactttttataatttttctttttaaaacttggtgaaattatttcagatacatattttagtgtcaaggcagattagttatttagccaccaaaaaaaagtattgtgtacaatttggggcctcaaatttgactctgcctcaaaaaaaagaaatatatcctatgcagagttacagtcacaaagttgtgtattttatgttacaataaagccttcctctgaagggatggtattga

SEQ ID NO: 181616 - DNA, 559 bp, Homo sapiens
  Payload ID: 15770
  Gene Symbol: STAT5B
  Gene Name: signal transducer and activator of transcription 5B
  ENST ID: ENST00000415845
  CDS Start-End: 91-559
aaacaaagcagcatgtgcttgcggtgcggcgtcggctagggagccgagccgggaagacaccccaccgccgcagaaaggggattgtaaaccatggctgtgtggatacaagctcagcagctccaaggagaagcccttcatcagatgcaagcgttatatggccagcattttcccattgaggtgcggcattatttatcccagtggattgaaagccaagcatgggactcagtagatcttgataatccacaggagaacattaaggccacccagctcctggagggcctggtgcaggagctgcagaagaaggcagagcaccaggtgggggaagatgggtttttactgaagatcaagctggggcactatgccacacagctccagaacacgtatgaccgctgccccatggagctggtccgctgcatccgccatatattgtacaatgaacagaggttggtccgagaagccaacaatggtagctctccagctggaagccttgctgatgccatgtcccagaaacacctccagatcaaccagacgtttgaggagctgcgactggtcacgcagg

SEQ ID NO: 181617 - DNA, 4034 bp, Homo sapiens
  Payload ID: 15771
  Gene Symbol: STAT6
  Gene Name: signal transducer and activator of transcription 6, interleukin-4 induced
  Uniprot ID: P42226
  ENST ID: ENST00000300134
  CDS Start-End: 327-2870
tttctcttctctgtgtcgtcagagctccagggagggacctgggtagaaggagaagccggaaacagcgggctggggcagccactgcttacactgaagagggaggacgggagaggagtgtgtgtgtgtgtgtgtgtgtgtgtgtgtatgtatgtgtgtgctttatcttatttttctttttggtggtggtggtggaaggggggaggtgctagcagggccagccttgaactcgctggacagagctacagacctatggggcctggaagtgcccgctgagaaagggagaagacagcagaggggttgccgaggcaacctccaagtcccagatcatgtctctgtggggtctggtctccaagatgcccccagaaaaagtgcagcggctctatgtcgactttccccaacacctgcggcatcttctgggtgactggctggagagccagccctgggagttcctggtcggctccgacgccttctgctgcaacttggctagtgccctactttcagacactgtccagcaccttcaggcctcggtgggagagcagggggaggggagcaccatcttgcaacacatcagcacccttgagagcatatatcagagggaccccctgaagctggtggccactttcagacaaatacttcaaggagagaaaaaagctgttatggaacagttccgccacttgccaatgcctttccactggaagcaggaagaactcaagtttaagacaggcttgcggaggctgcagcaccgagtaggggagatccaccttctccgagaagccctgcagaagggggctgaggctggccaagtgtctctgcacagcttgatagaaactcctgctaatgggactgggccaagtgaggccctggccatgctactgcaggagaccactggagagctagaggcagccaaagccctagtgctgaagaggatccagatttggaaacggcagcagcagctggcagggaatggcgcaccgtttgaggagagcctggccccactccaggagaggtgtgaaagcctggtggacatttattcccagctacagcaggaggtaggggcggctggtggggagcttgagcccaagacccgggcatcgctgactggccggctggatgaagtcctgagaaccctcgtcaccagttgcttcctggtggagaagcagcccccccaggtactgaagactcagaccaagttccaggctggagttcgattcctgttgggcttgaggttcctgggggccccagccaagcctccgctggtcagggccgacatggtgacagagaagcaggcgcgggagctgagtgtgcctcagggtcctggggctggagcagaaagcactggagaaatcatcaacaacactgtgcccttggagaacagcattcctgggaactgctgctctgccctgttcaagaacctgcttctcaagaagatcaagcggtgtgagcggaagggcactgagtctgtcacagaggagaagtgcgctgtgctcttctctgccagcttcacacttggccccggcaaactccccatccagctccaggccctgtctctgcccctggtggtcatcgtccatggcaaccaagacaacaatgccaaagccactatcctgtgggacaatgccttctctgagatggaccgcgtgccctttgtggtggctgagcgggtgccctgggagaagatgtgtgaaactctgaacctgaagttcatggctgaggtggggaccaaccgggggctgctcccagagcacttcctcttcctggcccagaagatcttcaatgacaacagcctcagtatggaggccttccagcaccgttctgtgtcctggtcgcagttcaacaaggagatcctgctgggccgtggcttcaccttttggcagtggtttgatggtgtcctggacctcaccaaacgctgtctccggagctactggtctgaccggctgatcattggcttcatcagcaaacagtacgttactagccttcttctcaatgagcccgacggaacctttctcctccgcttcagcgactcagagattgggggcatcaccattgcccatgtcatccggggccaggatggctctccacagatagagaacatccagccattctctgccaaagacctgtccattcgctcactgggggaccgaatccgggatcttgctcagctcaaaaatctctatcccaagaagcccaaggatgaggctttccggagccactacaagcctgaacagatgggtaaggatggcaggggttatgtcccagctaccatcaagatgaccgtggaaagggaccaaccacttcctaccccagagctccagatgcctaccatggtgccttcttatgaccttggaatggcccctgattcctccatgagcatgcagcttggcccagatatggtgccccaggtgtacccaccacactctcactccatccccccgtatcaaggcctctccccagaagaatcagtcaacgtgttgtcagccttccaggagcctcacctgcagatgccccccagcctgggccagatgagcctgccctttgaccagcctcacccccagggcctgctgccgtgccagcctcaggagcatgctgtgtccagccctgaccccctgctctgctcagatgtgaccatggtggaagacagctgcctgagccagccagtgacagcgtttcctcagggcacttggattggtgaagacatattccctcctctgctgcctcccactgaacaggacctcactaagcttctcctggaggggcaaggggagtcggggggagggtccttgggggcacagcccctcctgcagccctcccactatgggcaatctgggatctcaatgtcccacatggacctaagggccaaccccagttggtgatcccagctggagggagaacccaaagagacagctcttctactacccccacagacctgctctggacacttgctcatgccctgccaagcagcagatggggagggtgccctcctatccccacctactcctgggtcaggaggaaaagactaacaggagaatgcacagtgggtggagccaatccactccttcctttctatcattcccctgcccacctccttccagcactgactggaagggaagttcaggctctgagacacaccccaacatgcctgcacctgcagcgcgcacacgcacgcacacacacatacagagctctctgagggtgatggggctgagcaggaggggggctgggtaagagcacaggttagggcatggaaggcttctccgcccattctgacccagggcctaggacggataggcaggaacatacagacacatttacactagaggccagggatagaggatattgggtctcagccctaggggaatgggaagcagctcaagggaccctgggtgggagcataggaggggtctggacatgtggttactagtacaggttttgccctgattaaaaaatctcccaaagccccaaattcctgttagccaggtggaggcttctgatacgtgtatgagactatgcaaaagtacaagggctgagattcttcgtgtatagctgtgtgaacgtgtatgtacctaggatatgttaaatgtatagctggcaccttagttgcatgaccacatagaacatgtgtctatctgcttttgcctacgtgacaacacaaatttgggagggtgagacactgcacagaagacagcagcaagtgtgctggcctctctgacatatgctaacccccaaatactctgaatttggagtctgactgtgcccaagtgggtccaagtggctgtgacatctacgtatggctccacacctccaatgctgcctgggagccagggtgagagtctgggtccaggcctggccatgtggccctccagtgtatgagagggccctgcctgctgcatcttttctgttgccccatccaccgccagcttcccttcactcccctatcccattctccctctcaaggcaggggtcatagatcctaagccataaaataaattttattccaaaataacaaaataaataatctactgtacacaatctgaaaa

SEQ ID NO: 181618 - DNA, 3037 bp, Homo sapiens
  Payload ID: 15771
  Gene Symbol: STAT6
  Gene Name: signal transducer and activator of transcription 6, interleukin-4 induced
  Uniprot ID: P42226
  ENST ID: ENST00000454075
  CDS Start-End: 287-2830
aaacagcgggctggggcagccactgcttacactgaagagggaggacgggagaggagtgtgtgtgtgtgtgtgtgtgtgtgtgtgtatgtatgtgtgtgctttatcttatttttctttttggtggtggtggtggaaggggggaggtgctagcagggccagccttgaactcgctggacagagctacagacctatggggcctggaagtgcccgctgagaaagggagaagacagcagaggggttgccgaggtgaggggttgcctccgaggcaacctccaagtcccagatcatgtctctgtggggtctggtctccaagatgcccccagaaaaagtgcagcggctctatgtcgactttccccaacacctgcggcatcttctgggtgactggctggagagccagccctgggagttcctggtcggctccgacgccttctgctgcaacttggctagtgccctactttcagacactgtccagcaccttcaggcctcggtgggagagcagggggaggggagcaccatcttgcaacacatcagcacccttgagagcatatatcagagggaccccctgaagctggtggccactttcagacaaatacttcaaggagagaaaaaagctgttatggaacagttccgccacttgccaatgcctttccactggaagcaggaagaactcaagtttaagacaggcttgcggaggctgcagcaccgagtaggggagatccaccttctccgagaagccctgcagaagggggctgaggctggccaagtgtctctgcacagcttgatagaaactcctgctaatgggactgggccaagtgaggccctggccatgctactgcaggagaccactggagagctagaggcagccaaagccctagtgctgaagaggatccagatttggaaacggcagcagcagctggcagggaatggcgcaccgtttgaggagagcctggccccactccaggagaggtgtgaaagcctggtggacatttattcccagctacagcaggaggtaggggcggctggtggggagcttgagcccaagacccgggcatcgctgactggccggctggatgaagtcctgagaaccctcgtcaccagttgcttcctggtggagaagcagcccccccaggtactgaagactcagaccaagttccaggctggagttcgattcctgttgggcttgaggttcctgggggccccagccaagcctccgctggtcagggccgacatggtgacagagaagcaggcgcgggagctgagtgtgcctcagggtcctggggctggagcagaaagcactggagaaatcatcaacaacactgtgcccttggagaacagcattcctgggaactgctgctctgccctgttcaagaacctgcttctcaagaagatcaagcggtgtgagcggaagggcactgagtctgtcacagaggagaagtgcgctgtgctcttctctgccagcttcacacttggccccggcaaactccccatccagctccaggccctgtctctgcccctggtggtcatcgtccatggcaaccaagacaacaatgccaaagccactatcctgtgggacaatgccttctctgagatggaccgcgtgccctttgtggtggctgagcgggtgccctgggagaagatgtgtgaaactctgaacctgaagttcatggctgaggtggggaccaaccgggggctgctcccagagcacttcctcttcctggcccagaagatcttcaatgacaacagcctcagtatggaggccttccagcaccgttctgtgtcctggtcgcagttcaacaaggagatcctgctgggccgtggcttcaccttttggcagtggtttgatggtgtcctggacctcaccaaacgctgtctccggagctactggtctgaccggctgatcattggcttcatcagcaaacagtacgttactagccttcttctcaatgagcccgacggaacctttctcctccgcttcagcgactcagagattgggggcatcaccattgcccatgtcatccggggccaggatggctctccacagatagagaacatccagccattctctgccaaagacctgtccattcgctcactgggggaccgaatccgggatcttgctcagctcaaaaatctctatcccaagaagcccaaggatgaggctttccggagccactacaagcctgaacagatgggtaaggatggcaggggttatgtcccagctaccatcaagatgaccgtggaaagggaccaaccacttcctaccccagagctccagatgcctaccatggtgccttcttatgaccttggaatggcccctgattcctccatgagcatgcagcttggcccagatatggtgccccaggtgtacccaccacactctcactccatccccccgtatcaaggcctctccccagaagaatcagtcaacgtgttgtcagccttccaggagcctcacctgcagatgccccccagcctgggccagatgagcctgccctttgaccagcctcacccccagggcctgctgccgtgccagcctcaggagcatgctgtgtccagccctgaccccctgctctgctcagatgtgaccatggtggaagacagctgcctgagccagccagtgacagcgtttcctcagggcacttggattggtgaagacatattccctcctctgctgcctcccactgaacaggacctcactaagcttctcctggaggggcaaggggagtcggggggagggtccttgggggcacagcccctcctgcagccctcccactatgggcaatctgggatctcaatgtcccacatggacctaagggccaaccccagttggtgatcccagctggagggagaacccaaagagacagctcttctactacccccacagacctgctctggacacttgctcatgccctgccaagcagcagatggggagggtgccctcctatccccacctactcctgggtcaggaggaaaagactaacaggagaatgcacagtgggtggagccaatccactccttcctttctatcattcccctgccc

SEQ ID NO: 181619 - DNA, 3119 bp, Homo sapiens
  Payload ID: 15771
  Gene Symbol: STAT6
  Gene Name: signal transducer and activator of transcription 6, interleukin-4 induced
  Uniprot ID: P42226
  ENST ID: ENST00000543873
  CDS Start-End: 252-2795
cctgtcctggtcaagccaatcgacccagccttgttatgggttggggtggggagaaatgtgtcctcctgatggctggggaagaagaggggttggatatttctagccagggccatgccaggaggctggtcactctgcaaggggatgcagaggaaagcggtgcccactcactccagaggacctttctctcttgggctagagaaaggcctattggaggaacctgagcaggaggggcaacctccaagtcccagatcatgtctctgtggggtctggtctccaagatgcccccagaaaaagtgcagcggctctatgtcgactttccccaacacctgcggcatcttctgggtgactggctggagagccagccctgggagttcctggtcggctccgacgccttctgctgcaacttggctagtgccctactttcagacactgtccagcaccttcaggcctcggtgggagagcagggggaggggagcaccatcttgcaacacatcagcacccttgagagcatatatcagagggaccccctgaagctggtggccactttcagacaaatacttcaaggagagaaaaaagctgttatggaacagttccgccacttgccaatgcctttccactggaagcaggaagaactcaagtttaagacaggcttgcggaggctgcagcaccgagtaggggagatccaccttctccgagaagccctgcagaagggggctgaggctggccaagtgtctctgcacagcttgatagaaactcctgctaatgggactgggccaagtgaggccctggccatgctactgcaggagaccactggagagctagaggcagccaaagccctagtgctgaagaggatccagatttggaaacggcagcagcagctggcagggaatggcgcaccgtttgaggagagcctggccccactccaggagaggtgtgaaagcctggtggacatttattcccagctacagcaggaggtaggggcggctggtggggagcttgagcccaagacccgggcatcgctgactggccggctggatgaagtcctgagaaccctcgtcaccagttgcttcctggtggagaagcagcccccccaggtactgaagactcagaccaagttccaggctggagttcgattcctgttgggcttgaggttcctgggggccccagccaagcctccgctggtcagggccgacatggtgacagagaagcaggcgcgggagctgagtgtgcctcagggtcctggggctggagcagaaagcactggagaaatcatcaacaacactgtgcccttggagaacagcattcctgggaactgctgctctgccctgttcaagaacctgcttctcaagaagatcaagcggtgtgagcggaagggcactgagtctgtcacagaggagaagtgcgctgtgctcttctctgccagcttcacacttggccccggcaaactccccatccagctccaggccctgtctctgcccctggtggtcatcgtccatggcaaccaagacaacaatgccaaagccactatcctgtgggacaatgccttctctgagatggaccgcgtgccctttgtggtggctgagcgggtgccctgggagaagatgtgtgaaactctgaacctgaagttcatggctgaggtggggaccaaccgggggctgctcccagagcacttcctcttcctggcccagaagatcttcaatgacaacagcctcagtatggaggccttccagcaccgttctgtgtcctggtcgcagttcaacaaggagatcctgctgggccgtggcttcaccttttggcagtggtttgatggtgtcctggacctcaccaaacgctgtctccggagctactggtctgaccggctgatcattggcttcatcagcaaacagtacgttactagccttcttctcaatgagcccgacggaacctttctcctccgcttcagcgactcagagattgggggcatcaccattgcccatgtcatccggggccaggatggctctccacagatagagaacatccagccattctctgccaaagacctgtccattcgctcactgggggaccgaatccgggatcttgctcagctcaaaaatctctatcccaagaagcccaaggatgaggctttccggagccactacaagcctgaacagatgggtaaggatggcaggggttatgtcccagctaccatcaagatgaccgtggaaagggaccaaccacttcctaccccagagctccagatgcctaccatggtgccttcttatgaccttggaatggcccctgattcctccatgagcatgcagcttggcccagatatggtgccccaggtgtacccaccacactctcactccatccccccgtatcaaggcctctccccagaagaatcagtcaacgtgttgtcagccttccaggagcctcacctgcagatgccccccagcctgggccagatgagcctgccctttgaccagcctcacccccagggcctgctgccgtgccagcctcaggagcatgctgtgtccagccctgaccccctgctctgctcagatgtgaccatggtggaagacagctgcctgagccagccagtgacagcgtttcctcagggcacttggattggtgaagacatattccctcctctgctgcctcccactgaacaggacctcactaagcttctcctggaggggcaaggggagtcggggggagggtccttgggggcacagcccctcctgcagccctcccactatgggcaatctgggatctcaatgtcccacatggacctaagggccaaccccagttggtgatcccagctggagggagaacccaaagagacagctcttctactacccccacagacctgctctggacacttgctcatgccctgccaagcagcagatggggagggtgccctcctatccccacctactcctgggtcaggaggaaaagactaacaggagaatgcacagtgggtggagccaatccactccttcctttctatcattcccctgcccacctccttccagcactgactggaagggaagttcaggctctgagacacaccccaacatgcctgcacctgcagcgcgcacacgcacgcacacacacatacagagctctctgagggtgat

SEQ ID NO: 181620 - DNA, 2886 bp, Homo sapiens
  Payload ID: 15771
  Gene Symbol: STAT6
  Gene Name: signal transducer and activator of transcription 6, interleukin-4 induced
  Uniprot ID: P42226
  ENST ID: ENST00000537215
  CDS Start-End: 446-2659
gcagccactgcttacactgaagagggaggacgggagaggagtgtgtgtgtgtgtgtgtgtgtgtgtgtgtatgtatgtgtgtgctttatcttatttttctttttggtggtggtggtggaaggggggaggtgctagcagggccagccttgaactcgctggacagagctacagacctatggggcctggaagtgcccgctgagaaagggagaagacagcagaggggttgccgagggagttcctggtcggctccgacgccttctgctgcaacttggctagtgccctactttcagacactgtccagcaccttcaggcctcggtgggagagcagggggaggggagcaccatcttgcaacacatcagcacccttgagagcatatatcagagggaccccctgaagctggtggccactttcagacaaatacttcaaggagagaaaaaagctgttatggaacagttccgccacttgccaatgcctttccactggaagcaggaagaactcaagtttaagacaggcttgcggaggctgcagcaccgagtaggggagatccaccttctccgagaagccctgcagaagggggctgaggctggccaagtgtctctgcacagcttgatagaaactcctgctaatgggactgggccaagtgaggccctggccatgctactgcaggagaccactggagagctagaggcagccaaagccctagtgctgaagaggatccagatttggaaacggcagcagcagctggcagggaatggcgcaccgtttgaggagagcctggccccactccaggagaggtgtgaaagcctggtggacatttattcccagctacagcaggaggtaggggcggctggtggggagcttgagcccaagacccgggcatcgctgactggccggctggatgaagtcctgagaaccctcgtcaccagttgcttcctggtggagaagcagcccccccaggtactgaagactcagaccaagttccaggctggagttcgattcctgttgggcttgaggttcctgggggccccagccaagcctccgctggtcagggccgacatggtgacagagaagcaggcgcgggagctgagtgtgcctcagggtcctggggctggagcagaaagcactggagaaatcatcaacaacactgtgcccttggagaacagcattcctgggaactgctgctctgccctgttcaagaacctgcttctcaagaagatcaagcggtgtgagcggaagggcactgagtctgtcacagaggagaagtgcgctgtgctcttctctgccagcttcacacttggccccggcaaactccccatccagctccaggccctgtctctgcccctggtggtcatcgtccatggcaaccaagacaacaatgccaaagccactatcctgtgggacaatgccttctctgagatggaccgcgtgccctttgtggtggctgagcgggtgccctgggagaagatgtgtgaaactctgaacctgaagttcatggctgaggtggggaccaaccgggggctgctcccagagcacttcctcttcctggcccagaagatcttcaatgacaacagcctcagtatggaggccttccagcaccgttctgtgtcctggtcgcagttcaacaaggagatcctgctgggccgtggcttcaccttttggcagtggtttgatggtgtcctggacctcaccaaacgctgtctccggagctactggtctgaccggctgatcattggcttcatcagcaaacagtacgttactagccttcttctcaatgagcccgacggaacctttctcctccgcttcagcgactcagagattgggggcatcaccattgcccatgtcatccggggccaggatggctctccacagatagagaacatccagccattctctgccaaagacctgtccattcgctcactgggggaccgaatccgggatcttgctcagctcaaaaatctctatcccaagaagcccaaggatgaggctttccggagccactacaagcctgaacagatgggtaaggatggcaggggttatgtcccagctaccatcaagatgaccgtggaaagggaccaaccacttcctaccccagagctccagatgcctaccatggtgccttcttatgaccttggaatggcccctgattcctccatgagcatgcagcttggcccagatatggtgccccaggtgtacccaccacactctcactccatccccccgtatcaaggcctctccccagaagaatcagtcaacgtgttgtcagccttccaggagcctcacctgcagatgccccccagcctgggccagatgagcctgccctttgaccagcctcacccccagggcctgctgccgtgccagcctcaggagcatgctgtgtccagccctgaccccctgctctgctcagatgtgaccatggtggaagacagctgcctgagccagccagtgacagcgtttcctcagggcacttggattggtgaagacatattccctcctctgctgcctcccactgaacaggacctcactaagcttctcctggaggggcaaggggagtcggggggagggtccttgggggcacagcccctcctgcagccctcccactatgggcaatctgggatctcaatgtcccacatggacctaagggccaaccccagttggtgatcccagctggagggagaacccaaagagacagctcttctactacccccacagacctgctctggacacttgctcatgccctgccaagcagcagatggggagggtgccctcctatccccacctactcctgggtcaggaggaaaagactaacaggagaatgcacagtgggtggagccaatccactccttcctttctatcattcccctgcccacctccttccagcactgact

SEQ ID NO: 181621 - DNA, 2879 bp, Homo sapiens
  Payload ID: 15771
  Gene Symbol: STAT6
  Gene Name: signal transducer and activator of transcription 6, interleukin-4 induced
  Uniprot ID: P42226
  ENST ID: ENST00000538913
  CDS Start-End: 294-2507
acactgaagagggaggacgggagaggagtgtgtgtgtgtgtgtgtgtgtgtgtgtgtatgtatgtgtgtgctttatcttatttttctttttggtggtggtggtggaaggggggaggtgctagcagggccagccttgaactcgctggacagagctacagacctatggggcctggaagtgcccgctgagaaagggagaagacagcagaggggttgccgagagcatatatcagagggaccccctgaagctggtggccactttcagacaaatacttcaaggagagaaaaaagctgttatggaacagttccgccacttgccaatgcctttccactggaagcaggaagaactcaagtttaagacaggcttgcggaggctgcagcaccgagtaggggagatccaccttctccgagaagccctgcagaagggggctgaggctggccaagtgtctctgcacagcttgatagaaactcctgctaatgggactgggccaagtgaggccctggccatgctactgcaggagaccactggagagctagaggcagccaaagccctagtgctgaagaggatccagatttggaaacggcagcagcagctggcagggaatggcgcaccgtttgaggagagcctggccccactccaggagaggtgtgaaagcctggtggacatttattcccagctacagcaggaggtaggggcggctggtggggagcttgagcccaagacccgggcatcgctgactggccggctggatgaagtcctgagaaccctcgtcaccagttgcttcctggtggagaagcagcccccccaggtactgaagactcagaccaagttccaggctggagttcgattcctgttgggcttgaggttcctgggggccccagccaagcctccgctggtcagggccgacatggtgacagagaagcaggcgcgggagctgagtgtgcctcagggtcctggggctggagcagaaagcactggagaaatcatcaacaacactgtgcccttggagaacagcattcctgggaactgctgctctgccctgttcaagaacctgcttctcaagaagatcaagcggtgtgagcggaagggcactgagtctgtcacagaggagaagtgcgctgtgctcttctctgccagcttcacacttggccccggcaaactccccatccagctccaggccctgtctctgcccctggtggtcatcgtccatggcaaccaagacaacaatgccaaagccactatcctgtgggacaatgccttctctgagatggaccgcgtgccctttgtggtggctgagcgggtgccctgggagaagatgtgtgaaactctgaacctgaagttcatggctgaggtggggaccaaccgggggctgctcccagagcacttcctcttcctggcccagaagatcttcaatgacaacagcctcagtatggaggccttccagcaccgttctgtgtcctggtcgcagttcaacaaggagatcctgctgggccgtggcttcaccttttggcagtggtttgatggtgtcctggacctcaccaaacgctgtctccggagctactggtctgaccggctgatcattggcttcatcagcaaacagtacgttactagccttcttctcaatgagcccgacggaacctttctcctccgcttcagcgactcagagattgggggcatcaccattgcccatgtcatccggggccaggatggctctccacagatagagaacatccagccattctctgccaaagacctgtccattcgctcactgggggaccgaatccgggatcttgctcagctcaaaaatctctatcccaagaagcccaaggatgaggctttccggagccactacaagcctgaacagatgggtaaggatggcaggggttatgtcccagctaccatcaagatgaccgtggaaagggaccaaccacttcctaccccagagctccagatgcctaccatggtgccttcttatgaccttggaatggcccctgattcctccatgagcatgcagcttggcccagatatggtgccccaggtgtacccaccacactctcactccatccccccgtatcaaggcctctccccagaagaatcagtcaacgtgttgtcagccttccaggagcctcacctgcagatgccccccagcctgggccagatgagcctgccctttgaccagcctcacccccagggcctgctgccgtgccagcctcaggagcatgctgtgtccagccctgaccccctgctctgctcagatgtgaccatggtggaagacagctgcctgagccagccagtgacagcgtttcctcagggcacttggattggtgaagacatattccctcctctgctgcctcccactgaacaggacctcactaagcttctcctggaggggcaaggggagtcggggggagggtccttgggggcacagcccctcctgcagccctcccactatgggcaatctgggatctcaatgtcccacatggacctaagggccaaccccagttggtgatcccagctggagggagaacccaaagagacagctcttctactacccccacagacctgctctggacacttgctcatgccctgccaagcagcagatggggagggtgccctcctatccccacctactcctgggtcaggaggaaaagactaacaggagaatgcacagtgggtggagccaatccactccttcctttctatcattcccctgcccacctccttccagcactgactggaagggaagttcaggctctgagacacaccccaacatgcctgcacctgcagcgcgcacacgcacgcacacacacatacagagctctctgagggtgatggggctgagcaggaggggggctgggtaagagcacaggttagggcatgg

SEQ ID NO: 181622 - DNA, 465 bp, Homo sapiens
  Payload ID: 15771
  Gene Symbol: STAT6
  Gene Name: signal transducer and activator of transcription 6, interleukin-4 induced
  ENST ID: ENST00000555318
  CDS Start-End: 1-465
attgcccatgtcatccggggccaggatggctctccacagatagagaacatccagccattctctgccaaagacctgtccattcgctcactgggggaccgaatccgggatcttgctcagctcaaaaatctctatcccaagaagcccaaggatgaggctttccggagccactacaagcctgaacagatgggtaaggatggcaggggttatgtcccagctaccatcaagatgaccgtggaaagggaccaaccacttcctaccccagagctccagatgcctaccatggtgccttcttatgaccttggaatggcccctgattcctccatgagcatgcagcttggcccagatatggtgtgtacccaccacactctcactccatccccccgtatcaaggcctctccccagaagaatcagtcaacgtgttgtcagccttccaggagcctcacctgcagatgccccccagcctgg

SEQ ID NO: 181623 - DNA, 516 bp, Homo sapiens
  Payload ID: 15771
  Gene Symbol: STAT6
  Gene Name: signal transducer and activator of transcription 6, interleukin-4 induced
  ENST ID: ENST00000555104
  CDS Start-End: 235-351
aatcgacccagccttgttatgggttggggtggggagaaatgtgtcctcctgatggctggggaagaagaggggttggatatttctagccagggccatgccaggaggctggtcactctgcaaggggatgcagaggaaagcggtgcccactcactccagaggacctttctctcttgggctagagaaaggcctattggaggaacctgagcaggaggggcaacctccaagtcccagatcatgtctctgtggggtctggtctccaagatgcccccagaaaaagtgcagcggctctatgtcgactttccccaacacctgcggcatcttctgggtgactggctggagagccagccctgagcatatatcagagggaccccctgaagctggtggccactttcagacaaatacttcaaggagagaaaaaagctgttatggaacagttccgccacttgccaatgcctttccactggaagcaggaagaactcaagtttaagacaggcttgcggaggctgcagcaccgag

SEQ ID NO: 181624 - DNA, 565 bp, Homo sapiens
  Payload ID: 15771
  Gene Symbol: STAT6
  Gene Name: signal transducer and activator of transcription 6, interleukin-4 induced
  ENST ID: ENST00000554663
  CDS Start-End: 252-565
cctgtcctggtcaagccaatcgacccagccttgttatgggttggggtggggagaaatgtgtcctcctgatggctggggaagaagaggggttggatatttctagccagggccatgccaggaggctggtcactctgcaaggggatgcagaggaaagcggtgcccactcactccagaggacctttctctcttgggctagagaaaggcctattggaggaacctgagcaggaggggcaacctccaagtcccagatcatgtctctgtggggtctggtctccaagatgcccccagaaaaagtgcagcggctctatgtcgactttccccaacacctgcggcatcttctgggtgactggctggagagccagccctgggagttcctggtcggctccgacgccttctgctgcaacttggctagtgccctactttcagacactgtccagcaccttcaggcctcggtgggagagcagggggaggggagcaccatcttgcaacacatcagcacccttgagagcatatatcagagggaccccctgaagctggtggccactttcagacaaatacttcaagg

SEQ ID NO: 181625 - DNA, 670 bp, Homo sapiens
  Payload ID: 15771
  Gene Symbol: STAT6
  Gene Name: signal transducer and activator of transcription 6, interleukin-4 induced
  ENST ID: ENST00000553275
  CDS Start-End: 477-670
agagctccagggagggacctgggtagaaggagaagccggaaacagcgggctggggcagccactgcttacactgaagagggaggacgggagaggagtgtgtgtgtgtgtgtgtgtgtgtgtgtgtatgtatgtgtgtgctttatcttatttttctttttggtggtggtggtggaaggggggaggtgctagcagggccagccttgaactcgctggacagagctacagacctatggggcctggaagtgcccgctgagaaagggagaagacagcagaggggttgccgagagaaaggcctattggaggaacctgagcaggaggggtaaggattctgccttgaggagaaaagagctggggtaagtgggcactggaggaaagaggggcatgaaggtcttggagcagaaacgtccagagaagggacctctccattttccatccctctgagaggcctgggagaggcaacctccaagtcccagatcatgtctctgtggggtctggtctccaagatgcccccagaaaaagtgcagcggctctatgtcgactttccccaacacctgcggcatcttctgggtgactggctggagagccagccctgggagttcctggtcggctccgacgccttctgctgcaacttggctagtgccctactttcagacactgtccagcaccttca

SEQ ID NO: 181626 - DNA, 644 bp, Homo sapiens
  Payload ID: 15771
  Gene Symbol: STAT6
  Gene Name: signal transducer and activator of transcription 6, interleukin-4 induced
  ENST ID: ENST00000557635
  CDS Start-End: 422-644
cttccccttcaaggggctgaagacaaaaggtgcccctgtcctggtcaagccaatcgacccagccttgttatgggttggggtggggagaaatgtgtcctcctgatggctggggaagaagaggggttggatatttctagccagggccatgccaggaggctggtcactctgcaaggggatgcagaggaaagcggtgcccactcactccagaggacctttctctcttgggctagagaaaggcctattggaggaacctgagcaggaggggtaaggattctgccttgaggagaaaagagctggggtaagtgggcactggaggaaagaggggcatgaaggtcttggagcagaaacgtccagagaagggacctctccattttccatccctctgagaggcctgggagaggcaacctccaagtcccagatcatgtctctgtggggtctggtctccaagatgcccccagaaaaagtgcagcggctctatgtcgactttccccaacacctgcggcatcttctgggtgactggctggagagccagccctgggagttcctggtcggctccgacgccttctgctgcaacttggctagtgccctactttcagacactgtccagcaccttcaggcctcggtgggagagcagggggagggga

SEQ ID NO: 181627 - DNA, 623 bp, Homo sapiens
  Payload ID: 15771
  Gene Symbol: STAT6
  Gene Name: signal transducer and activator of transcription 6, interleukin-4 induced
  ENST ID: ENST00000555375
  CDS Start-End: 160-623
aaaaaaaaaaaaaaaaaaaaaaaaaggaaagaaagaaagaaaagaaacccctgtcctcaccctcttcaggccctgtctctgcccctggtggtcatcgtccatggcaaccaagacaacaatgccaaagccactatcctgtgggacaatgccttctctgagatggaccgcgtgccctttgtggtggctgagcgggtgccctgggagaagatgtgtgaaactctgaacctgaagttcatggctgaggtggggaccaaccgggggctgctcccagagcacttcctcttcctggcccagaagatcttcaatgacaacagcctcagtatggaggccttccagcaccgttctgtgtcctggtcgcagttcaacaaggagatcctgctgggccgtggcttcaccttttggcagtggtttgatggtgtcctggacctcaccaaacgctgtctccggagctactggtctgaccggctgatcattggcttcatcagcaaacagtacgttactagccttcttctcaatgagcccgacggaacctttctcctccgcttcagcgactcagagattgggggcatcaccattgcccatgtcatccggggccaggatggctctccacagatagagaacat

SEQ ID NO: 181628 - DNA, 603 bp, Homo sapiens
  Payload ID: 15771
  Gene Symbol: STAT6
  Gene Name: signal transducer and activator of transcription 6, interleukin-4 induced
  ENST ID: ENST00000553499
  CDS Start-End: 141-603
ggttctctatcgctcatacccagcactaccaagtcaggggccttcctgcagtaccattcagctgcacccagatgccccaagagcaatgagcccacacgcagagctggaggacctgaaaggcaacctccaagtcccagatcatgtctctgtggggtctggtctccaagatgcccccagaaaaagtgcagcggctctatgtcgactttccccaacacctgcggcatcttctgggtgactggctggagagccagccctgggagttcctggtcggctccgacgccttctgctgcaacttggctagtgccctactttcagacactgtccagcaccttcaggcctcggtgggagagcagggggaggggagcaccatcttgcaacacatcagcacccttgagagcatatatcagagggaccccctgaagctggtggccactttcagacaaatacttcaaggagagaaaaaagctgttatggaacagttccgccacttgccaatgcctttccactggaagcaggaagaactcaagtttaagacaggcttgcggaggctgcagcaccgagtaggggagatccaccttctccgagaagccctgcagaaggggg

SEQ ID NO: 181629 - DNA, 644 bp, Homo sapiens
  Payload ID: 15771
  Gene Symbol: STAT6
  Gene Name: signal transducer and activator of transcription 6, interleukin-4 induced
  ENST ID: ENST00000554825
  CDS Start-End: 336-644
aaacagcgggctggggcagccactgcttacactgaagagggaggacgggagaggagtgtgtgtgtgtgtgtgtgtgtgtgtgtgtatgtatgtgtgtgctttatcttatttttctttttggtggtggtggtggaaggggggaggtgctagcagggccagccttgaactcgctggacagagctacagacctatggggcctggaagtgcccgctgagaaagggagaagacagcagaggggttgccgagagaaaggcctattggaggaacctgagcaggaggggtaaggattctgccttgaggagaaaagagctggggcaacctccaagtcccagatcatgtctctgtggggtctggtctccaagatgcccccagaaaaagtgcagcggctctatgtcgactttccccaacacctgcggcatcttctgggtgactggctggagagccagccctgggagttcctggtcggctccgacgccttctgctgcaacttggctagtgccctactttcagacactgtccagcaccttcaggcctcggtgggagagcagggggaggggagcaccatcttgcaacacatcagcacccttgagagcatatatcagagggaccccctgaagctggtggccactttcagacaaatactt

SEQ ID NO: 181630 - DNA, 868 bp, Homo sapiens
  Payload ID: 15771
  Gene Symbol: STAT6
  Gene Name: signal transducer and activator of transcription 6, interleukin-4 induced
  ENST ID: ENST00000553533
  CDS Start-End: 1-868
gttcctgggggccccagccaagcctccgctggtcagggccgacatggtgacagagaagcaggcgcgggagctgagtgtgcctcagggtcctggggctggagcagaaagcactggagaaatcatcaacaacactgtgcccttggagaacagcattcctgggaactgctgctctgccctgttcaagaacctgcttctcaagaagatcaagcggtgtgagcggaagggcactgagtctgtcacagaggagaagtgcgctgtgctcttctctgccagcttcacacttggccccggcaaactccccatccagctccaggccctgtctctgcccctggtggtcatcgtccatggcaaccaagacaacaatgccaaagccactatcctgtgggacaatgccttctctgagatggaccgcgtgccctttgtggtggctgagcgggtgccctgggagaagatgtgtgaaactctgaacctgaagttcatggctgaggtggggaccaaccgggggctgctcccagagcacttcctcttcctggcccagaagatcttcaatgacaacagcctcagtatggaggccttccagcaccgttctgtgtcctggtcgcagttcaacaagatgaggaatctgatgctcagagggttatgtagtttgttcaagttcccaaagcaggagatcctgctgggccgtggcttcaccttttggcagtggtttgatggtgtcctggacctcaccaaacgctgtctccggagctactggtctgaccggctgatcattggcttcatcagcaaacagtacgttactagccttcttctcaatgagcccgacggaacctttctcctccgcttcagcgactcagagattgggggcatc

SEQ ID NO: 181631 - DNA, 2924 bp, Homo sapiens
  Payload ID: 15771
  Gene Symbol: STAT6
  Gene Name: signal transducer and activator of transcription 6, interleukin-4 induced
  Uniprot ID: P42226
  ENST ID: ENST00000556155
  CDS Start-End: 150-2693
gtatgcaggagtgggggctggggagagggtgcccccaggggtccaagggggacgcggaatctcactcaccgtcgatagccgccgcgaccagagctgagagcaggggcagcagcaggagcaacggcggggcaacctccaagtcccagatcatgtctctgtggggtctggtctccaagatgcccccagaaaaagtgcagcggctctatgtcgactttccccaacacctgcggcatcttctgggtgactggctggagagccagccctgggagttcctggtcggctccgacgccttctgctgcaacttggctagtgccctactttcagacactgtccagcaccttcaggcctcggtgggagagcagggggaggggagcaccatcttgcaacacatcagcacccttgagagcatatatcagagggaccccctgaagctggtggccactttcagacaaatacttcaaggagagaaaaaagctgttatggaacagttccgccacttgccaatgcctttccactggaagcaggaagaactcaagtttaagacaggcttgcggaggctgcagcaccgagtaggggagatccaccttctccgagaagccctgcagaagggggctgaggctggccaagtgtctctgcacagcttgatagaaactcctgctaatgggactgggccaagtgaggccctggccatgctactgcaggagaccactggagagctagaggcagccaaagccctagtgctgaagaggatccagatttggaaacggcagcagcagctggcagggaatggcgcaccgtttgaggagagcctggccccactccaggagaggtgtgaaagcctggtggacatttattcccagctacagcaggaggtaggggcggctggtggggagcttgagcccaagacccgggcatcgctgactggccggctggatgaagtcctgagaaccctcgtcaccagttgcttcctggtggagaagcagcccccccaggtactgaagactcagaccaagttccaggctggagttcgattcctgttgggcttgaggttcctgggggccccagccaagcctccgctggtcagggccgacatggtgacagagaagcaggcgcgggagctgagtgtgcctcagggtcctggggctggagcagaaagcactggagaaatcatcaacaacactgtgcccttggagaacagcattcctgggaactgctgctctgccctgttcaagaacctgcttctcaagaagatcaagcggtgtgagcggaagggcactgagtctgtcacagaggagaagtgcgctgtgctcttctctgccagcttcacacttggccccggcaaactccccatccagctccaggccctgtctctgcccctggtggtcatcgtccatggcaaccaagacaacaatgccaaagccactatcctgtgggacaatgccttctctgagatggaccgcgtgccctttgtggtggctgagcgggtgccctgggagaagatgtgtgaaactctgaacctgaagttcatggctgaggtggggaccaaccgggggctgctcccagagcacttcctcttcctggcccagaagatcttcaatgacaacagcctcagtatggaggccttccagcaccgttctgtgtcctggtcgcagttcaacaaggagatcctgctgggccgtggcttcaccttttggcagtggtttgatggtgtcctggacctcaccaaacgctgtctccggagctactggtctgaccggctgatcattggcttcatcagcaaacagtacgttactagccttcttctcaatgagcccgacggaacctttctcctccgcttcagcgactcagagattgggggcatcaccattgcccatgtcatccggggccaggatggctctccacagatagagaacatccagccattctctgccaaagacctgtccattcgctcactgggggaccgaatccgggatcttgctcagctcaaaaatctctatcccaagaagcccaaggatgaggctttccggagccactacaagcctgaacagatgggtaaggatggcaggggttatgtcccagctaccatcaagatgaccgtggaaagggaccaaccacttcctaccccagagctccagatgcctaccatggtgccttcttatgaccttggaatggcccctgattcctccatgagcatgcagcttggcccagatatggtgccccaggtgtacccaccacactctcactccatccccccgtatcaaggcctctccccagaagaatcagtcaacgtgttgtcagccttccaggagcctcacctgcagatgccccccagcctgggccagatgagcctgccctttgaccagcctcacccccagggcctgctgccgtgccagcctcaggagcatgctgtgtccagccctgaccccctgctctgctcagatgtgaccatggtggaagacagctgcctgagccagccagtgacagcgtttcctcagggcacttggattggtgaagacatattccctcctctgctgcctcccactgaacaggacctcactaagcttctcctggaggggcaaggggagtcggggggagggtccttgggggcacagcccctcctgcagccctcccactatgggcaatctgggatctcaatgtcccacatggacctaagggccaaccccagttggtgatcccagctggagggagaacccaaagagacagctcttctactacccccacagacctgctctggacacttgctcatgccctgccaagcagcagatggggagggtgccctcctatccccacctactcctgggtcaggaggaaaagactaacaggagaatgcacagtgggtggagccaatccactccttcctttctatcattcccctgcccacctccttccagcactgactggaa

SEQ ID NO: 181632 - DNA, 2777 bp, Homo sapiens
  Payload ID: 15771
  Gene Symbol: STAT6
  Gene Name: signal transducer and activator of transcription 6, interleukin-4 induced
  ENST ID: ENST00000554764
  CDS Start-End: 247-363
actgcttacactgaagagggaggacgggagaggagtgtgtgtgtgtgtgtgtgtgtgtgtgtgtatgtatgtgtgtgctttatcttatttttctttttggtggtggtggtggaaggggggaggtgctagcagggccagccttgaactcgctggacagagctacagacctatggggcctggaagtgcccgctgagaaagggagaagacagcagaggggttgccgaggcaacctccaagtcccagatcatgtctctgtggggtctggtctccaagatgcccccagaaaaagtgcagcggctctatgtcgactttccccaacacctgcggcatcttctgggtgactggctggagagccagccctgagcatatatcagagggaccccctgaagctggtggccactttcagacaaatacttcaaggagagaaaaaagctgttatggaacagttccgccacttgccaatgcctttccactggaagcaggaagaactcaagtttaagacaggcttgcggaggctgcagcaccgagtaggggagatccaccttctccgagaagccctgcagaagggggctgaggctggccaagtgtctctgcacagcttgatagaaactcctgctaatgggactgggccaagtgaggccctggccatgctactgcaggagaccactggagagctagaggcagccaaagccctagtgctgaagaggatccagatttggaaacggcagcagcagctggcagggaatggcgcaccgtttgaggagagcctggccccactccaggagaggtgtgaaagcctggtggacatttattcccagctacagcaggaggtaggggcggctggtggggagcttgagcccaagacccgggcatcgctgactggccggctggatgaagtcctgagaaccctcgtcaccagttgcttcctggtggagaagcagcccccccaggtactgaagactcagaccaagttccaggctggagttcgattcctgttgggcttgaggttcctgggggccccagccaagcctccgctggtcagggccgacatggtgacagagaagcaggcgcgggagctgagtgtgcctcagggtcctggggctggagcagaaagcactggagaaatcatcaacaacactgtgcccttggagaacagcattcctgggaactgctgctctgccctgttcaagaacctgcttctcaagaagatcaagcggtgtgagcggaagggcactgagtctgtcacagaggagaagtgcgctgtgctcttctctgccagcttcacacttggccccggcaaactccccatccagctccaggccctgtctctgcccctggtggtcatcgtccatggcaaccaagacaacaatgccaaagccactatcctgtgggacaatgccttctctgagatggaccgcgtgccctttgtggtggctgagcgggtgccctgggagaagatgtgtgaaactctgaacctgaagttcatggctgaggtggggaccaaccgggggctgctcccagagcacttcctcttcctggcccagaagatcttcaatgacaacagcctcagtatggaggccttccagcaccgttctgtgtcctggtcgcagttcaacaaggagatcctgctgggccgtggcttcaccttttggcagtggtttgatggtgtcctggacctcaccaaacgctgtctccggagctactggtctgaccggctgatcattggcttcatcagcaaacagtacgttactagccttcttctcaatgagcccgacggaacctttctcctccgcttcagcgactcagagattgggggcatcaccattgcccatgtcatccggggccaggatggctctccacagatagagaacatccagccattctctgccaaagacctgtccattcgctcactgggggaccgaatccgggatcttgctcagctcaaaaatctctatcccaagaagcccaaggatgaggctttccggagccactacaagcctgaacagatgggtaaggatggcaggggttatgtcccagctaccatcaagatgaccgtggaaagggaccaaccacttcctaccccagagctccagatgcctaccatggtgccttcttatgaccttggaatggcccctgattcctccatgagcatgcagcttggcccagatatggtgccccaggtgtacccaccacactctcactccatccccccgtatcaaggcctctccccagaagaatcagtcaacgtgttgtcagccttccaggagcctcacctgcagatgccccccagcctgggccagatgagcctgccctttgaccagcctcacccccagggcctgctgccgtgccagcctcaggagcatgctgtgtccagccctgaccccctgctctgctcagatgtgaccatggtggaagacagctgcctgagccagccagtgacagcgtttcctcagggcacttggattggtgaagacatattccctcctctgctgcctcccactgaacaggacctcactaagcttctcctggaggggcaaggggagtcggggggagggtccttgggggcacagcccctcctgcagccctcccactatgggcaatctgggatctcaatgtcccacatggacctaagggccaaccccagttggtgatcccagctggagggagaacccaaagagacagctcttctactacccccacagacctgctctggacacttgctcatgccctgccaagcagcagatggggagggtgccctcctatccccacctactcct

SEQ ID NO: 181633 - DNA, 553 bp, Homo sapiens
  Payload ID: 15771
  Gene Symbol: STAT6
  Gene Name: signal transducer and activator of transcription 6, interleukin-4 induced
  ENST ID: ENST00000553397
  CDS Start-End: 120-553
acagacctatggggcctggaagtgcccgctgagaaagggagaagacagcagaggggttgccgagagaaaggcctattggaggaacctgagcaggaggggcaacctccaagtcccagatcatgtctctgtggggtctggtctccaagatgcccccagaaaaagtgcagcggctctatgtcgactttccccaacacctgcggcatcttctgggtgactggctggagagccagccctgggagttcctggtcggctccgacgccttctgctgcaacttggctagtgccctactttcagacactgtccagcaccttcaggcctcggtgggagagcagggggaggggagcaccatcttgcaacacatcagcacccttgagagcatatatcagagggaccccctgaagctggtggccactttcagacaaatacttcaaggagagaaaaaagctgttatggaacagttccgccacttgccaatgcctttccactggaagcaggaagaactcaagtttaagacaggcttgcggaggctgcagcaccgagtaggggagatcca

SEQ ID NO: 181634 - DNA, 548 bp, Homo sapiens
  Payload ID: 15771
  Gene Symbol: STAT6
  Gene Name: signal transducer and activator of transcription 6, interleukin-4 induced
  ENST ID: ENST00000556259
  CDS Start-End: 125-548
gtgctagcagggccagccttgaactcgctggacagagctacagacctatggggcctggaagtgcccgctgagaaagggagaagacagcagaggggttgccgaggcaacctccaagtcccagatcatgtctctgtggggtctggtctccaagatgcccccagaaaaagtgcagcggctctatgtcgactttccccaacacctgcggcatcttctgggtgactggctggagagccagccctgggagttcctggtcggctccgacgccttctgctgcaacttggctagtgccctactttcagacactgtccagcaccttcaggcctcgagcatatatcagagggaccccctgaagctggtggccactttcagacaaatacttcaaggagagaaaaaagctgttatggaacagttccgccacttgccaatgcctttccactggaagcaggaagaactcaagtttaagacaggcttgcggaggctgcagcaccgagtaggggagatccaccttctccgagaagccctgcagaagggggctgaggctggccaag

SEQ ID NO: 181635 - DNA, 661 bp, Homo sapiens
  Payload ID: 15771
  Gene Symbol: STAT6
  Gene Name: signal transducer and activator of transcription 6, interleukin-4 induced
  ENST ID: ENST00000555849
  CDS Start-End: 184-661
acattcacgcattgggcaactcagagaagctgttttaactttcgatcctgtggtcccacaatcagaggactcgggcagataggggttgagataagcgagtttaggccaccaagcgggcggacgaggatcccagaccttgcgcttcccttctgagtttgggaggcaacctccaagtcccagatcatgtctctgtggggtctggtctccaagatgcccccagaaaaagtgcagcggctctatgtcgactttccccaacacctgcggcatcttctgggtgactggctggagagccagccctgggagttcctggtcggctccgacgccttctgctgcaacttggctagtgccctactttcagacactgtccagcaccttcaggcctcggtgggagagcagggggaggggagcaccatcttgcaacacatcagcacccttgagagcatatatcagagggaccccctgaagctggtggccactttcagacaaatacttcaaggagagaaaaaagctgttatggaacagttccgccacttgccaatgcctttccactggaagcaggaagaactcaagtttaagacaggcttgcggaggctgcagcaccgagtaggggagatccaccttctccgagaagccctgcagaagggggctgaggctggccaag

SEQ ID NO: 181636 - DNA, 1511 bp, Homo sapiens
  Payload ID: 15772
  Gene Symbol: STAP1
  Gene Name: signal transducing adaptor family member 1
  Uniprot ID: Q9ULZ2
  ENST ID: ENST00000265404
  CDS Start-End: 83-970
aacagttgccttttcctctcacagaaggaagatttcattttgtttgagacgagaaaccaaaccacacaccaaagagaggggtatgatggctaagaagcccccaaaaccagcccctcgcaggatcttccaggaaaggttaaagattactgctctacctttgtactttgaaggttttttattaatcaagcggtcaggataccgggagtatgagcattactggacagagttgagaggaactactcttttcttttataccgacaaaaagagtataatatatgttgacaaattagacatagtagacctcacatgccttactgagcagaattcaactgaaaagaactgtgcgaaattcacccttgttttgccgaaagaggaagtacaactgaagacagagaacacagaaagtggggaagaatggagaggcttcattcttacagtaacagagctgtcagttccccaaaacgtgtcactcctacctgggcaagtaattaaactgcatgaagtcctagagagagaaaagaaaaggaggattgagacagagcagagtacgtccgtggaaaaagagaaggaaccaactgaagattatgtggatgtactgaaccctatgccagcatgtttttatacagtgtcccggaaagaggcaactgagatgctccagaagaacccttctttgggaaatatgatcctgaggcctggtagtgacagtagaaactactccatcactattcggcaggagatagacattccaagaatcaagcactacaaagtgatgagcgtaggacaaaactacactattgaactggaaaaacctgtaacactcccaaaccttttcagtgtcattgattattttgtgaaggagactcgaggaaatttaagaccatttatatgttcaactgatgaaaacactggtcaagaacccagtatggaagggagaagtgaaaagttgaagaaaaatccacacattgcatgaaatacaatgtgaaagctcctttgtatatcttggtaatttatattttcaaaacgaagttcttacttttaaagagaattacctatattctcctgatactgattaccaagtcattcacctgaacaccagaattagaattaaacattgtaccatacaatttcattatcttatcagaatgaaaccaattcacagggaaactagagactacggctgtggtggtaacctgcagatatacacattcccatgcactgacataagttgaaaacacatagtactttctagatggaatttttttctttaggcctcaatgaaatacatttcccctatataattccaacagcagtttctctagttctaaattttaccaattcccaaaaaacctaagttttgctgaaatctgatttgaccaatttatcaaatatgtcattttaattacctagctggaagttagagacatgaaatgtactagaggagcccttttccaatggaaatattatataccacattttttgttaatggaaataaatgtcttcattcccatgtt

SEQ ID NO: 181637 - DNA, 1146 bp, Homo sapiens
  Payload ID: 15772
  Gene Symbol: STAP1
  Gene Name: signal transducing adaptor family member 1
  Uniprot ID: Q9ULZ2
  ENST ID: ENST00000396225
  CDS Start-End: 83-970
aacagttgccttttcctctcacagaaggaagatttcattttgtttgagacgagaaaccaaaccacacaccaaagagaggggtatgatggctaagaagcccccaaaaccagcccctcgcaggatcttccaggaaaggttaaagattactgctctacctttgtactttgaaggttttttattaatcaagcggtcaggataccgggagtatgagcattactggacagagttgagaggaactactcttttcttttataccgacaaaaagagtataatatatgttgacaaattagacatagtagacctcacatgccttactgagcagaattcaactgaaaagaactgtgcgaaattcacccttgttttgccgaaagaggaagtacaactgaagacagagaacacagaaagtggggaagaatggagaggcttcattcttacagtaacagagctgtcagttccccaaaacgtgtcactcctacctgggcaagtaattaaactgcatgaagtcctagagagagaaaagaaaaggaggattgagacagagcagagtacgtccgtggaaaaagagaaggaaccaactgaagattatgtggatgtactgaaccctatgccagcatgtttttatacagtgtcccggaaagaggcaactgagatgctccagaagaacccttctttgggaaatatgatcctgaggcctggtagtgacagtagaaactactccatcactattcggcaggagatagacattccaagaatcaagcactacaaagtgatgagcgtaggacaaaactacactattgaactggaaaaacctgtaacactcccaaaccttttcagtgtcattgattattttgtgaaggagactcgaggaaatttaagaccatttatatgttcaactgatgaaaacactggtcaagaacccagtatggaagggagaagtgaaaagttgaagaaaaatccacacattgcatgaaatacaatgtgaaagctcctttgtatatcttggggaaagactatgtgagacagagggagaaaacagccattgacaactcaaggagagaggcctcggggggaaaaaaagatcaacctggccaaaaccttgaaaatccggcttcttgacttgtgagaaaataaatttgtgttccttaa

SEQ ID NO: 181638 - DNA, 1508 bp, Homo sapiens
  Payload ID: 15773
  Gene Symbol: STAP2
  Gene Name: signal transducing adaptor family member 2
  Uniprot ID: Q9UGK3
  ENST ID: ENST00000600324
  CDS Start-End: 69-1418
ctcagcttcccggcccagctggggcacccactggaaggagaggccaggcggaagaccctggctccgtcatggcctctgccctgaggccaccccgtgtccccaagcctaagggtgtcctgccttcacactactatgagagctttctagagaagaaggggccctgtgaccgggattacaagaagttctgggcaggcctgcagggtctcaccatttatttctacaatagcaatcgggacttccagcacgtggagaagctcaacttgggagcatttgagaaactcacagatgagattccctggggaagctcacgtgaccctggcacccacttcagcctgattctccgggatcaggagatcaagttcaaggtagagaccttggagtgtcgggaaatgtggaaaggcttcatcttaacggtggtggagctccgtgtcccgaccgacttgaccctgcttcctgggcacctatacatgatgtctgaagtcttggccaaagaggaggcgcgccgtgcactggagacaccctcgtgcttcctgaaggtgagccggctggaggcacaactgctcctggagcgctaccccgagtgcgggaacctgctgctgcggcccagcggggacggcgccgacggcgtgtcggtcaccacgcggcagatgcacaacgggacgcacgtggtccggcattacaaggtgaagcgggagggccccaagtacgtgatcgatgtggaacagccgttctcttgcacctccctggacgccgtggtcaactatttcgtgtcgcataccaaaaaggcgctggtgccattcctgttagacgaggactacgagaaggtgctaggctacgtggaagccgataaggagaatggcgagaatgtgtgggtggcgccctccgctccgggcccaggtcctgcaccctgcacaggtggccccaagccgctgtcacctgcgtctagccaggacaagctgcccccactgcccccactaccgaaccaggaagagaactacgtgacccccattggagatggcccagctgttgactatgagaaccaagatgtggcttcctctagttggccagtcatcctgaagccaaagaagttgccaaagcctcctgccaagcttccaaagccacccgttggacccaagccagtagagaaggggtttcaccatgttgcccaggctggtctcgaactcctgacctcaagtgatccacccacctcagcctcccaaagtgctgggattaccggcgtgagccaccacacctggcctcatctgtcttctcttccagagcccaaagtctttaatggtggcttgggcaggaagctgccagtcagttcagcccagcctctcttccccacagccgggctggcagacatgacggcagagctacagaagaagctggagaagaggcgggcactggagcactgattcggacacaccagggaccagcgggctagtcccagggcatggcccagcggccagattctttttcccaggattaaaactctgaccccagga

SEQ ID NO: 181639 - DNA, 409 bp, Homo sapiens
  Payload ID: 15773
  Gene Symbol: STAP2
  Gene Name: signal transducing adaptor family member 2
  ENST ID: ENST00000601956
  CDS Start-End: 1-319
tccgggcccaggtcctgcaccctgcacaggtggccccaagccgctgtcacctgcgtctagccaggacaagctgcccccactgcccccactaccgaaccaggaagagaactacgtgacccccattggagatggcccagctgttgactatgagaaccaagatgtggcttcctctagttggccagtcatcctgaagccaaagaagttgccaaagcctcctgccaagcttccaaagccacccgttggacccaagccagggctggcagacatgacggcagagctacagaagaagctggagaagaggcgggcactggagcactgattcggacacaccagggaccagcgggctagtcccagggcatggcccagcggccagattctttttcccaggattaaaactctgaccccagga

SEQ ID NO: 181640 - DNA, 2043 bp, Homo sapiens
  Payload ID: 15773
  Gene Symbol: STAP2
  Gene Name: signal transducing adaptor family member 2
  ENST ID: ENST00000599736
  CDS Start-End: 558-875
agccgagtccggccctccatacccttgggcggagcaggaggcagggccgggctcgttgcgcgcctgatcagtgcagccccggcctttgtcccctaccctgtttctgcaactacatccccgaccctgtcctgggaccttcgtcccggagcccaggctctgggatttccctcagtccctggcagggttgaaagtccgggatggggacttcctaaagctccgggacgccgtgggatgggctcaagtgcgggtggctttgcccagaccgcagtcgggaagtgggaactggacagtaggggtgcgggggaggctctccagggtgctcgggaatgttctcaggaagaagacttgacatagagcaagagctggttccacaccggagaggcggggatttccctaggatcactggacctgctgggatcagcctctgcccagccctggcaggggagggagttgacgggctgacacaggaaactcccctgaaacctgtttctcagcttcccggcccagctggggcacccactggaaggagaggccaggcggaagaccctggctccgtcatggcctctgccctgaggccaccccgtgtccccaagcctaagggtgtcctgccttcacactactatgagagctttctagagaagaaggggccctgtgaccggcccaggaaaaactccgtgaacctcagctgctggggcgaaggccaggacaggattacaagaagttctgggcaggcctgcagggtctcaccatttatttctacaatagcaatcgggacttccagcacgtggagaagctcaacttgggagcatttgagaaactcacagatgagattccctggggaagctcacgtgaccctggcacccacttcagcctgattctccgggatcaggagatcaagttcaaggtagagaccttggagtgtcgggaaatgtggaaaggcttcatcttaacggtggtggagctccgtgtcccgaccgacttgaccctgcttcctgggcacctatacatgatgtctgaagtcttggccaaagaggaggcgcgccgtgcactggagacaccctcgtgcttcctgaaggtgagccggctggaggcacaactgctcctggagcgctaccccgagtgcgggaacctgctgctgcggcccagcggggacggcgccgacggcgtgtcggtcaccacgcggcagatgcacaacgggacgcacgtggtccggcattacaaggtgaagcgggagggccccaagtacgtgatcgatgtggaacagccgttctcttgcacctccctggacgccgtggtcaactatttcgtgtcgcataccaaaaaggcgctggtgccattcctgttagacgaggactacgagaaggtgctaggctacgtggaagccgataaggagaatggcgagaatgtgtgggtggcgccctccgctccgggcccaggtcctgcaccctgcacaggtggccccaagccgctgtcacctgcgtctagccaggacaagctgcccccactgcccccactaccgaaccaggaagagaactacgtgacccccattggagatggcccagctgttgactatgagaaccaagatgtggcttcctctagttggccagtcatcctgaagccaaagaagttgccaaagcctcctgccaagcttccaaagccacccgttggacccaagccagagaaggggtttcaccatgttgcccaggctggtctcgaactcctgacctcaagtgatccacccacctcagcctcccaaagtgctgggattaccggcgtgagccaccacacctggcctcatctgtcttctcttccagagcccaaagtctttaatggtggcttgggcaggaagctgccagtcagttcagcccagcctctcttccccacagccgggctggcagacatgacggcagagctacagaagaagctggagaagaggcgggcactggagcactgattcggacacaccagggaccagcgggctagtcccagggcatggcccagcggccagattctttttcccaggattaaaactctgaccccagg

SEQ ID NO: 181641 - DNA, 1426 bp, Homo sapiens
  Payload ID: 15773
  Gene Symbol: STAP2
  Gene Name: signal transducing adaptor family member 2
  Uniprot ID: Q9UGK3
  ENST ID: ENST00000594605
  CDS Start-End: 125-1336
cctggcaggggagggagttgacgggctgacacaggaaactcccctgaaacctgtttctcagcttcccggcccagctggggcacccactggaaggagaggccaggcggaagaccctggctccgtcatggcctctgccctgaggccaccccgtgtccccaagcctaagggtgtcctgccttcacactactatgagagctttctagagaagaaggggccctgtgaccgggattacaagaagttctgggcaggcctgcagggtctcaccatttatttctacaatagcaatcgggacttccagcacgtggagaagctcaacttgggagcatttgagaaactcacagatgagattccctggggaagctcacgtgaccctggcacccacttcagcctgattctccgggatcaggagatcaagttcaaggtagagaccttggagtgtcgggaaatgtggaaaggcttcatcttaacggtggtggagctccgtgtcccgaccgacttgaccctgcttcctgggcacctatacatgatgtctgaagtcttggccaaagaggaggcgcgccgtgcactggagacaccctcgtgcttcctgaaggtgagccggctggaggcacaactgctcctggagcgctaccccgagtgcgggaacctgctgctgcggcccagcggggacggcgccgacggcgtgtcggtcaccacgcggcagatgcacaacgggacgcacgtggtccggcattacaaggtgaagcgggagggccccaagtacgtgatcgatgtggaacagccgttctcttgcacctccctggacgccgtggtcaactatttcgtgtcgcataccaaaaaggcgctggtgccattcctgttagacgaggactacgagaaggtgctaggctacgtggaagccgataaggagaatggcgagaatgtgtgggtggcgccctccgctccgggcccaggtcctgcaccctgcacaggtggccccaagccgctgtcacctgcgtctagccaggacaagctgcccccactgcccccactaccgaaccaggaagagaactacgtgacccccattggagatggcccagctgttgactatgagaaccaagatgtggcttcctctagttggccagtcatcctgaagccaaagaagttgccaaagcctcctgccaagcttccaaagccacccgttggacccaagccagagcccaaagtctttaatggtggcttgggcaggaagctgccagtcagttcagcccagcctctcttccccacagccgggctggcagacatgacggcagagctacagaagaagctggagaagaggcgggcactggagcactgattcggacacaccagggaccagcgggctagtcccagggcatggcccagcggccagattctttttcccaggattaaaactctgaccccagga

SEQ ID NO: 181642 - DNA, 568 bp, Homo sapiens
  Payload ID: 15773
  Gene Symbol: STAP2
  Gene Name: signal transducing adaptor family member 2
  ENST ID: ENST00000598443
  CDS Start-End: 1-478
gctcctggagcgctaccccgagtgcgggaacctgctgctgcggcccagcggggacggcgccgacggcgtgtcggtcaccacgcggcagatgcacaacgggacgcacgtggtccggcattacaaggtgaagcgggagggccccaagtacgtgatcgatgtggaacagccgttctcttgcacctccctggacgccgtggtcaactatttcgtgtcgcataccaaaaaggcgctggtgccattcctgttagacgaggactacgagaaggtgctaggctacgtggaagccgataaggagaatggcgagaatgtgtgggtggcgccctccgctccgggcccagagcccaaagtctttaatggtggcttgggcaggaagctgccagtcagttcagcccagcctctcttccccacagccgggctggcagacatgacggcagagctacagaagaagctggagaagaggcgggcactggagcactgattcggacacaccagggaccagcgggctagtcccagggcatggcccagcggccagattctttttcccaggattaaaactctgaccccagga

SEQ ID NO: 181643 - DNA, 837 bp, Homo sapiens
  Payload ID: 15773
  Gene Symbol: STAP2
  Gene Name: signal transducing adaptor family member 2
  ENST ID: ENST00000601482
  CDS Start-End: 57-837
gcccagctggggcacccactggaaggagaggccaggcggaagaccctggctccgtcatggcctctgccctgaggccaccccgtgtccccaagcctaagggtgtcctgccttcacactactatgagagctttctagagaagaaggggccctgtgaccgggattacaagaagttctgggcaggcctgcagggtctcaccatttatttctacaatagcaatcgggacttccagcacgtggagaagctcaacttgggagcatttgagaaactcacagatgagattccctggggaagctcacgtgaccctggcacccacttcagcctgattctccgggatcaggagatcaagttcaaggtagagaccttggagtgtcgggaaatgtggaaaggcttcatcttaacggtggtggagctccgtgtcccgaccgacttgaccctgcttcctgggcacctatacatgatgtctgaagtcttggccaaagaggaggcgcgccgtgcactggagacaccctcgacgcacgtggtccggcattacaaggtgaagcgggagggccccaagtacgtgatcgatgtggaacagccgttctcttgcacctccctggacgccgtggtcaactatttcgtgtcgcataccaaaaaggcgctggtgccattcctgttagacgaggactacgagaaggtgctaggctacgtggaagccgataaggagaatggcgagaatgtgtgggtggcgccctccgctccgggcccaggtcctgcaccctgcacaggtggccccaagccgctgtcacctgcgtctagccaggacaagctgcccccactgcccccactaccgaacc

SEQ ID NO: 181644 - DNA, 729 bp, Homo sapiens
  Payload ID: 15774
  Gene Symbol: STAM
  Gene Name: signal transducing adaptor molecule (SH3 domain and ITAM motif) 1
  ENST ID: ENST00000377500
  CDS Start-End: 209-729
ggagctgtcgcggaccctgtagagtcggtctctgttgctctttttgcctgaggagtcttccatcctacgtcgagctctgactcccgtgctgtcgagagggagtccccggggacacctcggcacgcagcggagatgcctctttttgccaccaatcccttcgatcaggatgttgggtcatcctaaagtatgtgaaaaattaaaggctcttatggttgaatggacagatgaatttaagaatgatccacagcttagtctaatatcagcaatgattaagaaccttaaggaacaaggagttacgttcccagctattggctctcaggctgcagaacaagcaaaagcaagcccagctcttgtagccaaggatcctggtactgtggctaacaaaaaagaagaagaagatttagcaaaagccattgagttgtctctcaaggaacaaaggcagcagtcaaccaccctttccactttgtatccaagcacatccagtctcttaactaaccaccaacatgaaggccgaaaagttcgtgctatatatgactttgaagctgctgaagacaatgaacttacttttaaagctggagaaattattacagttcttgatgacagtgatcctaactggtggaaaggtgaaacccatcaaggcatagggttatttccttctaattttgtgactgcagatctcactgctgaaccagaaatgattaaaacagagaagaagacggtacaatttag

SEQ ID NO: 181645 - DNA, 2972 bp, Homo sapiens
  Payload ID: 15774
  Gene Symbol: STAM
  Gene Name: signal transducing adaptor molecule (SH3 domain and ITAM motif) 1
  Uniprot ID: Q92783
  ENST ID: ENST00000377524
  CDS Start-End: 216-1838
agctccgcgcgggggcttcctcggctccttgctgttgccgccgccgcagctgctgccgcggttggtggggttgggtgagaggaggagctgtcgcggaccctgtagagtcggtctctgttgctctttttgcctgaggagtcttccatcctacgtcgagctctgactcccgtgctgtcgagagggagtccccggggacacctcggcacgcagcggagatgcctctttttgccaccaatcccttcgatcaggatgttgagaaagcaaccagcgagatgaatactgctgaggactggggcctcattttggatatctgtgataaagttggtcagtctcgcactggacctaaggattgtcttcggtctattatgagaagagtgaaccacaaagatcctcacgttgctatgcaggctttgactcttctaggagcatgtgtatcaaactgtggcaaaatttttcatttagaagtatgttcaagagattttgctagtgaagtaagcaacgtattaaataagggtcatcctaaagtatgtgaaaaattaaaggctcttatggttgaatggacagatgaatttaagaatgatccacagcttagtctaatatcagcaatgattaagaaccttaaggaacaaggagttacgttcccagctattggctctcaggctgcagaacaagcaaaagcaagcccagctcttgtagccaaggatcctggtactgtggctaacaaaaaagaagaagaagatttagcaaaagccattgagttgtctctcaaggaacaaaggcagcagtcaaccaccctttccactttgtatccaagcacatccagtctcttaactaaccaccaacatgaaggccgaaaagttcgtgctatatatgactttgaagctgctgaagacaatgaacttacttttaaagctggagaaattattacagttcttgatgacagtgatcctaactggtggaaaggtgaaacccatcaaggcatagggttatttccttctaattttgtgactgcagatctcactgctgaaccagaaatgattaaaacagagaagaagacggtacaatttagtgatgatgttcaggtagagacaatagaaccagagccggaaccagcctttattgatgaagataaaatggaccagttgctacagatgctgcaaagtacagaccccagtgatgatcagccagacctaccagagctgcttcatcttgaagcaatgtgtcaccagatgggacctctcattgatgaaaagctggaagatattgatagaaaacattcagaactctcagaacttaatgtgaaagtgatggaggccctttccttatataccaagttaatgaacgaagatccgatgtattccatgtatgcaaagttacagaatcagccatattatatgcagtcatctggtgtttctggttctcaggtgtatgcagggcctcctccaagtggtgcctacctggttgcagggaacgcgcagatgagccacctccagagctacagtcttcccccggagcagctgtcttctctcagccaggcagtggtcccaccatccgcaaacccagcccttcctagtcagcagactcaggccgcttacccaaatacaatggtcagttccgttcaaggaaacacatatcccagccaggcgccagtatatagtcctcctcctgccgctactgctgctgctgcaactgccgatgtcactctgtaccagaatgcaggacctaatatgccccaggtgccaaactataacttaacatcatcaactctgcctcagcccggaggcagccaacagccacctcagccacagcaaccatattctcagaaggctctgctataggacccggtgttcctcttggtggcagatacctgctaaatgccactgacaatgttatgagattcattactatcttaagatgtgtttatcctcagcttataggaatctctccaggtcaacaggttcaaatattcaagaaggtagaactctcctcaatttacactgactttttagaggttcttccccccccgcccctgcagaggaatgaaactacttacaacatttaattcctttcataatatgaaagaattgatacaaggctatttgtctcgtaaacctggtctgcagaaagtcaaacttacaaaaactgttgtgacaaatgttatgtacatatattgatatgtaactgcattagtggccattttgaatcacagtggtgatcgtgtgaatatatttaacactgtgttaaattaatttacgttgctattttattttaatcataaacaactaccatgtttcttaatgttttgtgtaaatttaaggtaattatactatccttttaaacttcaagaaaacaaagttgttagcgtatttacatgaaggcgcattatgttgtcgtgtgtttcagtttcacattaaactgaaccttttactaattgtgagctaaagagatatatatatatatgtgtgtgtatatatatatatctacatgtctttctgtagcctctgcatactactggctgtcatcacaccagcgtacagtagctaaatttttggtgcaattatagcaaatgataatgttcccttttgaacttttacattttggcatgacatttcagagtattgtgggaccatgagacaaaattaagtacgatcacattctttatttctcattttaaagaaatgatgttggtttaccttttcctagttgaagatagtaattaggtttctaagctgtatactgtgtttattggtggcagtgacaccaaagatagaggcaatggatagaaatttttaaactggaaagaaaacctgaattacactacattttcgaagtctcttgtaattatttgggatatcaacaaaatttgattcgtctgtctaatcccttgctagtattttaaatatgtctttaacacattgtatcctttaattcttcattaaaatggaaataagtagatgtttcaaagtaatcta

SEQ ID NO: 181646 - DNA, 740 bp, Homo sapiens
  Payload ID: 15774
  Gene Symbol: STAM
  Gene Name: signal transducing adaptor molecule (SH3 domain and ITAM motif) 1
  ENST ID: ENST00000445846
  CDS Start-End: 133-261
ggagctgtcgcggaccctgtagagtcggtctctgttgctctttttgcctgaggagtcttccatcctacgtcgagctctgactcccgtgctgtcgagagggagtccccggggacacctcggcacgcagcggagatgcctctttttgccaccaatcccttcgatcaggatgttgagaaagcaaccagcgagatgaatactgctgaggactggggcctcattttggatatctgtgataaagttggtcagtctcgcactggataaggaaaagagaggatgtgtcttacaaaaagttttaaaataccaaaatggggttttaagaagctttttgagagagatgaggatttgcccaccctttaaacagacctaaggattgtcttcggtctattatgagaagagtgaaccacaaagatcctcacgttgctatgcaggctttgactcttctaggagcatgtgtatcaaactgtggcaaaatttttcatttagaagtatgttcaagagattttgctagtgaagtaagcaacgtattaaataagggtcatcctaaagtatgtgaaaaattaaaggctcttatggttgaatggacagatgaatttaagaatgatccacagcttagtctaatatcagcaatgattaagaaccttaaggaacaaggagttacgttcccagctattggctctcaggctgcagaacaagcaaaagcaagcccagctcttgtagccaaggatcctggtactgtggct

SEQ ID NO: 181647 - DNA, 5701 bp, Homo sapiens
  Payload ID: 15775
  Gene Symbol: STAM2
  Gene Name: signal transducing adaptor molecule (SH3 domain and ITAM motif) 2
  Uniprot ID: O75886
  ENST ID: ENST00000263904
  CDS Start-End: 351-1928
gaaggtccccggcttcgtggctagccggggtcctagcgctggaaaggtggccgtagcggccgcctgacccctacaaaagtctgggacaggggcagcgacaaaggccttgggaggacgcccatggtcggagggatctcgccccgggagaaaagttgggacaggagcgcgggatcgaagggtggactccgagccggcctgtcaggcaagagccgggcaggtgcggtggcggaagtgcagggacggaggccgaagcggagcggtctagggagccgcggccgcgggtcacccggcgggtagcagttgctgagtgtcagctagacagcagcgactagggctcgggcgccggcgagatgcctttgttcaccgccaaccccttcgagcaagacgtggaaaaagccacgaatgagtacaacactacagaagattggagtcttattatggacatatgtgacaaagttggaagtactcctaatggagcgaaagattgcctaaaagccataatgaaaagggtaaatcataaggttccacatgttgctctgcaagcactaactcttcttggggcttgtgtggcaaactgtggaaagatatttcatttagaagtatgttcccgtgattttgcaacagaagtacgtgctgtgattaaaaataaggcacatcctaaagtatgtgaaaaactgaaatctttaatggtggagtggtcagaagaatttcagaaggaccctcagtttagtctgatatctgcaactattaaatctatgaaagaagaaggaattacttttcctccagcaggttctcagactgtctcagctgctgccaagaatggtacgtcatcgaacaaaaacaaagaggatgaagacatagctaaagctattgaattatcgctgcaagaacagaaacagcaacacacagaaacaaaatccttatatccatcttcagaaattcagttaaataataaggttgcacggaaagtgagagctttatatgattttgaagctgttgaggacaatgaactcacctttaaacatggtgaaataattattgttttggatgacagtgatgccaattggtggaaaggagaaaatcacagaggaataggacttttcccatccaattttgtaacaactaatttaaacatagagactgaggcagcggctgtggacaaattgaatgtaattgatgatgatgtggaggaaattaagaaatcagagcctgagcctgtttatatagatgaggataagatggatagagccctgcaggtacttcagagtatagatccaacagattcaaaaccagactcccaagaccttttggatttagaagatatctgccaacagatgggtccaatgatagatgaaaaacttgaagaaattgataggaagcattcagaattgtctgaattgaatgttaaagtcctggaagctctggaactatataacaaattggtgaatgaagcaccagtgtactcagtctattcaaagctccaccctccagcacattacccacctgcatcatctggggttccaatgcagacatatccagttcaatcacatggtggaaactatatgggtcagagcattcaccaagtaactgttgcccaaagctatagcctaggacccgatcaaattggtccactgagatctctgcctccaaatgtgaattcctcagtgacagcacagcctgctcaaacttcatatttaagcactggacaagacactgtttccaatcctacttatatgaaccagaactctaacctacagtcagctactggtacaactgcttacacacagcaaatggggatgtctgtggatatgtcatcttatcagaacactacttccaatttgcctcaactggcaggctttccggtgacagttccagctcatccagttgcacagcagcacacaaattaccatcagcagcctctcctttagaaacaaatcaagcattttcttgaaagccttcataagtgtattattcagtccttgtgataccaacctgaaaatattaaaacttttttccctctcaactcaaaaggaccatgaataaataaagcacaaaaacctctcttattctacaaggccataaaaggttttttttttttttttttttcagtccagtttgtttgaagtcaatcttttcatcagaggcagcttaaagatgctttcagttagttttgtcttactttcagatttctctacataaatctagatactcattaagtagccttatgacaaacagtatgagatacttatgacaaactcgctctgtcacccaggctggagtgcagtagcatgatcgacagagtgagtttgtcaaaagtatctcatacttataaacagtatgagataggaggattaaaatattattttaaagaaaccactgtttccccctaaaatgtcataagagcactgaagaacttgaaatatttttttcagagtttctcacacactttaaaagtctaacttttttgtgtgtaagcatttagcttgccagcatatttctttttggctccttaaattgcggttgtgtttgcagtattgtcacttttgctctcactgttatgttgaataataattagcatataattgtctacagaagcaagagcaatctggaaggaacaaaaatgttttctgtgattaacagtgaagaccttgtaaatgcagatgtgtgataaagcatttagtcagtcccccaaacagtcatgccaactgtgaaggaatgtcccacaaaacatttccattccctgaggaaaaacattttctttcctacatgtatctctggtatttagaattgtcactaataaccttttcaagtgattttggctattctctaatgaagatatggtccatttgtttttcttcctgcaatgtggtgtgcagagatgctgcatatcctttttatgggattgcgtgtgaatttgaaccatgagacattcctaataatttgttgtgagatataccaagcatggatgataagtgtgtttttagtggtgtgttgtttttttaaagaggtgattcaagtaccgttgctaagctgtcaacataccaagctgttgaaaaaattgaccatttctttcagaagtaattctcagcctgtggaataatagcaggtgaagacttcatagaaggcgacagattgatagggaggctattgaagcagtttttctgaagcctgcattttgagttagtttatagtgctaatagattctatataactgtgagagtttggtagtaaaccagtagggattgttttctctcctaaaaatttgcacactacttcattgtctaccaactttttacatattggaaaatagaaattgcaaatacatacatgtatggaaacatattcagattgggaaaaacaatggacattagtttttaaaaagttacgtggaagcaagatttctatatttgtttttttaaaggaagcagtcattctttctactaaatccatttcaagctagttctctgaaaattttgccatttatctacagaaatttgattataaatatgttcctttttcaaagaaactttattctagaacaaaatagtctatatggtacttgatctacatttaagtggaaaaattagcagtatttgaaagctcagtttatgtcattgtcttaacttcagatacaaataactgaacagaaagttttaacctttaatatctcatgttctgttttttattcagtattttcctttatgttaattcaattatatacttctgaatggcaccttactttttggaaacaaatcttctgttatttacaaaataataatttttaaaaaacatttaaaaaaaatccaaagctgctctcgataatagtcaacatttgcatatatatggaatttcttactttttttctcccaaactctatttaataaacttattttaatgtttgtgtatttcatgtataattgtgatctcaattataaaagtttaattcagcatgtctttgagccaatataattactgcacacccactaaattgggatcagccattataaataatgtagttttagaataataaaacatgacacatatatatatatataaatatatagtatatattggcacatcggtgaaagtttatatgtgcagaagtttttttctttctcaagttaaaaattattttttgccatatgtaattttgtgttgcaggctgtcgagagataaaaatgattttaaatctgtgtactgatgattctttcggtgttaagaaacacagggttgtgtacttccctttttatgggcttatggattctatttatattaagacctgtttataattgttttctgccaaagggaattgtctaacttcagatttctacattgggttcatacttactgttttatatcagaaataaaaaaatagcttctgctttttcatatgaaatcttggtacatcagaaagaattcctgaaaatttataatagaatgaattttattaatgcagaaaaataccccagggtgttaaaatatatgaagtgtgggatatattcttatagtttgtaaaatgtagtcaaccaatactgtcttctaatttggtaatttatttataaaattacttaaacattaggtaattatatttgttaggatttgaaattatttgtagttaaattgtcatgctgtttgaaataattgatacttgtctacgtaatacattttactgtatgttttgaagatggttataatttcactttcaaaatttaaaaaatcaattttaaatgttttaaaaacatatagcttagggattttttttaaaaaggttttcttagtaaaaacataaatttaaaagcccctgagttctaggagagggcttattgaattgctataagaaagctggagttactttgataagtaataaattataaatagcactgatctataatgctttatttctatcggaaggtactttttcttctttcatcatcagttttagccagttagtaaatgggaatactcagttttagggatttgatttttgtttggtttaattttctttcaaaaattaaaagtatatttctaaaagttttccccagaggccagatacagtggctcatgcctataatcccagcactttgggagcctgagataggagtattgcttgaggctaggagtttgagaccaacctggcaacatggcaagaccctatctctacaaaaattttaaaacttagccaggtgtggtagtgcacctgtagtcccagctagtcagtaggctgaggtgggagtattgcttgaggctgcagtgaggtgtgatcacgccactgcactccggcctgacagaatgagatcctgtctcaaaaagaaaattccccagaagaagaattctaattttatcaagctgaattaaagtttgagagtcttttttttaaaatcttactgtgtcaaaagaggcattatgttgcttgtgtgatatagtgaatagtgtccctccaaatttcatgtacacctggaatgtcacaatgtgacttaacagtagccacccctcacccccgcccttatctgtggtggatacatttgcaagatccccagtggatgcctgaaaccgcagatagtactgaaccttatatatactgtttgttttcctatgcatacatatccctatgataaagtttatgaatttggcacttaacagcagaactaataagatgaaagagttgtaacaatatactctaataaaagttatttaaaatgta

SEQ ID NO: 181648 - DNA, 3628 bp, Homo sapiens
  Payload ID: 15776
  Gene Symbol: SIPA1
  Gene Name: signal-induced proliferation-associated 1
  Uniprot ID: Q96FS4
  ENST ID: ENST00000394224
  CDS Start-End: 297-3425
ggcagggtgactggggtcccatgacagctgctgtgaccccagcaccttcctcaggatgtgggggcctggcagagggctgggcccacagttggggctacttcctgtgctgaaggaagtcctcttgccattcctgctgccctgccgctgcctccctgggaacccatgtgtccttgtggcccctctgagcagccccctcctccttcagggcaggaactgctgccacaacctcaggctgggcaccaaacacccgtgcccgccaatgcggcccagcccccggagagtcaggcccacagagcatgcccatgtgggccggcggtgtggggagccctcggcggggcatggcccctgcgtccacagatgacctctttgcccgcaagctgcgccagccagcaaggcccccgctgacaccgcacaccttcgagccgaggccagtccggggcccactcctgcgcagcggcagcgatgcaggcgaggccaggccccccacgccagccagcccccgtgcccgtgcccacagccacgaagaggccagccgacctgcagccacttccacccggctcttcactgacccgctggcactgctggggctgccagcagaggaaccagagcctgccttcccaccagtgcttgagcctcgatggtttgcccactatgacgtgcaaagcctgctctttgattgggctccgaggtctcaggggatggggagccactcagaggccagctctgggaccctggcttcagccgaggaccaggctgccagctcggacctgctgcatggggcacctggctttgtgtgtgagctcgggggtgagggtgagctaggcctgggtggaccagcatccccacctgtgccccctgcactgcccaacgcggccgtgtccatcctggaggagccacagaaccgaacctcggcctacagcctggagcacgcagacctgggtgctggctactaccgcaaatacttctatggcaaagaacatcagaacttcttcgggatggacgagtcgctgggcccggtggcagtgagcctgcggcgggaggagaaggagggcagcggagggggcaccctgcacagctaccgcgtcatcgtgcggaccacgcagctccggacactccgtggcaccatctcggaggacgcgctgccgccggggcccccacggggtctgtccccaaggaaacttctggagcacgtggcgccgcagctgagccccagctgcctgcgcctgggctcagcttcacccaaggtaccacggacgctgctcacactggatgagcaagtgctgagcttccaacgcaaggtgggcatcctgtactgccgggcgggccagggctcggaggaggagatgtacaacaaccaggaggcgggaccggccttcatgcagtttctcaccttgctgggcgatgtggtgcggctcaaaggctttgagagttaccgggcccagctagacaccaaaacggattccacaggcacgcactccctctacaccacataccaggaccacgagatcatgttccacgtgtccacgatgctgccttacacccctaataaccagcagcagctcctccggaagcgccacattggcaacgacattgtgaccatcgtgttccaggagcctggcagcaagcccttctgccccaccaccatccgctcgcacttccagcacgtgttcctagtggtgcgggcacacacaccctgcacgccacacaccacctacagggtggccgtgagccgcacccaggacacccctgccttcgggccagctctgcctgctggcggaggccccttcgcagccaacgccgacttccgggccttcctgctggccaaagcgctgaatggtgagcaggcggccggccacgcgcgccagttccacgccatggccacgcgcacccgccagcagtacctgcaagacctggccaccaacgaggtgaccactacgtcgctggactcggcttcacgcttcggcctgccctccctgggtgggaggcgccgggcggcccctcggggcccaggcgccgagctgcaggcagcgggctcactggtgtggggagtgcgcgcggcgcccggggcgcgggtcgccgccggggctcaggcgagcggccccgaaggcatcgaggtgccctgcctgctgggcatctcggccgaggctctggtgctggtggcgccgcgcgacggccgcgtagtgttcaattgcgcctgtcgcgacgtgctggcctggaccttctccgagcagcagctggacctgtaccacggccgcggggaggcgatcacgctgcgcttcgacgggtcccccggccaagccgtgggcgaggtggtggcgcgcctgcagctggtgagccgtggctgcgagacccgcgagctggcgctgccccgcgacggtcaaggccgcctgggcttcgaggtggacgccgagggattcgtcacgcacgtggagcgcttcacattcgccgagacggcggggctgcggcccggggcgcgcctcctgcgcgtgtgcggccagactctgcccagcctccggcccgaggccgctgcccagctcctgcgctcggcgcccaaggtctgcgtcaccgtcctgccccccgacgagagcggccggccccgcaggagtttttcggagctgtacacgctgtcgctgcaggagcctagccggcggggggccccagatcctgtgcaggatgaggtccagggggtgaccctgctgcccaccacaaagcagctgctgcacctgtgcctgcaagatggtggcagtcctccagggcctggggatctggccgaggagaggactgagttcctgcacagccagaactcgctgtcaccacgcagctctctgtcggatgaggccccagtcctgcccaacaccaccccggacctcctcctggccaccacagccaagccatcagtacccagtgctgacagtgagacacccctgacccaggacaggccaggcagtcccagtggctctgaggacaagggcaacccggcgccggagctgagggcctcctttctgccacgtaccttgtctctgcggaactccatcagcaggatcatgtcggaggcgggcagtgggaccctggaggacgagtggcaggccatctcggagattgcctctacttgcaacaccattctggagtcgctgtcccgagagggacagcccatcccagagagtggagaccctaagggaactccaaaatctgatgctgagccagagcctgggaacctctcagagaaggtctctcacttggagtccatgctcaggaagctgcaggaggacctgcagaaggagaaggcggacagggcggccctggaggaggaggtgcggagcctgagacacaacaaccggcggctgcaggcggagtctgagagtgcagccacacgcctcctcctggcctccaagcagctgggctcacccaccgccgacctggcctgagccgtctggaaccacctgggcccctgagggcactgtggtcacactgggccctcctcaggaactctccctgcgcagaggcgtgtcttagcactgcccccctccctagccccttatttggtggcggaagtggcctccaccccttccctgtttgtaaatattctgtggagaaaagaggacttcagggagtaaaaaagccactgatg

SEQ ID NO: 181649 - DNA, 3456 bp, Homo sapiens
  Payload ID: 15776
  Gene Symbol: SIPA1
  Gene Name: signal-induced proliferation-associated 1
  Uniprot ID: Q96FS4
  ENST ID: ENST00000394227
  CDS Start-End: 123-3251
cgggcggcggcggcgtgaggctgcccttcagggcaggaactgctgccacaacctcaggctgggcaccaaacacccgtgcccgccaatgcggcccagcccccggagagtcaggcccacagagcatgcccatgtgggccggcggtgtggggagccctcggcggggcatggcccctgcgtccacagatgacctctttgcccgcaagctgcgccagccagcaaggcccccgctgacaccgcacaccttcgagccgaggccagtccggggcccactcctgcgcagcggcagcgatgcaggcgaggccaggccccccacgccagccagcccccgtgcccgtgcccacagccacgaagaggccagccgacctgcagccacttccacccggctcttcactgacccgctggcactgctggggctgccagcagaggaaccagagcctgccttcccaccagtgcttgagcctcgatggtttgcccactatgacgtgcaaagcctgctctttgattgggctccgaggtctcaggggatggggagccactcagaggccagctctgggaccctggcttcagccgaggaccaggctgccagctcggacctgctgcatggggcacctggctttgtgtgtgagctcgggggtgagggtgagctaggcctgggtggaccagcatccccacctgtgccccctgcactgcccaacgcggccgtgtccatcctggaggagccacagaaccgaacctcggcctacagcctggagcacgcagacctgggtgctggctactaccgcaaatacttctatggcaaagaacatcagaacttcttcgggatggacgagtcgctgggcccggtggcagtgagcctgcggcgggaggagaaggagggcagcggagggggcaccctgcacagctaccgcgtcatcgtgcggaccacgcagctccggacactccgtggcaccatctcggaggacgcgctgccgccggggcccccacggggtctgtccccaaggaaacttctggagcacgtggcgccgcagctgagccccagctgcctgcgcctgggctcagcttcacccaaggtaccacggacgctgctcacactggatgagcaagtgctgagcttccaacgcaaggtgggcatcctgtactgccgggcgggccagggctcggaggaggagatgtacaacaaccaggaggcgggaccggccttcatgcagtttctcaccttgctgggcgatgtggtgcggctcaaaggctttgagagttaccgggcccagctagacaccaaaacggattccacaggcacgcactccctctacaccacataccaggaccacgagatcatgttccacgtgtccacgatgctgccttacacccctaataaccagcagcagctcctccggaagcgccacattggcaacgacattgtgaccatcgtgttccaggagcctggcagcaagcccttctgccccaccaccatccgctcgcacttccagcacgtgttcctagtggtgcgggcacacacaccctgcacgccacacaccacctacagggtggccgtgagccgcacccaggacacccctgccttcgggccagctctgcctgctggcggaggccccttcgcagccaacgccgacttccgggccttcctgctggccaaagcgctgaatggtgagcaggcggccggccacgcgcgccagttccacgccatggccacgcgcacccgccagcagtacctgcaagacctggccaccaacgaggtgaccactacgtcgctggactcggcttcacgcttcggcctgccctccctgggtgggaggcgccgggcggcccctcggggcccaggcgccgagctgcaggcagcgggctcactggtgtggggagtgcgcgcggcgcccggggcgcgggtcgccgccggggctcaggcgagcggccccgaaggcatcgaggtgccctgcctgctgggcatctcggccgaggctctggtgctggtggcgccgcgcgacggccgcgtagtgttcaattgcgcctgtcgcgacgtgctggcctggaccttctccgagcagcagctggacctgtaccacggccgcggggaggcgatcacgctgcgcttcgacgggtcccccggccaagccgtgggcgaggtggtggcgcgcctgcagctggtgagccgtggctgcgagacccgcgagctggcgctgccccgcgacggtcaaggccgcctgggcttcgaggtggacgccgagggattcgtcacgcacgtggagcgcttcacattcgccgagacggcggggctgcggcccggggcgcgcctcctgcgcgtgtgcggccagactctgcccagcctccggcccgaggccgctgcccagctcctgcgctcggcgcccaaggtctgcgtcaccgtcctgccccccgacgagagcggccggccccgcaggagtttttcggagctgtacacgctgtcgctgcaggagcctagccggcggggggccccagatcctgtgcaggatgaggtccagggggtgaccctgctgcccaccacaaagcagctgctgcacctgtgcctgcaagatggtggcagtcctccagggcctggggatctggccgaggagaggactgagttcctgcacagccagaactcgctgtcaccacgcagctctctgtcggatgaggccccagtcctgcccaacaccaccccggacctcctcctggccaccacagccaagccatcagtacccagtgctgacagtgagacacccctgacccaggacaggccaggcagtcccagtggctctgaggacaagggcaacccggcgccggagctgagggcctcctttctgccacgtaccttgtctctgcggaactccatcagcaggatcatgtcggaggcgggcagtgggaccctggaggacgagtggcaggccatctcggagattgcctctacttgcaacaccattctggagtcgctgtcccgagagggacagcccatcccagagagtggagaccctaagggaactccaaaatctgatgctgagccagagcctgggaacctctcagagaaggtctctcacttggagtccatgctcaggaagctgcaggaggacctgcagaaggagaaggcggacagggcggccctggaggaggaggtgcggagcctgagacacaacaaccggcggctgcaggcggagtctgagagtgcagccacacgcctcctcctggcctccaagcagctgggctcacccaccgccgacctggcctgagccgtctggaaccacctgggcccctgagggcactgtggtcacactgggccctcctcaggaactctccctgcgcagaggcgtgtcttagcactgcccccctccctagccccttatttggtggcggaagtggcctccaccccttccctgtttgtaaatattctgtggagaaaagaggacttcagggagtaaaaaagccactgatgtc

SEQ ID NO: 181650 - DNA, 3235 bp, Homo sapiens
  Payload ID: 15776
  Gene Symbol: SIPA1
  Gene Name: signal-induced proliferation-associated 1
  ENST ID: ENST00000527525
  CDS Start-End: 248-3070
aggtgcagccctgcttagggcctggagatgggcagacccaggctcacatcctagctctgacacggaattgcttcaggcaagagcatctcctctggacctcatctgaccatctgtcacatggggttcagacctccctgtctgcatcagtgagaccagggcaggaactgctgccacaacctcaggctgggcaccaaacacccgtgcccgccaatgcggcccagcccccggagagtcaggcccacagagcatgcccatgtgggccggcggtgtggggagccctcggcggggcatggcccctgcgtccacagatgacctctttgcccgcaagctgcgccagccagcaaggcccccgctgacaccgcacaccttcgagccgaggccagtccggggcccactcctgcgcagcggcagcgatgcaggcgaggccaggccccccacgccagccagcccccgtgcccgtgcccacagccacgaagaggccagccgacctgcagccacttccacccggctcttcactgacccgctggcactgctggggctgccagcagaggaaccagagcctgccttcccaccagtgcttgagcctcgatggtttgcccactatgacgtgcaaagcctgctctttgattgggctccgaggtctcaggggatggggagccactcagaggccagctctgggaccctggcttcagccgaggaccaggctgccagctcggacctgctgcatggggcacctggctttgtgtgtgagctcgggggtgagggtgagctaggcctgggtggaccagcatccccacctgtgccccctgcactgcccaacgcggccgtgtccatcctggaggagccacagaaccgaacctcggcctacagcctggagcacgcagacctgggtgctggctactaccgcaaatacttctatggcaaagaacatcagaacttcttcgggatggacgagtcgctgggcccggtggcagtgagcctgcggcgggaggagaaggagggcagcggagggggcaccctgcacagctaccgcgtcatcgtgcggaccacgcagctccggacactccgtggcaccatctcggaggacgcgctgccgccggggcccccacggggtctgtccccaaggaaacttctggagcacgtggcgccgcagctgagccccagctgcctgcgcctgggctcagcttcacccaaggtaccacggacgctgctcacactggatgagcaagtgctgagcttccaacgcaaggtgggcatcctgtactgccgggcgggccagggctcggaggaggagatgtacaacaaccaggaggcgggaccggccttcatgcagtttctcaccttgctgggcgatgtggtgcggctcaaaggctttgagagttaccgggcccagctagacaccaaaacggattccacaggcacgcactccctctacaccacataccaggaccacgagatcatgttccacgtgtccacgatgctgccttacacccctaataaccagcagcagctcctccggaagcgccacattggcaacgacattgtgaccatcgtgttccaggagcctggcagcaagcccttctgccccaccaccatccgctcgcacttccagcacgtgttcctagtggtgcgggcacacacaccctgcacgccacacaccacctacagggtggccgtgagccgcacccaggacacccctgccttcgggccagctctgcctgctggcggaggccccttcgcagccaacgccgacttccgggccttcctgctggccaaagcgctgaatggtgagcaggcggccggccacgcgcgccagttccacgccatggccacgcgcacccgccagcagtacctgcaagacctggccaccaacgagcagctggacctgtaccacggccgcggggaggcgatcacgctgcgcttcgacgggtcccccggccaagccgtgggcgaggtggtggcgcgcctgcagctggtgagccgtggctgcgagacccgcgagctggcgctgccccgcgacggtcaaggccgcctgggcttcgaggtggacgccgagggattcgtcacgcacgtggagcgcttcacattcgccgagacggcggggctgcggcccggggcgcgcctcctgcgcgtgtgcggccagactctgcccagcctccggcccgaggccgctgcccagctcctgcgctcggcgcccaaggtctgcgtcaccgtcctgccccccgacgagagcggccggccccgcaggagtttttcggagctgtacacgctgtcgctgcaggagcctagccggcggggggccccagatcctgtgcaggatgaggtccagggggtgaccctgctgcccaccacaaagcagctgctgcacctgtgcctgcaagatggtggcagtcctccagggcctggggatctggccgaggagaggactgagttcctgcacagccagaactcgctgtcaccacgcagctctctgtcggatgaggccccagtcctgcccaacaccaccccggacctcctcctggccaccacagccaagccatcagtacccagtgctgacagtgagacacccctgacccaggacaggccaggcagtcccagtggctctgaggacaagggcaacccggcgccggagctgagggcctcctttctgccacgtaccttgtctctgcggaactccatcagcaggatcatgtcggaggcgggcagtgggaccctggaggacgagtggcaggccatctcggagattgcctctacttgcaacaccattctggagtcgctgtcccgagagggacagcccatcccagagagtggagaccctaagggaactccaaaatctgatgctgagccagagcctgggaacctctcagagaaggtctctcacttggagtccatgctcaggaagctgcaggaggacctgcagaaggagaaggcggacagggcggccctggaggaggaggtgcggagcctgagacacaacaaccggcggctgcaggcggagtctgagagtgcagccacacgcctcctcctggcctccaagcagctgggctcacccaccgccgacctggcctgagccgtctggaaccacctgggcccctgagggcactgtggtcacactgggccctcctcaggaactctccctgcgcagaggcgtgtcttagcactgcccccctccctagccccttatttggtggcggaagtggcctccaccccttccctgtttgtaaatattctgtgg

SEQ ID NO: 181651 - DNA, 379 bp, Homo sapiens
  Payload ID: 15776
  Gene Symbol: SIPA1
  Gene Name: signal-induced proliferation-associated 1
  ENST ID: ENST00000526137
  CDS Start-End: 361-379
gggcggcggcggctgggcgggagccccagaggtactggcgggagcaggggacgggaggcactactgtcgggcccgacaggggagaggtggcctagccgtgggcccgggtgatgtgtatgggagtggggtcctcgccacgttcgccgccagcaccctcccaacttccctccgggctccagctcagtcccgagtcaatatgtccagccccctgtctctgaccagccgttcctactctctctgtgtgacggcttagcctggccagccagccgggcaggaactgctgccacaacctcaggctgggcaccaaacacccgtgcccgccaatgcggcccagcccccggagagtcaggcccacagagcatgcccatgtgggccggcg

SEQ ID NO: 181652 - DNA, 3521 bp, Homo sapiens
  Payload ID: 15776
  Gene Symbol: SIPA1
  Gene Name: signal-induced proliferation-associated 1
  Uniprot ID: Q96FS4
  ENST ID: ENST00000534313
  CDS Start-End: 178-3306
aggcggagccggcgccgggagcggtagcgggagagcggcagcgggaccccagcgcgggcggcggcggctgggcgggagccccagagggcaggaactgctgccacaacctcaggctgggcaccaaacacccgtgcccgccaatgcggcccagcccccggagagtcaggcccacagagcatgcccatgtgggccggcggtgtggggagccctcggcggggcatggcccctgcgtccacagatgacctctttgcccgcaagctgcgccagccagcaaggcccccgctgacaccgcacaccttcgagccgaggccagtccggggcccactcctgcgcagcggcagcgatgcaggcgaggccaggccccccacgccagccagcccccgtgcccgtgcccacagccacgaagaggccagccgacctgcagccacttccacccggctcttcactgacccgctggcactgctggggctgccagcagaggaaccagagcctgccttcccaccagtgcttgagcctcgatggtttgcccactatgacgtgcaaagcctgctctttgattgggctccgaggtctcaggggatggggagccactcagaggccagctctgggaccctggcttcagccgaggaccaggctgccagctcggacctgctgcatggggcacctggctttgtgtgtgagctcgggggtgagggtgagctaggcctgggtggaccagcatccccacctgtgccccctgcactgcccaacgcggccgtgtccatcctggaggagccacagaaccgaacctcggcctacagcctggagcacgcagacctgggtgctggctactaccgcaaatacttctatggcaaagaacatcagaacttcttcgggatggacgagtcgctgggcccggtggcagtgagcctgcggcgggaggagaaggagggcagcggagggggcaccctgcacagctaccgcgtcatcgtgcggaccacgcagctccggacactccgtggcaccatctcggaggacgcgctgccgccggggcccccacggggtctgtccccaaggaaacttctggagcacgtggcgccgcagctgagccccagctgcctgcgcctgggctcagcttcacccaaggtaccacggacgctgctcacactggatgagcaagtgctgagcttccaacgcaaggtgggcatcctgtactgccgggcgggccagggctcggaggaggagatgtacaacaaccaggaggcgggaccggccttcatgcagtttctcaccttgctgggcgatgtggtgcggctcaaaggctttgagagttaccgggcccagctagacaccaaaacggattccacaggcacgcactccctctacaccacataccaggaccacgagatcatgttccacgtgtccacgatgctgccttacacccctaataaccagcagcagctcctccggaagcgccacattggcaacgacattgtgaccatcgtgttccaggagcctggcagcaagcccttctgccccaccaccatccgctcgcacttccagcacgtgttcctagtggtgcgggcacacacaccctgcacgccacacaccacctacagggtggccgtgagccgcacccaggacacccctgccttcgggccagctctgcctgctggcggaggccccttcgcagccaacgccgacttccgggccttcctgctggccaaagcgctgaatggtgagcaggcggccggccacgcgcgccagttccacgccatggccacgcgcacccgccagcagtacctgcaagacctggccaccaacgaggtgaccactacgtcgctggactcggcttcacgcttcggcctgccctccctgggtgggaggcgccgggcggcccctcggggcccaggcgccgagctgcaggcagcgggctcactggtgtggggagtgcgcgcggcgcccggggcgcgggtcgccgccggggctcaggcgagcggccccgaaggcatcgaggtgccctgcctgctgggcatctcggccgaggctctggtgctggtggcgccgcgcgacggccgcgtagtgttcaattgcgcctgtcgcgacgtgctggcctggaccttctccgagcagcagctggacctgtaccacggccgcggggaggcgatcacgctgcgcttcgacgggtcccccggccaagccgtgggcgaggtggtggcgcgcctgcagctggtgagccgtggctgcgagacccgcgagctggcgctgccccgcgacggtcaaggccgcctgggcttcgaggtggacgccgagggattcgtcacgcacgtggagcgcttcacattcgccgagacggcggggctgcggcccggggcgcgcctcctgcgcgtgtgcggccagactctgcccagcctccggcccgaggccgctgcccagctcctgcgctcggcgcccaaggtctgcgtcaccgtcctgccccccgacgagagcggccggccccgcaggagtttttcggagctgtacacgctgtcgctgcaggagcctagccggcggggggccccagatcctgtgcaggatgaggtccagggggtgaccctgctgcccaccacaaagcagctgctgcacctgtgcctgcaagatggtggcagtcctccagggcctggggatctggccgaggagaggactgagttcctgcacagccagaactcgctgtcaccacgcagctctctgtcggatgaggccccagtcctgcccaacaccaccccggacctcctcctggccaccacagccaagccatcagtacccagtgctgacagtgagacacccctgacccaggacaggccaggcagtcccagtggctctgaggacaagggcaacccggcgccggagctgagggcctcctttctgccacgtaccttgtctctgcggaactccatcagcaggatcatgtcggaggcgggcagtgggaccctggaggacgagtggcaggccatctcggagattgcctctacttgcaacaccattctggagtcgctgtcccgagagggacagcccatcccagagagtggagaccctaagggaactccaaaatctgatgctgagccagagcctgggaacctctcagagaaggtctctcacttggagtccatgctcaggaagctgcaggaggacctgcagaaggagaaggcggacagggcggccctggaggaggaggtgcggagcctgagacacaacaaccggcggctgcaggcggagtctgagagtgcagccacacgcctcctcctggcctccaagcagctgggctcacccaccgccgacctggcctgagccgtctggaaccacctgggcccctgagggcactgtggtcacactgggccctcctcaggaactctccctgcgcagaggcgtgtcttagcactgcccccctccctagccccttatttggtggcggaagtggcctccaccccttccctgtttgtaaatattctgtggagaaaagaggacttcagggagtaaaaaagccactgatgtctgtgtctgaa

SEQ ID NO: 181653 - DNA, 562 bp, Homo sapiens
  Payload ID: 15776
  Gene Symbol: SIPA1
  Gene Name: signal-induced proliferation-associated 1
  ENST ID: ENST00000533361
  CDS Start-End: 255-562
agcgggaccccagcgcgggcggcggcggctgggcgggagccccagagtctcactctgtcccgcaggctggagttcagtggcgcgatctcggctcactgcaacctctgcctcccaggtttaagcgattctcctgcctcagcctcctgagtggctgggactacagggcaggaactgctgccacaacctcaggctgggcaccaaacacccgtgcccgccaatgcggcccagcccccggagagtcaggcccacagagcatgcccatgtgggccggcggtgtggggagccctcggcggggcatggcccctgcgtccacagatgacctctttgcccgcaagctgcgccagccagcaaggcccccgctgacaccgcacaccttcgagccgaggccagtccggggcccactcctgcgcagcggcagcgatgcaggcgaggccaggccccccacgccagccagcccccgtgcccgtgcccacagccacgaagaggccagccgacctgcagccacttccacccggctcttcactgacccgctggcactgctggggctgccagcagaggaacc

SEQ ID NO: 181654 - DNA, 3150 bp, Homo sapiens
  Payload ID: 15776
  Gene Symbol: SIPA1
  Gene Name: signal-induced proliferation-associated 1
  ENST ID: ENST00000628801
  CDS Start-End: 123-2945
cgggcggcggcggcgtgaggctgcccttcagggcaggaactgctgccacaacctcaggctgggcaccaaacacccgtgcccgccaatgcggcccagcccccggagagtcaggcccacagagcatgcccatgtgggccggcggtgtggggagccctcggcggggcatggcccctgcgtccacagatgacctctttgcccgcaagctgcgccagccagcaaggcccccgctgacaccgcacaccttcgagccgaggccagtccggggcccactcctgcgcagcggcagcgatgcaggcgaggccaggccccccacgccagccagcccccgtgcccgtgcccacagccacgaagaggccagccgacctgcagccacttccacccggctcttcactgacccgctggcactgctggggctgccagcagaggaaccagagcctgccttcccaccagtgcttgagcctcgatggtttgcccactatgacgtgcaaagcctgctctttgattgggctccgaggtctcaggggatggggagccactcagaggccagctctgggaccctggcttcagccgaggaccaggctgccagctcggacctgctgcatggggcacctggctttgtgtgtgagctcgggggtgagggtgagctaggcctgggtggaccagcatccccacctgtgccccctgcactgcccaacgcggccgtgtccatcctggaggagccacagaaccgaacctcggcctacagcctggagcacgcagacctgggtgctggctactaccgcaaatacttctatggcaaagaacatcagaacttcttcgggatggacgagtcgctgggcccggtggcagtgagcctgcggcgggaggagaaggagggcagcggagggggcaccctgcacagctaccgcgtcatcgtgcggaccacgcagctccggacactccgtggcaccatctcggaggacgcgctgccgccggggcccccacggggtctgtccccaaggaaacttctggagcacgtggcgccgcagctgagccccagctgcctgcgcctgggctcagcttcacccaaggtaccacggacgctgctcacactggatgagcaagtgctgagcttccaacgcaaggtgggcatcctgtactgccgggcgggccagggctcggaggaggagatgtacaacaaccaggaggcgggaccggccttcatgcagtttctcaccttgctgggcgatgtggtgcggctcaaaggctttgagagttaccgggcccagctagacaccaaaacggattccacaggcacgcactccctctacaccacataccaggaccacgagatcatgttccacgtgtccacgatgctgccttacacccctaataaccagcagcagctcctccggaagcgccacattggcaacgacattgtgaccatcgtgttccaggagcctggcagcaagcccttctgccccaccaccatccgctcgcacttccagcacgtgttcctagtggtgcgggcacacacaccctgcacgccacacaccacctacagggtggccgtgagccgcacccaggacacccctgccttcgggccagctctgcctgctggcggaggccccttcgcagccaacgccgacttccgggccttcctgctggccaaagcgctgaatggtgagcaggcggccggccacgcgcgccagttccacgccatggccacgcgcacccgccagcagtacctgcaagacctggccaccaacgagcagctggacctgtaccacggccgcggggaggcgatcacgctgcgcttcgacgggtcccccggccaagccgtgggcgaggtggtggcgcgcctgcagctggtgagccgtggctgcgagacccgcgagctggcgctgccccgcgacggtcaaggccgcctgggcttcgaggtggacgccgagggattcgtcacgcacgtggagcgcttcacattcgccgagacggcggggctgcggcccggggcgcgcctcctgcgcgtgtgcggccagactctgcccagcctccggcccgaggccgctgcccagctcctgcgctcggcgcccaaggtctgcgtcaccgtcctgccccccgacgagagcggccggccccgcaggagtttttcggagctgtacacgctgtcgctgcaggagcctagccggcggggggccccagatcctgtgcaggatgaggtccagggggtgaccctgctgcccaccacaaagcagctgctgcacctgtgcctgcaagatggtggcagtcctccagggcctggggatctggccgaggagaggactgagttcctgcacagccagaactcgctgtcaccacgcagctctctgtcggatgaggccccagtcctgcccaacaccaccccggacctcctcctggccaccacagccaagccatcagtacccagtgctgacagtgagacacccctgacccaggacaggccaggcagtcccagtggctctgaggacaagggcaacccggcgccggagctgagggcctcctttctgccacgtaccttgtctctgcggaactccatcagcaggatcatgtcggaggcgggcagtgggaccctggaggacgagtggcaggccatctcggagattgcctctacttgcaacaccattctggagtcgctgtcccgagagggacagcccatcccagagagtggagaccctaagggaactccaaaatctgatgctgagccagagcctgggaacctctcagagaaggtctctcacttggagtccatgctcaggaagctgcaggaggacctgcagaaggagaaggcggacagggcggccctggaggaggaggtgcggagcctgagacacaacaaccggcggctgcaggcggagtctgagagtgcagccacacgcctcctcctggcctccaagcagctgggctcacccaccgccgacctggcctgagccgtctggaaccacctgggcccctgagggcactgtggtcacactgggccctcctcaggaactctccctgcgcagaggcgtgtcttagcactgcccccctccctagccccttatttggtggcggaagtggcctccaccccttccctgtttgtaaatattctgtggagaaaagaggacttcagggagtaaaaaagccactgatgtc

SEQ ID NO: 181655 - DNA, 6539 bp, Homo sapiens
  Payload ID: 15777
  Gene Symbol: SIPA1L1
  Gene Name: signal-induced proliferation-associated 1 like 1
  Uniprot ID: O43166
  ENST ID: ENST00000358550
  CDS Start-End: 951-6299
gagtcttctaaagtgatgctgtgtgctgcaagagaaatgaaagcgcctgccttggaggcaggaagccgactagggagatgcttaattatcgtggaagtaggtgcttgttaccattgagtggagagtgcagcaagtgcaggtcgtcctccggtgtcagagccgtgatttgtagacaatgccgccctgtcagctcagtgctggttcagcagcatctttccaaacatgtatttggcaagaatttaaaggccacctcttgtgtaatttgtggagtcttggaaaaggagcctctgcctttcttttcagaatgtacgcaaccatgcagaattttgtactcagaatctgtgtctcctgccttctgcctgacgtgctcatgaggaagtttgtttccatgcccgtcacctggaaggatgctaacagttctctgtaatctgttggggatatggagagggccacccagagctgtgttttgtttctgccgtcttcataaattagcactgatggggtggagtaggttgtactgcatgaggaaatgcaggcattttgttcattagtgagatacttctagcttttaagagtacaagaaactaaggagagcttgggaagaggtggtggtgaatgctggattcattctgcaatatcctcgtctcgagaaagcatgggattatggcaaccacagaatctcagtagtacaagttccattcagttttttctgaaagaaagccctctgttaaagtgaagcaaagaaactgttgtggattataacgtttagaagttccaatttttcagtgctttacaaataaagcatcatttaaccttttaaatgaaaaagattaagatctcatgcaactgttgtattttctggaagccattctccaaaagggaagtgcacatttaaaacacagatatgatggtccttgctgcagggatttaagtctacttgcttttacatcatgaccagcttgaaacggtcacagacagaaaggcctcttgccactgacagggcctctgttgttggcacagacggcacccccaaagtccacactgatgatttctacatgcggcgcttccggtcccaaaatggcagcttaggatcatcagttatggctcctgtaggacccccccgaagtgaaggttctcaccatataacctcaacccccggagtcccaaaaatgggggtaagggcaaggattgcagattggcccccaagaaaggaaaacataaaagaatctagccgttcaagccaggaaatagaaacctcaagttgccttgatagcctgtcctccaaaagcagtcctgtgagtcagggaagttctgttagcctcaattccaatgactcagccatgctgaaaagcatacagaacacgctgaaaaacaagacaagaccgtcggagaacatggactccagatttctcatgcctgaagcctaccccagctcccccagaaaagctcttcgcagaatacgccagcgaagcaacagtgatatcaccataagtgaacttgatgtggatagctttgatgaatgtatctcacctacatacaagactggaccatcactgcacagggaatatggtagcacatcttcaattgataaacagggaacatctggagaaagcttttttgatttgttaaagggctacaaagatgacaaatctgatcgaggtccaactccaaccaagctcagtgactttctcattactggtggtggcaagggttctggtttctctttggatgtaatagacgggcctatctcacagagagagaacctcaggctttttaaggaaagggaaaaaccactcaagcgacgttcaaaatctgaaactggagactcatctatttttcgtaaattgcgcaatgccaaaggtgaagaacttgggaagtcatcagatcttgaagataaccgatcagaagactctgtcaggccctggacatgtccaaagtgctttgcccactatgatgtccagagtatattatttgatttgaatgaggcaattatgaacaggcacaatgttattaagaggagaaacaccaccactggagcttccgcagctgccgtggcatccttggtctctggacctctgtctcattcagccagttttagctccccaatgggcagcacagaggacctgaattccaaaggaagcctcagcatggaccagggagatgataaaagcaatgagcttgtaatgagctgtccatattttcggaatgagataggtggagaaggggagaggaaaatcagcctttcaaaatcaaattctggctcctttagtggatgtgaaagtgcctcctttgagtctacccttagttcccattgcacaaatgcaggagtggcagtacttgaagtgcccaaggagaacttggtgttgcacctagatagagtgaaaagatacatcgtggaacacgtagatctgggtgcatactattatagaaaatttttctaccagaaggaacactggaactattttggggctgatgagaatcttggtccagtggctgtgagcattcgaagggaaaaaccagatgaaatgaaagaaaatggatctccgtacaactaccgaataatttttagaactagtgagctcatgacactgagaggttcggtcctggaggacgccattccgtcgacagccaagcactcgacagccagaggcctgcctctcaaagaagtgctggagcacgtggttcctgagctcaatgtccagtgcctgcggttggccttcaacacacccaaggtcacagagcagctcatgaaactggatgaacaagggctgaactaccagcagaaagtaggcatcatgtactgcaaagctggacagagcactgaagaagagatgtacaacaatgagtcagctggcccagcctttgaagaatttcttcaactattgggagagcgagttcggctcaaaggatttgagaagtatcgagcacagcttgataccaaaactgactccactggaacccattctctgtacacaacatacaaagattatgaaattatgttccatgtttctaccatgctgccatacacacccaacaacaaacaacagctcctgaggaagcggcacattggaaatgatatcgtaacaattgttttccaagagcctggagcacagccattcagcccaaaaaacatccgatcccacttccagcacgttttcgtcatcgtcagggtgcacaatccgtgctctgacagtgtctgttatagtgtggctgttaccaggtccagagatgtgccttcctttgggcctcccattcctaaaggggtcactttccctaagtcaaatgtgttcagggacttccttttggcgaaagtgattaatgcagaaaatgctgctcataaatcggagaagtttcgggccatggcaactcggacccgccaggaatacctgaaagatctggcagaaaagaatgtcaccaacacccctatcgacccttctggcaagtttccgttcatctctctggcttccaagaagaaggaaaagtctaagccatatccaggagccgagctcagcagcatgggggccattgtatgggcagtccgggctgaagactacaacaaggccatggaactagactgccttttagggatctccaatgagttcattgtgctcattgaacaggaaacaaagagcgtggtcttcaattgttcctgtagagatgtgatagggtggacttcaactgacaccagcctcaaaatcttctatgaacgaggagaatgtgtttcagtgggtagttttattaacattgaggagatcaaagagattgtcaaaaggttgcagtttgtttcaaaaggctgtgaatcggtggagatgactctgcgaagaaatgggctaggacagcttggcttccatgtcaactatgagggcattgtggcggatgtggagccctacggttatgcctggcaggcagggctgaggcagggcagtcgcctggtggagatctgcaaggtggcggtagccactctgagccatgagcagatgatcgacctcctgagaacatctgtcacggtgaaggttgtcatcattcccccgcatgatgactgcaccccgcggaggagttgctctgaaacctaccgcatgccagtgatggagtacaaaatgaatgaaggtgtttcatacgaattcaagtttcccttccgaaataataacaagtggcagaggaacgccagcaaggggcctcattcacctcaagtcccgtcccaggtgcagagtcccatgacctcgcggctgaatgctggaaaaggagatgggaagatgcctcctccagaaagagccgccaacatccctcgaagcatctccagtgacgggcgcccactagagaggcggctgtctcctggttcggacatctatgtgacggtctcatccatggctttagcaagatcccagtgtcggaactctcctagcaacttgtcttcatccagtgatactggttctgtggggggcacttacaggcagaagtccatgcccgaagggtttggagtgagccgtagatccccagcctccattgacaggcagaacacccagtcagatattggtggcagcggaaaatccacgcctagctggcaaagaagtgaggatagcattgctgaccagatggagccaacatgccatctcccagcagtatcaaaggtactgccagctttccgagagagccccagtgggagattaatgcggcaggatccagtggttcatttgtctccaaacaaacaagggcattctgatagccactactcgagccactccagtagcaatactctctccagcaatgcgtcaagtgcccatagtgatgagaagtggtacgatggggaccgcacagaatccgaactcaacagctataactatctgcaaggcacctctgctgacagtggcattgacaccacctcttatggccccagccacggcagcacagcctcgctgggggctgccacatcgtcacctcgctcagggccaggcaaggagaaagtggcacccctatggcacagctccagtgaagtaatctccatggcagatcggactttggagacagagagccacggcctggaccggaaaacagagtcttccctgagcttagacatacacagcaagagccaagccggctcgacccctctgacaagggagaacagcaccttcagtataaacgatgctgcttcccacacaagtaccatgagctcccgacactctgccagcccagtggttttcaccagtgcccggagttcacctaaagaagagcttcatccagctgccccctcacagctcgcaccatccttctcctcctcttcctcctcctcctctggtcctaggagtttttaccctcgccagggcgctactagcaagtacctgattggatggaaaaaacccgaaggaaccataaactccgtgggatttatggacacgagaaagcgtcatcagagcgatggcaatgaaatagcccacaccaggctgcgtgcctcaaccagagacctccgggcatctcctaagccaacctccaagtccaccattgaagaagatctaaagaaactaattgatcttgaaagcccaactcctgaatcacagaagagttttaagttccacgcactctcctctcctcagtctcctttccccagcacccccacctcacggcgggccttgcacagaacactgtcggacgagagcatttacaatagccagagggagcactttttcacctccagggcgtcacttctggaccaagccctgcccaacgacgtcctcttcagtagcacgtacccttctctccccaagtcgctcccgttgaggaggccttcttacaccttaggaatgaaatcgctgcatggagagttctcagcctcggacagctccctcactgacatccaggagacccgcaggcagcctatgcccgaccctggcctgatgcccctgcctgacactgctgcagacttggattggtccaacctggtagatgctgccaaagcctatgaggtccagagagcctcattttttgctgctagtgatgaaaaccatcgccccttgagtgctgcatccaacagtgatcagctggaggaccaggctctggcccagatgaagccttacagcagtaaagactcctctcccactctggcttctaaagtggaccagctggaaggtatgctgaagatgcttcgggaagatttgaagaaggaaaaagaagacaaagctcaccttcaggcggaggtgcagcacctgcgagaggacaacctgaggctacaggaggagtcccagaacgcctcggacaagctgaagaagttcacagaatgggtcttcaacaccatagacatgagctagggaaggctgaggaggacaggagaagggcccagacactccctccagtgagtgtcctgcagcccttattccctccatagaaagcatcctcagagcaccttccctggcttcctactctgccccctttcggggagtgcacaacacaatagttgcagatcaacaatcatcacctgccttttgtagaaaagaaaaacaaaaaaagtaaataaaaattttaaacagtaaaataaaagtttaactgct

SEQ ID NO: 181656 - DNA, 5944 bp, Homo sapiens
  Payload ID: 15777
  Gene Symbol: SIPA1L1
  Gene Name: signal-induced proliferation-associated 1 like 1
  Uniprot ID: O43166
  ENST ID: ENST00000381232
  CDS Start-End: 349-5700
ggtgtggacgttgtctaaatttcggtagccatggcacaagaatataagaaagcatgggattatggcaaccacagaatctcagtagtacaagttccattcagttttttctgaaagaaagccctctgttaaagtgaagcaaagaaactgttgtggattataacgtttagaagttccaatttttcagtgctttacaaataaagcatcatttaaccttttaaatgaaaaagattaagatctcatgcaactgttgtattttctggaagccattctccaaaagggaagtgcacatttaaaacacagatatgatggtccttgctgcagggatttaagtctacttgcttttacatcatgaccagcttgaaacggtcacagacagaaaggcctcttgccactgacagggcctctgttgttggcacagacggcacccccaaagtccacactgatgatttctacatgcggcgcttccggtcccaaaatggcagcttaggatcatcagttatggctcctgtaggacccccccgaagtgaaggttctcaccatataacctcaacccccggagtcccaaaaatgggggtaagggcaaggattgcagattggcccccaagaaaggaaaacataaaagaatctagccgttcaagccaggaaatagaaacctcaagttgccttgatagcctgtcctccaaaagcagtcctgtgagtcagggaagttctgttagcctcaattccaatgactcagccatgctgaaaagcatacagaacacgctgaaaaacaagacaagaccgtcggagaacatggactccagatttctcatgcctgaagcctaccccagctcccccagaaaagctcttcgcagaatacgccagcgaagcaacagtgatatcaccataagtgaacttgatgtggatagctttgatgaatgtatctcacctacatacaagactggaccatcactgcacagggaatatggtagcacatcttcaattgataaacagggaacatctggagaaagcttttttgatttgttaaagggctacaaagatgacaaatctgatcgaggtccaactccaaccaagctcagtgactttctcattactggtggtggcaagggttctggtttctctttggatgtaatagacgggcctatctcacagagagagaacctcaggctttttaaggaaagggaaaaaccactcaagcgacgttcaaaatctgaaactggagactcatctatttttcgtaaattgcgcaatgccaaaggtgaagaacttgggaagtcatcagatcttgaagataaccgatcagaagactctgtcaggccctggacatgtccaaagtgctttgcccactatgatgtccagagtatattatttgatttgaatgaggcaattatgaacaggcacaatgttattaagaggagaaacaccaccactggagcttccgcagctgccgtggcatccttggtctctggacctctgtctcattcagccagttttagctccccaatgggcagcacagaggacctgaattccaaaggaagcctcagcatggaccagggagatgataaaagcaatgagcttgtaatgagctgtccatattttcggaatgagataggtggagaaggggagaggaaaatcagcctttcaaaatcaaattctggctcctttagtggatgtgaaagtgcctcctttgagtctacccttagttcccattgcacaaatgcaggagtggcagtacttgaagtgcccaaggagaacttggtgttgcacctagatagagtgaaaagatacatcgtggaacacgtagatctgggtgcatactattatagaaaatttttctaccagaaggaacactggaactattttggggctgatgagaatcttggtccagtggctgtgagcattcgaagggaaaaaccagatgaaatgaaagaaaatggatctccgtacaactaccgaataatttttagaactagtgagctcatgacactgagaggttcggtcctggaggacgccattccgtcgacagccaagcactcgacagccagaggcctgcctctcaaagaagtgctggagcacgtggttcctgagctcaatgtccagtgcctgcggttggccttcaacacacccaaggtcacagagcagctcatgaaactggatgaacaagggctgaactaccagcagaaagtaggcatcatgtactgcaaagctggacagagcactgaagaagagatgtacaacaatgagtcagctggcccagcctttgaagaatttcttcaactattgggagagcgagttcggctcaaaggatttgagaagtatcgagcacagcttgataccaaaactgactccactggaacccattctctgtacacaacatacaaagattatgaaattatgttccatgtttctaccatgctgccatacacacccaacaacaaacaacagctcctgaggaagcggcacattggaaatgatatcgtaacaattgttttccaagagcctggagcacagccattcagcccaaaaaacatccgatcccacttccagcacgttttcgtcatcgtcagggtgcacaatccgtgctctgacagtgtctgttatagtgtggctgttaccaggtccagagatgtgccttcctttgggcctcccattcctaaaggggtcactttccctaagtcaaatgtgttcagggacttccttttggcgaaagtgattaatgcagaaaatgctgctcataaatcggagaagtttcgggccatggcaactcggacccgccaggaatacctgaaagatctggcagaaaagaatgtcaccaacacccctatcgacccttctggcaagtttccgttcatctctctggcttccaagaagaaggaaaagtctaagccatatccaggagccgagctcagcagcatgggggccattgtatgggcagtccgggctgaagactacaacaaggccatggaactagactgccttttagggatctccaatgagttcattgtgctcattgaacaggaaacaaagagcgtggtcttcaattgttcctgtagagatgtgatagggtggacttcaactgacaccagcctcaaaatcttctatgaacgaggagaatgtgtttcagtgggtagttttattaacattgaggagatcaaagagattgtcaaaaggttgcagtttgtttcaaaaggctgtgaatcggtggagatgactctgcgaagaaatgggctaggacagcttggcttccatgtcaactatgagggcattgtggcggatgtggagccctacggttatgcctggcaggcagggctgaggcagggcagtcgcctggtggagatctgcaaggtggcggtagccactctgagccatgagcagatgatcgacctcctgagaacatctgtcacggtgaaggttgtcatcattcccccgcatgatgactgcaccccgcggaggagttgctctgaaacctaccgcatgccagtgatggagtacaaaatgaatgaaggtgtttcatacgaattcaagtttcccttccgaaataataacaagtggcagaggaacgccagcaaggggcctcattcacctcaagtcccgtcccaggtgcagagtcccatgacctcgcggctgaatgctggaaaaggagatgggaagatgcctcctccagaaagagccgccaacatccctcgaagcatctccagtgacgggcgcccactagagaggcggctgtctcctggttcggacatctatgtgacggtctcatccatggctttagcaagatcccagtgtcggaactctcctagcaacttgtcttcatccagtgatactggttctgtggggggcacttacaggcagaagtccatgcccgaagggtttggagtgagccgtagatccccagcctccattgacaggcagaacacccagtcagatattggtggcagcggaaaatccacgcctagctggcaaagaagtgaggatagcattgctgaccagatggagccaacatgccatctcccagcagtatcaaaggtactgccagctttccgagagagccccagtgggagattaatgcggcaggatccagtggttcatttgtctccaaacaaacaagggcattctgatagccactactcgagccactccagtagcaatactctctccagcaatgcgtcaagtgcccatagtgatgagaagtggtacgatggggaccgcacagaatccgaactcaacagctataactatctgcaaggcacctctgctgacagtggcattgacaccacctcttatggccccagccacggcagcacagcctcgctgggggctgccacatcgtcacctcgctcagggccaggcaaggagaaagtggcacccctatggcacagctccagtgaagtaatctccatggcagatcggactttggagacagagagccacggcctggaccggaaaacagagtcttccctgagcttagacatacacagcaagagccaagccggctcgacccctctgacaagggagaacagcaccttcagtataaacgatgctgcttcccacacaagtaccatgagctcccgacactctgccagcccagtggttttcaccagtgcccggagttcacctaaagaagagcttcatccagctgccccctcacagctcgcaccatccttctcctcctcttcctcctcctcctctggtcctaggagtttttaccctcgccagggcgctactagcaagtacctgattggatggaaaaaacccgaaggaaccataaactccgtgggatttatggacacgagaaagcgtcatcagagcgatggcaatgaaatagcccacaccaggctgcgtgcctcaaccagagacctccgggcatctcctaagccaacctccaagtccaccattgaagaagatctaaagaaactaattgatcttgaaagcccaactcctgaatcacagaagagttttaagttccacgcactctcctctcctcagtctcctttccccagcacccccacctcacggcgggccttgcacagaacactgtcggacgagagcatttacaatagccagagggagcactttttcacctccagggcgtcacttctggaccaagccctgcccaacgacgtcctcttcagtagcacgtacccttctctccccaagtcgctcccgttgaggaggccttcttacaccttaggaatgaaatcgctgcatggagagttctcagcctcggacagctccctcactgacatccaggagacccgcaggcagcctatgcccgaccctggcctgatgcccctgcctgacactgctgcagacttggattggtccaacctggtagatgctgccaaagcctatgaggtccagagagcctcattttttgctgctagtgatgaaaaccatcgccccttgagtgctgcatccaacagtgatcagctggaggaccaggctctggcccagatgaagccttacagcagcagtaaagactcctctcccactctggcttctaaagtggaccagctggaaggtatgctgaagatgcttcgggaagatttgaagaaggaaaaagaagacaaagctcaccttcaggcggaggtgcagcacctgcgagaggacaacctgaggctacaggaggagtcccagaacgcctcggacaagctgaagaagttcacagaatgggtcttcaacaccatagacatgagctagggaaggctgaggaggacaggagaagggcccagacactccctccagtgagtgtcctgcagcccttattccctccatagaaagcatcctcagagcaccttccctggcttcctactctgccccctttcggggagtgcacaacacaatagttgcagatcaacaatcatcacctgccttttgtagaaaagaaaaacaaaaaaagtaaataaaaattttaaacagtaaaataaaagtttaactgctaaaa

SEQ ID NO: 181657 - DNA, 4129 bp, Homo sapiens
  Payload ID: 15777
  Gene Symbol: SIPA1L1
  Gene Name: signal-induced proliferation-associated 1 like 1
  ENST ID: ENST00000537413
  CDS Start-End: 176-3949
attgtaaactttactggacacaactgatggaagctaaaatcagtgaatgactgtttcaggagaaatgggaggagaagcaggatttgcatgatctccagaacactggaactattttggggctgatgagaatcttggtccagtggctgtgagcattcgaagggaaaaaccagatgaaatgaaagaaaatggatctccgtacaactaccgaataatttttagaactagtgagctcatgacactgagaggttcggtcctggaggacgccattccgtcgacagccaagcactcgacagccagaggcctgcctctcaaagaagtgctggagcacgtggttcctgagctcaatgtccagtgcctgcggttggccttcaacacacccaaggtcacagagcagctcatgaaactggatgaacaagggctgaactaccagcagaaagtaggcatcatgtactgcaaagctggacagagcactgaagaagagatgtacaacaatgagtcagctggcccagcctttgaagaatttcttcaactattgggagagcgagttcggctcaaaggatttgagaagtatcgagcacagcttgataccaaaactgactccactggaacccattctctgtacacaacatacaaagattatgaaattatgttccatgtttctaccatgctgccatacacacccaacaacaaacaacagctcctgaggaagcggcacattggaaatgatatcgtaacaattgttttccaagagcctggagcacagccattcagcccaaaaaacatccgatcccacttccagcacgttttcgtcatcgtcagggtgcacaatccgtgctctgacagtgtctgttatagtgtggctgttaccaggtccagagatgtgccttcctttgggcctcccattcctaaaggggtcactttccctaagtcaaatgtgttcagggacttccttttggcgaaagtgattaatgcagaaaatgctgctcataaatcggagaagtttcgggccatggcaactcggacccgccaggaatacctgaaagatctggcagaaaagaatgtcaccaacacccctatcgacccttctggcaagtttccgttcatctctctggcttccaagaagaaggaaaagtctaagccatatccaggagccgagctcagcagcatgggggccattgtatgggcagtccgggctgaagactacaacaaggccatggaactagactgccttttagggatctccaatgagttcattgtgctcattgaacaggaaacaaagagcgtggtcttcaattgttcctgtagagatgtgatagggtggacttcaactgacaccagcctcaaaatcttctatgaacgaggagaatgtgtttcagtgggtagttttattaacattgaggagatcaaagagattgtcaaaaggttgcagtttgtttcaaaaggctgtgaatcggtggagatgactctgcgaagaaatgggctaggacagcttggcttccatgtcaactatgagggcattgtggcggatgtggagccctacggttatgcctggcaggcagggctgaggcagggcagtcgcctggtggagatctgcaaggtggcggtagccactctgagccatgagcagatgatcgacctcctgagaacatctgtcacggtgaaggttgtcatcattcccccgcatgatgactgcaccccgcggaggagttgctctgaaacctaccgcatgccagtgatggagtacaaaatgaatgaaggtgtttcatacgaattcaagtttcccttccgaaataataacaagtggcagaggaacgccagcaaggggcctcattcacctcaagtcccgtcccaggtgcagagtcccatgacctcgcggctgaatgctggaaaaggagatgggaagatgcctcctccagaaagagccgccaacatccctcgaagcatctccagtgacgggcgcccactagagaggcggctgtctcctggttcggacatctatgtgacggtctcatccatggctttagcaagatcccagtgtcggaactctcctagcaacttgtcttcatccagtgatactggttctgtggggggcacttacaggcagaagtccatgcccgaagggtttggagtgagccgtagatccccagcctccattgacaggcagaacacccagtcagatattggtggcagcggaaaatccacgcctagctggcaaagaagtgaggatagcattgctgaccagatggagccaacatgccatctcccagcagtatcaaaggtactgccagctttccgagagagccccagtgggagattaatgcggcaggatccagtggttcatttgtctccaaacaaacaagggcattctgatagccactactcgagccactccagtagcaatactctctccagcaatgcgtcaagtgcccatagtgatgagaagtggtacgatggggaccgcacagaatccgaactcaacagctataactatctgcaaggcacctctgctgacagtggcattgacaccacctcttatggccccagccacggcagcacagcctcgctgggggctgccacatcgtcacctcgctcagggccaggcaaggagaaagtggcacccctatggcacagctccagtgaagtaatctccatggcagatcggactttggagacagagagccacggcctggaccggaaaacagagtcttccctgagcttagacatacacagcaagagccaagccggctcgacccctctgacaagggagaacagcaccttcagtataaacgatgctgcttcccacacaagtaccatgagctcccgacactctgccagcccagtggttttcaccagtgcccggagttcacctaaagaagagcttcatccagctgccccctcacagctcgcaccatccttctcctcctcttcctcctcctcctctggtcctaggagtttttaccctcgccagggcgctactagcaagtacctgattggatggaaaaaacccgaaggaaccataaactccgtgggatttatggacacgagaaagcgtcatcagagcgatggcaatgaaatagcccacaccaggctgcgtgcctcaaccagagacctccgggcatctcctaagccaacctccaagtccaccattgaagaagatctaaagaaactaattgatcttgaaagcccaactcctgaatcacagaagagttttaagttccacgcactctcctctcctcagtctcctttccccagcacccccacctcacggcgggccttgcacagaacactgtcggacgagagcatttacaatagccagagggagcactttttcacctccagggcgtcacttctggaccaagccctgcccaacgacgtcctcttcagtagcacgtacccttctctccccaagtcgctcccgttgaggaggccttcttacaccttaggaatgaaatcgctgcatggagagttctcagcctcggacagctccctcactgacatccaggagacccgcaggcagcctatgcccgaccctggcctgatgcccctgcctgacactgctgcagacttggattggtccaacctggtagatgctgccaaagcctatgaggtccagagagcctcattttttgctgctagtgatgaaaaccatcgccccttgagtgctgcatccaacagtgatcagctggaggaccaggctctggcccagatgaagccttacagcagtaaagactcctctcccactctggcttctaaagtggaccagctggaaggtatgctgaagatgcttcgggaagatttgaagaaggaaaaagaagacaaagctcaccttcaggcggaggtgcagcacctgcgagaggacaacctgaggctacaggaggagtcccagaacgcctcggacaagctgaagaagttcacagaatgggtcttcaacaccatagacatgagctagggaaggctgaggaggacaggagaagggcccagacactccctccagtgagtgtcctgcagcccttattccctccatagaaagcatcctcagagcaccttccctggcttcctactctgccccctttcggggagtgcacaacacaatagttgcagatcaacaatcatcacctgccttttgtag

SEQ ID NO: 181658 - DNA, 7831 bp, Homo sapiens
  Payload ID: 15777
  Gene Symbol: SIPA1L1
  Gene Name: signal-induced proliferation-associated 1 like 1
  Uniprot ID: O43166
  ENST ID: ENST00000555818
  CDS Start-End: 349-5763
ggtgtggacgttgtctaaatttcggtagccatggcacaagaatataagaaagcatgggattatggcaaccacagaatctcagtagtacaagttccattcagttttttctgaaagaaagccctctgttaaagtgaagcaaagaaactgttgtggattataacgtttagaagttccaatttttcagtgctttacaaataaagcatcatttaaccttttaaatgaaaaagattaagatctcatgcaactgttgtattttctggaagccattctccaaaagggaagtgcacatttaaaacacagatatgatggtccttgctgcagggatttaagtctacttgcttttacatcatgaccagcttgaaacggtcacagacagaaaggcctcttgccactgacagggcctctgttgttggcacagacggcacccccaaagtccacactgatgatttctacatgcggcgcttccggtcccaaaatggcagcttaggatcatcagttatggctcctgtaggacccccccgaagtgaaggttctcaccatataacctcaacccccggagtcccaaaaatgggggtaagggcaaggattgcagattggcccccaagaaaggaaaacataaaagaatctagccgttcaagccaggaaatagaaacctcaagttgccttgatagcctgtcctccaaaagcagtcctgtgagtcagggaagttctgttagcctcaattccaatgactcagccatgctgaaaagcatacagaacacgctgaaaaacaagacaagaccgtcggagaacatggactccagatttctcatgcctgaagcctaccccagctcccccagaaaagctcttcgcagaatacgccagcgaagcaacagtgatatcaccataagtgaacttgatgtggatagctttgatgaatgtatctcacctacatacaagactggaccatcactgcacagggaatatggtagcacatcttcaattgataaacagggaacatctggagaaagcttttttgatttgttaaagggctacaaagatgacaaatctgatcgaggtccaactccaaccaagctcagtgactttctcattactggtggtggcaagggttctggtttctctttggatgtaatagacgggcctatctcacagagagagaacctcaggctttttaaggaaagggaaaaaccactcaagcgacgttcaaaatctgaaactggagactcatctatttttcgtaaattgcgcaatgccaaaggtgaagaacttgggaagtcatcagatcttgaagataaccgatcagaagactctgtcaggccctggacatgtccaaagtgctttgcccactatgatgtccagagtatattatttgatttgaatgaggcaattatgaacaggcacaatgttattaagaggagaaacaccaccactggagcttccgcagctgccgtggcatccttggtctctggacctctgtctcattcagccagttttagctccccaatgggcagcacagaggacctgaattccaaaggaagcctcagcatggaccagggagatgataaaagcaatgagcttgtaatgagctgtccatattttcggaatgagataggtggagaaggggagaggaaaatcagcctttcaaaatcaaattctggctcctttagtggatgtgaaagtgcctcctttgagtctacccttagttcccattgcacaaatgcaggagtggcagtacttgaagtgcccaaggagaacttggtgttgcacctagatagagtgaaaagatacatcgtggaacacgtagatctgggtgcatactattatagaaaatttttctaccagaaggaacactggaactattttggggctgatgagaatcttggtccagtggctgtgagcattcgaagggaaaaaccagatgaaatgaaagaaaatggatctccgtacaactaccgaataatttttagaactagtgagctcatgacactgagaggttcggtcctggaggacgccattccgtcgacagccaagcactcgacagccagaggcctgcctctcaaagaagtgctggagcacgtggttcctgagctcaatgtccagtgcctgcggttggccttcaacacacccaaggtcacagagcagctcatgaaactggatgaacaagggctgaactaccagcagaaagtaggcatcatgtactgcaaagctggacagagcactgaagaagagatgtacaacaatgagtcagctggcccagcctttgaagaatttcttcaactattgggagagcgagttcggctcaaaggatttgagaagtatcgagcacagcttgataccaaaactgactccactggaacccattctctgtacacaacatacaaagattatgaaattatgttccatgtttctaccatgctgccatacacacccaacaacaaacaacagctcctgaggaagcggcacattggaaatgatatcgtaacaattgttttccaagagcctggagcacagccattcagcccaaaaaacatccgatcccacttccagcacgttttcgtcatcgtcagggtgcacaatccgtgctctgacagtgtctgttatagtgtggctgttaccaggtccagagatgtgccttcctttgggcctcccattcctaaaggggtcactttccctaagtcaaatgtgttcagggacttccttttggcgaaagtgattaatgcagaaaatgctgctcataaatcggagaagtttcgggccatggcaactcggacccgccaggaatacctgaaagatctggcagaaaagaatgtcaccaacacccctatcgacccttctggcaagtttccgttcatctctctggcttccaagaagaaggaaaagtctaagccatatccaggagccgagctcagcagcatgggggccattgtatgggcagtccgggctgaagactacaacaaggccatggaactagactgccttttagggatctccaatgagttcattgtgctcattgaacaggaaacaaagagcgtggtcttcaattgttcctgtagagatgtgatagggtggacttcaactgacaccagcctcaaaatcttctatgaacgaggagaatgtgtttcagtgggtagttttattaacattgaggagatcaaagagattgtcaaaaggttgcagtttgtttcaaaaggctgtgaatcggtggagatgactctgcgaagaaatgggctaggacagcttggcttccatgtcaactatgagggcattgtggcggatgtggagccctacggttatgcctggcaggcagggctgaggcagggcagtcgcctggtggagatctgcaaggtggcggtagccactctgagccatgagcagatgatcgacctcctgagaacatctgtcacggtgaaggttgtcatcattcccccgcatgatgactgcaccccgcggaggagttgctctgaaacctaccgcatgccagtgatggagtacaaaatgaatgaaggtgtttcatacgaattcaagtttcccttccgaaataataacaagtggcagaggaacgccagcaaggggcctcattcacctcaagtcccgtcccaggtgcagagtcccatgacctcgcggctgaatgctggaaaaggagatgggaagatgcctcctccagaaagagccgccaacatccctcgaagcatctccagtgacgggcgcccactagagaggcggctgtctcctggttcggacatctatgtgacggtctcatccatggctttagcaagatcccagtgtcggaactctcctagcaacttgtcttcatccagtgatactggttctgtggggggcacttacaggcagaagtccatgcccgaagggtttggagtgagccgtagatccccagcctccattgacaggcagaacacccagtcagatattggtggcagcggaaaatccacgcctagctggcaaagaagtgaggatagcattgctgaccagatggcttacagttatagaggacctcaggatttcaattcttttgtcctcgagcagcatgaatatacagagccaacatgccatctcccagcagtatcaaaggtactgccagctttccgagagagccccagtgggagattaatgcggcaggatccagtggttcatttgtctccaaacaaacaagggcattctgatagccactactcgagccactccagtagcaatactctctccagcaatgcgtcaagtgcccatagtgatgagaagtggtacgatggggaccgcacagaatccgaactcaacagctataactatctgcaaggcacctctgctgacagtggcattgacaccacctcttatggccccagccacggcagcacagcctcgctgggggctgccacatcgtcacctcgctcagggccaggcaaggagaaagtggcacccctatggcacagctccagtgaagtaatctccatggcagatcggactttggagacagagagccacggcctggaccggaaaacagagtcttccctgagcttagacatacacagcaagagccaagccggctcgacccctctgacaagggagaacagcaccttcagtataaacgatgctgcttcccacacaagtaccatgagctcccgacactctgccagcccagtggttttcaccagtgcccggagttcacctaaagaagagcttcatccagctgccccctcacagctcgcaccatccttctcctcctcttcctcctcctcctctggtcctaggagtttttaccctcgccagggcgctactagcaagtacctgattggatggaaaaaacccgaaggaaccataaactccgtgggatttatggacacgagaaagcgtcatcagagcgatggcaatgaaatagcccacaccaggctgcgtgcctcaaccagagacctccgggcatctcctaagccaacctccaagtccaccattgaagaagatctaaagaaactaattgatcttgaaagcccaactcctgaatcacagaagagttttaagttccacgcactctcctctcctcagtctcctttccccagcacccccacctcacggcgggccttgcacagaacactgtcggacgagagcatttacaatagccagagggagcactttttcacctccagggcgtcacttctggaccaagccctgcccaacgacgtcctcttcagtagcacgtacccttctctccccaagtcgctcccgttgaggaggccttcttacaccttaggaatgaaatcgctgcatggagagttctcagcctcggacagctccctcactgacatccaggagacccgcaggcagcctatgcccgaccctggcctgatgcccctgcctgacactgctgcagacttggattggtccaacctggtagatgctgccaaagcctatgaggtccagagagcctcattttttgctgctagtgatgaaaaccatcgccccttgagtgctgcatccaacagtgatcagctggaggaccaggctctggcccagatgaagccttacagcagcagtaaagactcctctcccactctggcttctaaagtggaccagctggaaggtatgctgaagatgcttcgggaagatttgaagaaggaaaaagaagacaaagctcaccttcaggcggaggtgcagcacctgcgagaggacaacctgaggctacaggaggagtcccagaacgcctcggacaagctgaagaagttcacagaatgggtcttcaacaccatagacatgagctagggaaggctgaggaggacaggagaagggcccagacactccctccagtgagtgtcctgcagcccttattccctccatagaaagcatcctcagagcaccttccctggcttcctactctgccccctttcggggagtgcacaacacaatagttgcagatcaacaatcatcacctgccttttgtagaaaagaaaaacaaaaaaagtaaataaaaattttaaacagtaaaataaaagtttaactgctaaaatgtgaatgtctttatttttttgcacaatatctttatctgttatgtatttaagaagaaactgggccttggaccagggcgccccctggcccatccgcctctattcccatcagctttcttatcaacttcaggtaacccaagctttcccttgttattctaacaaatatcattattcctagaaaaagaatgtttttataacttgtttggggagtagagagggatatttccttaccttcttccctaaaatgcctggagagggagttgctttgagaaaatgcctacctcccttgaatgactcgtgcatgagctagtgctgtctgtacctgtcctccagagatcagcaggaccggagttaaatatttaacagcaagtctgtaaaccagagcagctctgacagtgcctgcaggccacaccccttctcagtcctgcattgtgaggtcatttcctgcttctccctttccccaggaagatggtcccacttgtgctgcaagactcttttttgtttggcttaattgagccccactaaattggaatcaatctctcttacagcttcctggctccaaacattaattgatttcagaattcccccaaactaaaaccttatctgtctgcattttgaatgcattttggtcaaaagtatacgttttaaagatttttaaagataaaaatgtggcacaactggtttttttagcttgctgaaaatgaccatatctctaaattaatctttctctccagagcaagacttcaccagtatttgtaactaggagaagctaacagtgaatgtttaattgtgaattttaatcattgcttgttaggaataatgactgtgatactagaatgggcttttgaaacctgcatgtcccagtgtgaaatttcagcacggcattttctgcatcctttcatggccatccaaaggattccgctgcagaaattattgatgtgctatttttgctgtcttgtgatgcaggctgctttgggcccctgggtcactcttccaaggctgctgtagagcacagagacatggggctggccagtgttgactgacctgaggagacccctttgtttgttgccttcataactgtcactaaaccgacccctctgccctttcagtggcaactctggtctaagggaacattcagcactctagcggcatctgattggaagttccctcacccaagtaatctcaattccttcctctctccatccctgaaagaaacaggatggattttcctctcttctccctgctacattcactaccagatttttatgctacagtttcattcttgattgtgatttctccatggaattttttttttctggtgacatttctatcatggaaataggaagatttcggagtgctttgtgaagatttcaattgtctgtctctttctctctttgacttgtatgaaggagattgtacattgcctgatatctctttgtaaatgagaaatattgctaacatccaagcattctgaagtcttgcttatccttctgagtttagttctcattttgttttacattttgtttggggacttggggcaagctatttattagagttttgcaacagagttcttgtttgaagcctctaaagactacctgtaaaattcaaagaataaaattcattttaaacgctcttttaaaacactttggtattattgcttgaggtttgcttatttgaaagaccacccaataactcattgaccctccttgcatccgaattttttcatcaagctttgttaacactaatgatgattcttgaaaatttctgtccttctcagaatgttaataaacttttttactctgtccacatgtcgatagagaattact

SEQ ID NO: 181659 - DNA, 744 bp, Homo sapiens
  Payload ID: 15777
  Gene Symbol: SIPA1L1
  Gene Name: signal-induced proliferation-associated 1 like 1
  ENST ID: ENST00000557151
  CDS Start-End: 648-744
gcaccccagaacccgaatctgcacaactactgggcaggcgtctctgcgggaggccaggagacccgcgtcccggtccgggcggttgcgtccaccccgctgagctggtcgccacctggcgacccttcccctccagtcacctgggccctccctatcctgaagacattagctgagagtctggcaccttttaaaggtctgatcatcaattgtctctctgggcggccacctatgagacttcatctgtgtgctttataaatagcagtccagggcaacagtacttgataaaaaggttataccttattggtgtggacgttgtctaaatttcggtagccatggcacaagaatataagaaagcatgggattatggcaaccacagaatctcagtagtacaagttccattcagttttttctgaaagaaagccctctgttaaagtgaagcaaagaaactgttgtggattataacgtttagaagttccaatttttcagtgctttacaaataaagcatcatttaaccttttaaatgaaaaagattaagatctcatgcaactgttgtattttctggaagccattctccaaaagggaagtgcacatttaaaacacagatatgatggtccttgctgcagggatttaagtctacttgcttttacatcatgaccagcttgaaacggtcacagacagaaaggcctcttgccactgacagggcctctgttgttggcacagacggcacccccaaagtccacactgatg

SEQ ID NO: 181660 - DNA, 785 bp, Homo sapiens
  Payload ID: 15777
  Gene Symbol: SIPA1L1
  Gene Name: signal-induced proliferation-associated 1 like 1
  ENST ID: ENST00000555066
  CDS Start-End: 1-785
gaacactggaactattttggggctgatgagaatcttggtccagtggctgtgagcattcgaagggaaaaaccagatgaaatgaaagaaaatggatctccgtacaactaccgaataatttttagaactagtgagctcatgacactgagaggttcggtcctggaggacgccattccgtcgacagccaagcactcgacagccagaggcctgcctctcaaagaagtgctggagcacgtggttcctgagctcaatgtccagtgcctgcggttggccttcaacacacccaaggtcacagagcagctcatgaaactggatgaacaagggtggatctgcctatatttatatgcatcgtattacctgccttcacagctgaactaccagcagaaagtaggcatcatgtactgcaaagctggacagagcactgaagaagagatgtacaacaatgagtcagctggcccagcctttgaagaatttcttcaactattgggagagcgagttcggctcaaaggatttgagaagtatcgagcacagcttgataccaaaactgactccactggaacccattctctgtacacaacatacaaagattatgaaattatgttccatgtttctaccatgctgccatacacacccaacaacaaacaacagctcctgaggaagcggcacattggaaatgatatcgtaacaattgttttccaagagcctggagcacagccattcagcccaaaaaacatccgatcccacttccagcacgttttcgtcatcgtcagggtgcacaatccgtgctc

SEQ ID NO: 181661 - DNA, 6555 bp, Homo sapiens
  Payload ID: 15778
  Gene Symbol: SIPA1L2
  Gene Name: signal-induced proliferation-associated 1 like 2
  Uniprot ID: Q9P2F8
  ENST ID: ENST00000262861
  CDS Start-End: 228-5396
cttttgaaaagaacagaggcgtacaacattattacgacaacagagaagcaagttggctttgaagaaactgtattctgaggatgttgtttgctttgggctaagaaaagaaaaaatacaactacagacaaagcctttatatctgcaagtattatggcgtggtcggtagcaatgtaattagatttacatcagtcttcctggtgagacttggaggctcttcctcggtagacatgagtgacccaaggcagtcacaagaagagaagcacaagctaggcagagcctcttcaaagttcaaggatccccctagaatcatgcagtcagatgattattttgctcggaaatttaaagccattaatggcaacatgggacccactacttctttaaatgcctcgaattccaatgagactggcggtggtggtccggctaatggtaccccagctgtgcccaagatgggtgtgagagcaagggtgtctgaatggcctcctaaaaaggactgttccaaggagctaacatgcaaggcactgtgggaaagccggtctcagaccagttatgaaagcatcacttctgtcctgcagaatgggcagagtgaccagagtgaaggtcagcaagatgaacagctcgatctggacttcgtggaggccaagtacacaatcggagacatctttgtccattccccccaaagaggacttcaccccataagacagaggagcaatagtgatgtcactatcagtgacattgatgccgaagatgtcttagaccaaaatgcagtcaaccccaacaccggggctgccctgcacagggagtatggaagtacttcatccatcgacaggcaaggcttatctggtgaaaacttttttgctatgctcagagggtaccgagtagaaaattatgaccacaaagcaatggtcccttttgggttccctgaatttttccgctgtgaccctgcaatctctccgagccttcatgcagcagcacagatttctaggggagaatttgtccgcatctcaggattagattatgtggacagtgccctcctgatggggagagacagggacaagcctttcaaacggaggttgaaatcagagtcggtggaaacatctctcttccgaaagcttcgaactgttaaaagtgagcacgaaactttcaagttcacgtctgagctggaggagagccgactggagaggggcattcgcccttggaattgtcagcgatgttttgcacattatgatgtccagagcattttgtttaatatcaacgaagccatggctacgagggctaatgtggggaaaaggaaaaacataaccactggggcatctgcagcatcccagactcagatgcctacgggccagacaggcaactgtgagtcccctttagggagcaaggaggacctcaactccaaagagaacctggatgccgatgagggtgatgggaaaagtaacgacctcgtccttagttgtccttactttagaaatgagactggaggggaaggcgacaggcggattgcgctctctcgagccaactcatcctctttcagttctggggaaagctgctctttcgaatcgtcactcagctctcactgcacaaatgcaggtgtctccgtcttggaagtgcccagagaaaaccagcctattcacagggagaaagtgaagcgctacatcatagaacacattgaccttggggcctattattaccgcaaattcttctatgggaaagagcaccaaaactactttggaatagatgaaaaccttggtccagtagcagtcagcatccggagagagaaggtggaagatgccaaggagaaagaaggatcccagttcaactacagggtggctttcaggacaagtgagcttacaacactgagaggagcaattttagaagatgctataccctctactgctaggcatggtaccgcacgaggactacctctcaaagaagttttggaatacgtcattccagagctgagcattcagtgtttgcgacaggcttccaactcacccaaggtctcagagcagctgctcaagcttgatgaacaagggctgagctttcagcacaagatcgggatcctttattgcaaagcaggccagagcacagaggaagagatgtataacaatgagacggcgggaccagcttttgaagaattccttgatcttctgggccagagagtccgactgaaaggatttagtaaatatcgagctcagctagacaataagactgattccacgggcacgcactctctctataccacatacaaagactacgaactcatgttccacgtgtcaaccctgcttccctacatgcccaacaacagacaacagctactgaggaaaaggcacataggaaatgacatcgtcaccatcgtcttccaggagcctggggcacttccttttactccaaaaagcatccggtctcactttcagcatgtctttgtcatagtcaaagtgcataatccatgtaccgaaaatgtgtgttatagtgttggagtttccagatcaaaagatgtgccaccatttggcccaccgattcccaaaggtgtaacttttccaaagtcagccgtgttccgggacttccttttagccaaagtaatcaatgcagaaaatgcagcccataaatcagaaaagtttcgagcaatggccactcgaacgaggcaggagtacttgaaagatctggcggagaactttgtcacaaccgccaccgtggatacctctgtgaagttcagcttcattacgctgggtgcgaagaaaaaggagaaggtaaagccaaggaaggatgcccacttgtttagcattggggccatcatgtggcacgtgatagcccgggacttcggccagtctgctgacattgaatgtcttctcgggatctccaatgagttcatcatgttgattgaaaaggattccaagaatgttgtattcaactgttcctgcagggatgtgattgggtggacatctggattagtgagtatcaaagtgttttacgaaagaggagaatgtgtcctcctgtcctcggtagacaactgtgctgaagacatcagggaaattgttcagcgattagtaatagtgacgagaggctgcgagactgtggaaatgaccctgaggaggaacgggctgggccagcttggcttccatgtgaattttgaaggaattgtcgcagatgtggaaccttttggctttgcctggaaggctggccttcgccaagggagccgcctcgtggagatctgcaaagtagccgtggccactctgacccacgagcagatgatcgacctgctccgtacttctgtgactgtgaaggtggtcatcatccagccccatgatgacggctcgccccgaagagggtgttcagagctctgccggatccctatggtggaatataaactcgacagcgagggcaccccctgcgagtataaaacccccttcaggaggaacaccacgtggcaccgggtgcccactcctgccctgcagcccctctctagagcttcccccatccccggcacgcccgaccggctgccgtgccaacagctgctccagcaggcccaggctgccattcctcgaagcacctccttcgaccggaagctgcccgatggcacgagaagctcacccagcaaccagtcatcctccagcgaccctggacccggcgggagcggaccctggagaccacaagtgggctacgacgggtgccagtcccctctactgctcgaacaccagggctcaggccctttggaatgtgacggagccagggagagggaagacaccatggaagcaagcaggcacccggaaaccaaatggcatggcccaccttccaaagtcctgggttcctataaagaaagagctctgcagaaagatggaagttgcaaagattcccccaataagctttctcacattggggataaaagttgctccagtcactccagcagcaacacgctctccagcaacacctccagcaacagtgacgacaagcactttgggtctggcgacctgatggaccccgaattactggggctgacctacatcaaaggggcctccaccgacagtggcatcgacacggccccctgcatgcctgccaccatcctcggccctgtgcacctggcaggcagcaggtccctgatccacagccgggccgagcagtgggctgatgctgccgacgtctctgggcctgacgacgagccagccaagttatattctgtgcatggctacgcgtccaccatctccgccggcagtgctgcggaaggcagcatgggcgatctcagtgagatatcctctcattccagtggttctcaccattcaggaagcccttcagctcactgttcaaaaagtagtgggtctctggattcatccaaagtctacatcgtgtctcacagcagcggacaacaggttcccgggtccatgtccaagccctaccacagacaaggggcagtgaacaaatatgtcatcggctggaagaaatcggagggcagcccaccgcccgaggagcctgaagtgactgaatgtcccgggatgtatagtgagatggatgtcatgtccacagcaactcagcatcagacagtggtgggagatgctgttgcagagactcaacatgttctgtctaaagaagattttctgaaattgatgcttcctgacagccccttagtggaggaggggcgaagaaagttttcgttctatgggaacctgtctccaaggaggtcgctttaccgcacgctgtctgacgagagcatctgcagcaacaggagggggtcctcctttggcagttcccggagttccgtgcttgaccaggccctgcccaacgacattctgttcagcaccaccccaccctaccacagcacgctgcctccgcgggcccaccccgcacccagcatggggagcctgagaaatgagttctggttctccgatgggtccttatcagataagtccaagtgcgcagatcctggcctgatgcccctcccggacacagccacagggttagattggacccacctcgtggatgctgcacgggcatttgaaggtcttgactcagatgaagaactggggctgctctgtcaccacacgtcctatctagaccagagggtggcatccttctgcaccctgacagatatgcagcatgggcaggacctggaaggggcccaagagctgcccttatgtgtagatccaggcagtggcaaagagttcatggacacaactggggagcgttctccatcaccactgaccgggaaagtcaatcagctggaattaattcttcgacaactccagaccgaccttcggaaggaaaaacaagacaaggccgttctccaagcagaagtgcagcacctgagacaggacaacatgagactgcaggaggagtcccagaccgcgacagctcagctgcggaaattcacagaatggtttttcaccaccatcgacaaaaaatcttagccaatccgcacctcatcaagggaccactgggaaatgccccttgtccctttgaagtcacaaacatgtggtttttctgtgtgctttcaaccaatcgtagatgtttttgctgttccattctgtgtagcaccattcaccacagcaggatagggagcctcgactctttctcggtaaccacggcagagagcagcgccgatgtgaagatgaatgaatgtaactcctggtgtgaagatgaatgtaaaccctggcgacagttgagacctttttcttttagactctgctaaaacagtgctctggcttgggcttacctcaagagggaagatagttgagttttatttcctgtatatcaggtgacctggtagagatgtaaagcaatttaccatagtttgggctttagtattgtaaaataaacatgagaacaaataatcagacatatactttaatgttaaaggtgctctatttttttggatgtacagtagttttatttccacagccacattaccatagcaataagaaaggaggcatagtacatagttggaaaagctttgtggggggattaaaaaaaaaaaaaagcactgttgtgtttaacactagttcagatgcagttaccttagagacttatttatttgcaggaacaaatggtgcctgaatattaacagtgttctgattaaaaacaaaaaaaagatacatatgccttgtaaatggctcaccgagtggtcagtagtcacttcaactcttagttcacttttgtatagttgctctgctggaaagaaatgagagtgaatctgcttactcactagaacttccctgtgtgctgtgagccagcggaaccacttgtacaatgccagatttgtttatctttgtacagaagctttgatgaagtgtcttgtatttaacacccttatttaagcttatttaaccttaaattgttaattttataaaatttggtttggcctgcactacgatgagggatggaggtagctgcaggctcagaagagactgagcttgcacagatcagaccgagaagcagggtgagagattctaacgactggatgctgctagtaacacattgtttgtattgctttaccatttttaactgttagatttgagatgaacatacattttgcttttttaataaatgtttaaaagaagtccacataag

SEQ ID NO: 181662 - DNA, 2937 bp, Homo sapiens
  Payload ID: 15778
  Gene Symbol: SIPA1L2
  Gene Name: signal-induced proliferation-associated 1 like 2
  Uniprot ID: Q9P2F8
  ENST ID: ENST00000308942
  CDS Start-End: 184-2520
acttactgtcataggtcttattaaataggtatctatgtagtcagagcatgtttcatagaaatggagtgttcattaaactgaaacttcatacattgcctctgggcttttggggataggagtatgatacctcccaacttgaaattcccacagataggtgaggtcatagtcatcgggtgatacttaatgagcccatgtttttctttcattggatgtaaactatgctcgatagtgacgagaggctgcgagactgtggaaatgaccctgaggaggaacgggctgggccagcttggcttccatgtgaattttgaaggaattgtcgcagatgtggaaccttttggctttgcctggaaggctggccttcgccaagggagccgcctcgtggagatctgcaaagtagccgtggccactctgacccacgagcagatgatcgacctgctccgtacttctgtgactgtgaaggtggtcatcatccagccccatgatgacggctcgccccgaagagggtgttcagagctctgccggatccctatggtggaatataaactcgacagcgagggcaccccctgcgagtataaaacccccttcaggaggaacaccacgtggcaccgggtgcccactcctgccctgcagcccctctctagagcttcccccatccccggcacgcccgaccggctgccgtgccaacagctgctccagcaggcccaggctgccattcctcgaagcacctccttcgaccggaagctgcccgatggcacgagaagctcacccagcaaccagtcatcctccagcgaccctggacccggcgggagcggaccctggagaccacaagtgggctacgacgggtgccagtcccctctactgctcgaacaccagggctcaggccctttggaatgtgacggagccagggagagggaagacaccatggaagcaagcaggcacccggaaaccaaatggcatggcccaccttccaaagtcctgggttcctataaagaaagagctctgcagaaagatggaagttgcaaagattcccccaataagctttctcacattggggataaaagttgctccagtcactccagcagcaacacgctctccagcaacacctccagcaacagtgacgacaagcactttgggtctggcgacctgatggaccccgaattactggggctgacctacatcaaaggggcctccaccgacagtggcatcgacacggccccctgcatgcctgccaccatcctcggccctgtgcacctggcaggcagcaggtccctgatccacagccgggccgagcagtgggctgatgctgccgacgtctctgggcctgacgacgagccagccaagttatattctgtgcatggctacgcgtccaccatctccgccggcagtgctgcggaaggcagcatgggcgatctcagtgagatatcctctcattccagtggttctcaccattcaggaagcccttcagctcactgttcaaaaagtagtgggtctctggattcatccaaagtctacatcgtgtctcacagcagcggacaacaggttcccgggtccatgtccaagccctaccacagacaaggggcagtgaacaaatatgtcatcggctggaagaaatcggagggcagcccaccgcccgaggagcctgaagtgactgaatgtcccgggatgtatagtgagatggatgtcatgtccacagcaactcagcatcagacagtggtgggagatgctgttgcagagactcaacatgttctgtctaaagaagattttctgaaattgatgcttcctgacagccccttagtggaggaggggcgaagaaagttttcgttctatgggaacctgtctccaaggaggtcgctttaccgcacgctgtctgacgagagcatctgcagcaacaggagggggtcctcctttggcagttcccggagttccgtgcttgaccaggccctgcccaacgacattctgttcagcaccaccccaccctaccacagcacgctgcctccgcgggcccaccccgcacccagcatggggagcctgagaaatgagttctggttctccgatgggtccttatcagataagtccaagtgcgcagatcctggcctgatgcccctcccggacacagccacagggttagattggacccacctcgtggatgctgcacgggcatttgaagaccagagggtggcatccttctgcaccctgacagatatgcagcatgggcaggacctggaaggggcccaagagctgcccttatgtgtagatccaggcagtggcaaagagttcatggacacaactggggagcgttctccatcaccactgaccgggaaagtcaatcagctggaattaattcttcgacaactccagaccgaccttcggaaggaaaaacaagacaaggccgttctccaagcagaagtgcagcacctgagacaggacaacatgagactgcaggaggagtcccagaccgcgacagctcagctgcggaaattcacagaatggtttttcaccaccatcgacaaaaaatcttagccaatccgcacctcatcaagggaccactgggaaatgccccttgtccctttgaagtcacaaacatgtggtttttctgtgtgctttcaaccaatcgtagatgtttttgctgttccattctgtgtagcaccattcaccacagcaggatagggagcctcgactctttctcggtaaccacggcagagagcagcgccgatgtgaagatgaatgaatgtaactcctggtgtgaagatgaatgtaaaccctggcgacagttgagacctttttcttttagactctgctaaaacagtgctctggcttgggcttacctcaagagggaagatagttgagttttatttcctgtatatcaggtgacctggtagagatgtaaagcaatttaccatagtttgggctttagtattgtaaaataaacatgagaac

SEQ ID NO: 181663 - DNA, 6690 bp, Homo sapiens
  Payload ID: 15778
  Gene Symbol: SIPA1L2
  Gene Name: signal-induced proliferation-associated 1 like 2
  Uniprot ID: Q9P2F8
  ENST ID: ENST00000366630
  CDS Start-End: 360-5528
actaggggtgggcattgtgtgtggctcccctgtggtagagaaggacatcggatgaacatgtgatctgtgtatccagctccaacccaaaaggtgaaggaaatactcatgaccagccagatgtcttaaggaatgcttttgaaaagaacagaggcgtacaacattattacgacaacagagaagcaagttggctttgaagaaactgtattctgaggatgttgtttgctttgggctaagaaaagaaaaaatacaactacagacaaagcctttatatctgcaagtattatggcgtggtcggtagcaatgtaattagatttacatcagtcttcctggtgagacttggaggctcttcctcggtagacatgagtgacccaaggcagtcacaagaagagaagcacaagctaggcagagcctcttcaaagttcaaggatccccctagaatcatgcagtcagatgattattttgctcggaaatttaaagccattaatggcaacatgggacccactacttctttaaatgcctcgaattccaatgagactggcggtggtggtccggctaatggtaccccagctgtgcccaagatgggtgtgagagcaagggtgtctgaatggcctcctaaaaaggactgttccaaggagctaacatgcaaggcactgtgggaaagccggtctcagaccagttatgaaagcatcacttctgtcctgcagaatgggcagagtgaccagagtgaaggtcagcaagatgaacagctcgatctggacttcgtggaggccaagtacacaatcggagacatctttgtccattccccccaaagaggacttcaccccataagacagaggagcaatagtgatgtcactatcagtgacattgatgccgaagatgtcttagaccaaaatgcagtcaaccccaacaccggggctgccctgcacagggagtatggaagtacttcatccatcgacaggcaaggcttatctggtgaaaacttttttgctatgctcagagggtaccgagtagaaaattatgaccacaaagcaatggtcccttttgggttccctgaatttttccgctgtgaccctgcaatctctccgagccttcatgcagcagcacagatttctaggggagaatttgtccgcatctcaggattagattatgtggacagtgccctcctgatggggagagacagggacaagcctttcaaacggaggttgaaatcagagtcggtggaaacatctctcttccgaaagcttcgaactgttaaaagtgagcacgaaactttcaagttcacgtctgagctggaggagagccgactggagaggggcattcgcccttggaattgtcagcgatgttttgcacattatgatgtccagagcattttgtttaatatcaacgaagccatggctacgagggctaatgtggggaaaaggaaaaacataaccactggggcatctgcagcatcccagactcagatgcctacgggccagacaggcaactgtgagtcccctttagggagcaaggaggacctcaactccaaagagaacctggatgccgatgagggtgatgggaaaagtaacgacctcgtccttagttgtccttactttagaaatgagactggaggggaaggcgacaggcggattgcgctctctcgagccaactcatcctctttcagttctggggaaagctgctctttcgaatcgtcactcagctctcactgcacaaatgcaggtgtctccgtcttggaagtgcccagagaaaaccagcctattcacagggagaaagtgaagcgctacatcatagaacacattgaccttggggcctattattaccgcaaattcttctatgggaaagagcaccaaaactactttggaatagatgaaaaccttggtccagtagcagtcagcatccggagagagaaggtggaagatgccaaggagaaagaaggatcccagttcaactacagggtggctttcaggacaagtgagcttacaacactgagaggagcaattttagaagatgctataccctctactgctaggcatggtaccgcacgaggactacctctcaaagaagttttggaatacgtcattccagagctgagcattcagtgtttgcgacaggcttccaactcacccaaggtctcagagcagctgctcaagcttgatgaacaagggctgagctttcagcacaagatcgggatcctttattgcaaagcaggccagagcacagaggaagagatgtataacaatgagacggcgggaccagcttttgaagaattccttgatcttctgggccagagagtccgactgaaaggatttagtaaatatcgagctcagctagacaataagactgattccacgggcacgcactctctctataccacatacaaagactacgaactcatgttccacgtgtcaaccctgcttccctacatgcccaacaacagacaacagctactgaggaaaaggcacataggaaatgacatcgtcaccatcgtcttccaggagcctggggcacttccttttactccaaaaagcatccggtctcactttcagcatgtctttgtcatagtcaaagtgcataatccatgtaccgaaaatgtgtgttatagtgttggagtttccagatcaaaagatgtgccaccatttggcccaccgattcccaaaggtgtaacttttccaaagtcagccgtgttccgggacttccttttagccaaagtaatcaatgcagaaaatgcagcccataaatcagaaaagtttcgagcaatggccactcgaacgaggcaggagtacttgaaagatctggcggagaactttgtcacaaccgccaccgtggatacctctgtgaagttcagcttcattacgctgggtgcgaagaaaaaggagaaggtaaagccaaggaaggatgcccacttgtttagcattggggccatcatgtggcacgtgatagcccgggacttcggccagtctgctgacattgaatgtcttctcgggatctccaatgagttcatcatgttgattgaaaaggattccaagaatgttgtattcaactgttcctgcagggatgtgattgggtggacatctggattagtgagtatcaaagtgttttacgaaagaggagaatgtgtcctcctgtcctcggtagacaactgtgctgaagacatcagggaaattgttcagcgattagtaatagtgacgagaggctgcgagactgtggaaatgaccctgaggaggaacgggctgggccagcttggcttccatgtgaattttgaaggaattgtcgcagatgtggaaccttttggctttgcctggaaggctggccttcgccaagggagccgcctcgtggagatctgcaaagtagccgtggccactctgacccacgagcagatgatcgacctgctccgtacttctgtgactgtgaaggtggtcatcatccagccccatgatgacggctcgccccgaagagggtgttcagagctctgccggatccctatggtggaatataaactcgacagcgagggcaccccctgcgagtataaaacccccttcaggaggaacaccacgtggcaccgggtgcccactcctgccctgcagcccctctctagagcttcccccatccccggcacgcccgaccggctgccgtgccaacagctgctccagcaggcccaggctgccattcctcgaagcacctccttcgaccggaagctgcccgatggcacgagaagctcacccagcaaccagtcatcctccagcgaccctggacccggcgggagcggaccctggagaccacaagtgggctacgacgggtgccagtcccctctactgctcgaacaccagggctcaggccctttggaatgtgacggagccagggagagggaagacaccatggaagcaagcaggcacccggaaaccaaatggcatggcccaccttccaaagtcctgggttcctataaagaaagagctctgcagaaagatggaagttgcaaagattcccccaataagctttctcacattggggataaaagttgctccagtcactccagcagcaacacgctctccagcaacacctccagcaacagtgacgacaagcactttgggtctggcgacctgatggaccccgaattactggggctgacctacatcaaaggggcctccaccgacagtggcatcgacacggccccctgcatgcctgccaccatcctcggccctgtgcacctggcaggcagcaggtccctgatccacagccgggccgagcagtgggctgatgctgccgacgtctctgggcctgacgacgagccagccaagttatattctgtgcatggctacgcgtccaccatctccgccggcagtgctgcggaaggcagcatgggcgatctcagtgagatatcctctcattccagtggttctcaccattcaggaagcccttcagctcactgttcaaaaagtagtgggtctctggattcatccaaagtctacatcgtgtctcacagcagcggacaacaggttcccgggtccatgtccaagccctaccacagacaaggggcagtgaacaaatatgtcatcggctggaagaaatcggagggcagcccaccgcccgaggagcctgaagtgactgaatgtcccgggatgtatagtgagatggatgtcatgtccacagcaactcagcatcagacagtggtgggagatgctgttgcagagactcaacatgttctgtctaaagaagattttctgaaattgatgcttcctgacagccccttagtggaggaggggcgaagaaagttttcgttctatgggaacctgtctccaaggaggtcgctttaccgcacgctgtctgacgagagcatctgcagcaacaggagggggtcctcctttggcagttcccggagttccgtgcttgaccaggccctgcccaacgacattctgttcagcaccaccccaccctaccacagcacgctgcctccgcgggcccaccccgcacccagcatggggagcctgagaaatgagttctggttctccgatgggtccttatcagataagtccaagtgcgcagatcctggcctgatgcccctcccggacacagccacagggttagattggacccacctcgtggatgctgcacgggcatttgaaggtcttgactcagatgaagaactggggctgctctgtcaccacacgtcctatctagaccagagggtggcatccttctgcaccctgacagatatgcagcatgggcaggacctggaaggggcccaagagctgcccttatgtgtagatccaggcagtggcaaagagttcatggacacaactggggagcgttctccatcaccactgaccgggaaagtcaatcagctggaattaattcttcgacaactccagaccgaccttcggaaggaaaaacaagacaaggccgttctccaagcagaagtgcagcacctgagacaggacaacatgagactgcaggaggagtcccagaccgcgacagctcagctgcggaaattcacagaatggtttttcaccaccatcgacaaaaaatcttagccaatccgcacctcatcaagggaccactgggaaatgccccttgtccctttgaagtcacaaacatgtggtttttctgtgtgctttcaaccaatcgtagatgtttttgctgttccattctgtgtagcaccattcaccacagcaggatagggagcctcgactctttctcggtaaccacggcagagagcagcgccgatgtgaagatgaatgaatgtaactcctggtgtgaagatgaatgtaaaccctggcgacagttgagacctttttcttttagactctgctaaaacagtgctctggcttgggcttacctcaagagggaagatagttgagttttatttcctgtatatcaggtgacctggtagagatgtaaagcaatttaccatagtttgggctttagtattgtaaaataaacatgagaacaaataatcagacatatactttaatgttaaaggtgctctatttttttggatgtacagtagttttatttccacagccacattaccatagcaataagaaaggaggcatagtacatagttggaaaagctttgtggggggattaaaaaaaaaaaaaagcactgttgtgtttaacactagttcagatgcagttaccttagagacttatttatttgcaggaacaaatggtgcctgaatattaacagtgttctgattaaaaacaaaaaaaagatacatatgccttgtaaatggctcaccgagtggtcagtagtcacttcaactcttagttcacttttgtatagttgctctgctggaaagaaatgagagtgaatctgcttactcactagaacttccctgtgtgctgtgagccagcggaaccacttgtacaatgccagatttgtttatctttgtacagaagctttgatgaagtgtcttgtatttaacacccttatttaagcttatttaaccttaaattgttaattttataaaatttggtttggcctgcactacgatgagggatggaggtagctgcaggctcagaagagactgagcttgcacagatcagaccgagaagcagggtgagagattctaacgactggatgctgctagtaacacattgtttgtattgctttaccatttttaactgttagatttgagatgaacatacattttgcttttttaataaatgtttaaaagaagtccacataagaaa

SEQ ID NO: 181664 - DNA, 7987 bp, Homo sapiens
  Payload ID: 15779
  Gene Symbol: SIPA1L3
  Gene Name: signal-induced proliferation-associated 1 like 3
  Uniprot ID: O60292
  ENST ID: ENST00000222345
  CDS Start-End: 510-5855
cgcgaagcggcttggaagtgggcagcctggaagtcactcgggccaccggagctggcggcgtctccagcgagcggcgcggagctggacgccgcgatcgtggggcccgcgaggcgggcagccggggcgtccagatgcacagtctctgacatcagctctcctgggaccctccaagagcactagtgtctagaaggcactaaggcatggcgaggacaacatccttgctgcctccagctggcgggcgaccacagctactgcctgctctgcgctactgagccactcggtctggagcccccaggacagcacctgcttcctgaggttgtcctggctcagctgtgcacagcgatggtggagaactggactccacaggctcacaaccttcctgtcaggtttcagggcccagcatccttcatcctgggcctggctgccctgaacaatggctgagggctgggggaccccatagagtgacaccacagcgtacggggccagcagcactccagtgcccgtggactatgaccacctatcgggccatccccagcgatggtgtggacctggcagccagctgtggcgccagggtgggcgatgtcctccctgggccacacacaggggactacgctcccttgggattctgggcccagaatggcagcatgtcccagcctcttggcgagagcccggccaccgccaccgccaccgccaccgccaccacccgccccagccccaccactcccgcaatgcccaagatgggcgtgcgcgcaagggtggccgactggccgcccaagcgggaggccctgagagagcacagcaacccaagcccctcccaggacacagatggcacaaaggccaccaagatggcccattccatgaggagcatacagaacggacagccccccaccagcaccccggcttcctcagggtccaaagccttccaccgactctccaggagaaggtccaaagacgtggagttccaggacgggtggccccggtcccccggcagggccttcctcccccttcggcaccgcagcagcagcgagatcaccctcagcgagtgtgacgcggaggacgcgggggagccgcggggggcccggcacacgggggcgctgcccctcttccgcgagtacgggagcacctcgtccatcgacgtgcagggcatgcccgagcagagcttcttcgacatcctgaacgagttccgcagcgagcagcccgacgcccgagggtgccaggccctcaccgagctcctccgggcagatcctggcccacacctcatggggggcggcggcggagccaagggggactcccacaacgggcagcccgccaaggacagcctcctgccactgcagcccacgaaggagaaggagaaggcccggaagaaacctgcgcggggcctcggcggcggggacacggtggactcgtccatctttcggaagctaaggagcagcaaacccgagggggaggctgggcgttccccgggggaggccgacgagggccggagccccccggaagccagcaggccgtgggtgtgtcagaagagcttcgcccacttcgacgtgcagagcatgctgttcgacctcaacgaggcggccgccaacagggtgtcggtgtcgcagcggcggaacaccaccacgggtgcttcggccgcttccgccgcctcggccatggcctccctcacggcctcgcgggcccacagcctcggaggcctggacccggccttcaccagcacagaggacctaaactgcaaggagaacttggagcaggacctcggcgatgacaacagcaacgacctgctgctcagctgcccgcacttccgcaatgagatcgggggcgagtgtgagcgcaacgtgagcttctcccgggcttccgtgggctccccgagcagcggcgagggccacctggcagagcccgccctgagcgcctaccgcaccaacgccagcatctcggtgttggaagttcccaaggagcagcagcggacgcagagtcggccccggcagtacagcatcgagcatgtggacctgggcgcccgctactaccaggattacttcgtgggcaaagaacatgccaattacttcggcgtggatgagaagctggggccagtggctgtgagcattaagcgggagaagctggaagaccacaaggagcacggacctcagtaccagtacaggatcatcttccggacccgcgagctcatcaccctgcggggctccatcctggaagatgctacgcccacagccaccaagcatgggaccgggcggggcctgcccttgaaggatgccctggagtatgtcatccccgagctcaacatccactgcctgcggctggccctcaacacccccaaggtgacggagcaactgctgaagctcgatgagcaagggctctgccggaagcacaaggtgggcatcctctattgcaaggccggccagagctccgaggaggagatgtacaacaatgaggaggccggccccgcctttgaggagttcctctccctcatcggcgagaaggtctgcctgaagggcttcaccaagtacgctgcccagctggacgtcaagaccgactccacgggaacccactccctctacacgatgtaccaggactacgagatcatgttccatgtctccaccctgctcccttacacccccaacaacaggcagcagctgctacggaagaggcacataggaaatgacatcgtgacgatcatcttccaggagcctggcgcgctaccgttcacccccaagaacatccgctcccacttccagcacgtcttcatcattgtccgagtccacaacccctgcactgataacgtctgttacagtatggctgtgacccgatccaaagacgctcctcctttcggcccccccatccccagtggaaccacattccgcaaatccgacgtcttcagagacttcttgctggccaaggtgattaacgctgagaacgccgcgcacaagtccgacaagttccacaccatggccaccaggacccgccaggagtatctcaaggacctggccgaaaactgtgtctccaacacccccatcgactccaccggcaaattcaacctcatctccctgacctccaagaagaaggaaaagacaaaagcacgggctggcgctgagcagcacagtgcaggggccatcgcctggagggtggtggcccaggactacgcccagggggtggaaatcgactgcattttgggaatttccaatgagtttgtggtgctcctggacttacgcaccaaggaggtggtgttcaactgctactgcggggatgtcattggctggactccagactcctccacactcaaaatcttctatggacgaggagaccacatcttcctacaggcgacagagggttctgtggaggacataagggagatagtgcagagactgaaggtgatgaccagtggctgggagacggtggacatgacgcttcggcggaacgggctcgggcagctgggcttccacgtgaagtacgacggcacggtggccgaggttgaggactatgggttcgcctggcaggccggcctccggcagggcagccgactagtggagatctgcaaggtggccgtggtcacactgacccacgaccagatgatcgacctgctgcgcacctctgtcactgtgaaggtggtcatcatcccgccttttgaggacggcactccccggaggggttggccggagacctacgacatgaatacctcggagcccaagacggagcaggaaagcatcactcctgggggccggcccccctaccgcagcaatgctccctggcagtggagcgggcccgcatcccataactctctaccagcctccaagtgggccactccaaccactcccggccatgcccagtccctgagccggcccctgaagcagacccccatagtccccttccgggagtcccagccactgcacagcaagaggcctgtcagcttcccagaaaccccttacacagtatcaccagcaggggccgacagagtccctccctaccgacagccttctgggagcttctccacccccggttcggccacctacgtgagatacaagccatccccagaaaggtacacggctgccccacaccccctgctatctcttgatccccacttcagccacgatgggacgtccagcggcgactcctcttccggcggcctgaccagccaggagagcaccatggaacgccagaagccagagcctttgtggcatgtgcctgcccaggccaggctctcagccatagccggaagcagcgggaacaagcacccgtccaggcaggatgcagcaggcaaagattcccccaacaggcattccaaaggagaacctcaatactcaagtcattccagcagcaacaccctctccagcaacgcatccagcagccacagcgacgaccgctggttcgaccccctggaccccctggagccagagcaagaccccctctccaagggtggctctagtgacagcggcatcgacaccaccctctacacctccagccctagctgcatgtccctggccaaggctccacggcccgccaagccacacaagccccctggaagtatgggcctttgtggcgggggtcgcgaggccgctgggaggtcccaccacgcagacaggcggcgggaggtctcccctgcccccgcagttgccggccaaagcaagggctaccgaccgaagctgtactcctccggctccagcacccccacgggactggcggggggcagccgagacccaccgaggcagcccagtgacatgggctcgagggttggctaccccgctcaggtttacaaaactgccagtgcagagactcctcggccctcccagctggcccagcccagcccctttcagctctccgcctccgtccccaagtccttcttctccaagcagcctgtacgcaataagcacccaacagggtggaagagaacggaggagcccccaccacggccactccccttcagtgacccaaagaagcaggtggacacgaacaccaaaaatgtctttgggcaaccgaggttgagggcatccctccgagacctccggtcaccacggaagaactacaaatccaccatcgaggatgacctgaagaaactcatcatcatggacaacctggggccagagcaggagagagacacgggacagtcaccgcagaagggcctgcagcggacgctgtcggacgagagcctgtgcagcgggcgccgggagcccagcttcgccagccccgctggcctagagccagggctgcccagcgacgtgctcttcaccagcacctgcgccttcccgtccagcacgctgcctgcacgccgccagcaccagcacccccacccgcccgtcggccccggtgccacccctgccgccggcagcggctttcccgagaagaaatccaccatctcagcctcggagctctcgctggctgatgggcgggaccgccccctgcggcgcctggaccctgggctgatgcccctgcctgacacagctgctggcctcgagtggtccagcctggtgaacgcagccaaggcatacgaagtgcaaagagccgtctcactcttctctctgaacgacccggccctgagcccggacatcccgcctgcacacagtcctgtccacagccacctgagcctggagaggggacccccgacccccaggaccacccctaccatgagcgaggagccacccctggatctgacaggcaaggtgtaccagctggaggtgatgctgaaacagctgcacactgacctgcagaaggagaagcaggacaaggtggtgctccagtcagaggtggccagcctgcggcagaacaaccagcggctgcaggaggagtcgcaggccgccagcgagcagctgcgcaagtttgcggagatcttctgcagggagaagaaggagctctgaggtgggaggccgccgcccgccttcgctccttcccctcaggccgtggccctgctgcctctctccctccactcagctcccagctgccggtgtgaccaagatgacccatccagggccctccccatggacacggaaactccgatggcctcactagggctgtgagtcagggtcagcgcgcacagccctcatgccccagagggcgaagtggtctcaggcctccctccaagctgcccagctgtggtcccggtgagctgggctgtgcttacaccgctcccgggcctgccccgctgtccccatctagcctcttcctgggaccagcccttcgaagctgatggggacggagagaggagccagtctccagacgcctcggctccaggaggtcacacagcaggtttctgcaccacgcacaacaaagttgcggcttgtggggccgaggcccctgcatgaaaagtacagcgtgaaagcaaccctttcttccccacacccagagaggtgaggcccgcgtggacacagaccagggcgcctcggtccctagcacgtgagctccaaaaagcacgaacatgatcccctccctaaccccctcctcccaaaaagcagccaggagcactttcttagagtttaaattattttcttgggggcctgaggatagagagaggcaaggctagcctccagagccgatttatttgagagagaaactctatttggatctccaggacggtttatacgatctttttctatcagctcctcttccgccagaggccactgcacctgggctaggggtccacaggcccctccaccttccagctaaccaggccaggccggggcggtggagccaccacacagccgactctctcctcctcctcccggcacgacctggccctgaccagcagcctcggcctcttctgggttccaggaggggctcccgaagccctcaggacagggctggaggagaacagccttcatctcctcctctggtttttttttcctttgcaagtctcccagcccatctctccgagcagcggccaccagaccccctcaccatgctccccggggagcactgcaccccgcgaaccccactggacgctggttctctaaaggcaataaggggcggccatgccggtgtggtaccacgctgttcctccaggaaaccgtttctttttttccttctttaaaagcaaacagaaaaagatatatatatatatatatatatatttattttttcatgtagagttggcgccagaacaagcctgtatggccacagtctgtggattcatccccccaacctcaagctgaggaccaaggcgtgtcccctgtgggctgggggtcagtgggaggaccagagggatgaagtcagggcaggccggtgccctttttgggaggcaccaggcggggaggagttggcggagcaggtctggctgtgagccagcaccaggcaacccggcccttgtccagggacctctgctgccttctctctggggtcaggaacctcagaggagggggctctggggactgcataggacgcaggcactcggaggtgccggtgtggatgggtgggggtgagagaagagggttcttatcgcgtctcctgtgatcagcctctggccccctggaggaggaaacctcagcgctgcccctgcccccaccctcacccccaacaccaagagtgaggtgggcgtgccccaggcagcgtcctcagccctggccagctactgtgatgccatcttctcccccatccccttctctggggggcccacccgtcccccacccccaccccttagaccctcatcgggtccctttttttttttttttttcagttgtctcctcccatcttcagatcattcgaatcattttggggacttaatcatgtacatggacaagtgtaaattatgatttttggttttgttttctgttattttttaaggatttctgcaaaaacagatctatttaatttgaggttgatgttctatccaatggccgaagatagcagcaggttttttttttcatatgttgatttgtttcatttggattttttttttattattctttattgtcttttttttttccccatccctgtcttgagattttctggcatgtttctggaggtttcaaaggaaataaaggtttcatagaaatgg

SEQ ID NO: 181665 - DNA, 785 bp, Homo sapiens
  Payload ID: 15779
  Gene Symbol: SIPA1L3
  Gene Name: signal-induced proliferation-associated 1 like 3
  ENST ID: ENST00000595384
  CDS Start-End: 1-496
catcctggaagatgctacgcccacagccaccaagcatgggaccgggcggggcctgcccttgaaggatgccctggagtatgtcatccccgagctcaacatccactgcctgcggctggccctcaacacccccaaggtgacggagcaactgctgaagctcgatgagcaagggctctgccggaagcacaaggtgggcatcctctattgcaaggccggccagagctccgaggaggagatgtacaacaatgaggaggccggccccgcctttgaggagttcctctccctcatcggcgagaaggtctgcctgaagggcttcaccaagtacgctgcccagctggacgtcaagatagagacggggtttcaccatgttggccaggctggtctcgaactcctgacctcagatgatccacctgcctcagcctcccaaagtgctgggattataggtgtgaaccaccaggcctggccagtgtatttaatttttaagagtagattgaagtgaaagcaccaagttaaaaaccagcacagatggtacgtgggatatggcaaaaacccagaggttttggaaacatggtcctaactggcatttctgtttcagccgactccacgggaacccactccctctacacgatgtaccaggactacgagatcatgttccatgtctccaccctgctcccttacacccccaacaacaggcagcagctgctacggaagaggcacataggaaatgacatcgtgacgatcatcttccaggagcctggcgcgctaccgttcacccccaagaacatccg

SEQ ID NO: 181666 - DNA, 572 bp, Homo sapiens
  Payload ID: 15779
  Gene Symbol: SIPA1L3
  Gene Name: signal-induced proliferation-associated 1 like 3
  ENST ID: ENST00000601054
  CDS Start-End: 19-572
gcgccaggagtccctgggatgcccttctggggacacagccctgaaagtgacatgggctcgagggttggctaccccgctcaggtttacaaaactgccagtgcagagactcctcggccctcccagctggcccagcccagcccctttcagctctccgcctccgtccccaagtccttcttctccaagcagcctgtacgcaataagcacccaacagggtggaagagaacggaggagcccccaccacggccactccccttcagtgacccaaagaagcaggtggacacgaacaccaaaaatgtctttgggcaaccgaggttgagggcatccctccgagacctccggtcaccacggaagaactacaaatccaccatcgaggatgacctgaagaaactcatcatcatggacaacctggggccagagcaggagagagacacgggatcaccgcagaagggcctgcagcggacgctgtcggacgagagcctgtgcagcgggcgccgggagcccagcttcgccagccccgctggcctagagccagggctgcccagcgacgtgctcttcaccagcacctgcgcctt

SEQ ID NO: 181667 - DNA, 883 bp, Homo sapiens
  Payload ID: 15780
  Gene Symbol: SLAMF1
  Gene Name: signaling lymphocytic activation molecule family member 1
  ENST ID: ENST00000235739
  CDS Start-End: 351-785
ggagacagctaaggaaagaagctggggcgcatgtttctgcccaaagccgggttttggccgaggtgactacacaccccctttcctggctcccataggctaagtgcctggcttcttgagaagcctgcttcttgagaacaaaaaagtgatttaaagcctcatgggagatgagcaatcctcaagacacaagcagaaaaagtcccagtgatacaggaagcgggttcaggaacctgctggttcctgatacataaatcagacagcctctgctgcatgacacgaagcttgcttctgcctggcatctgtgagcagctgccaggctccggccaggatcccttccttctcctcattggctgatggatcccaaggggctcctctccttgaccttcgtgctgtttctctccctggcttttggggcaagctacggaacaggtgggcgcatgatgaactgcccaaagattctccggcagttgggaagcaaagtgctgctgcccctgacatatgaaaggataaataagagcatgaacaaaagcatccacattgtcgtcacaatggcaaaatcactggagaacagtgtcgagaacaaaatagtgtctcttgatccatccgaagcaggccctccacgttatctaggagatcgctacaagttttatctggagaatctcaccctggggatacgggaaagcaggaaggaggatgagggatggtaccttatgaccctggagaaaagtttacattttggctatctttactttgttctgggagctgatcatgataacctgcagacctgatcaagcctctgtgcctcagtttctctctcaggataaagagtgaatagaggctgaagggtgaatttcttattatacataaaacactctgatattattgt

SEQ ID NO: 181668 - DNA, 4006 bp, Homo sapiens
  Payload ID: 15780
  Gene Symbol: SLAMF1
  Gene Name: signaling lymphocytic activation molecule family member 1
  Uniprot ID: Q13291
  ENST ID: ENST00000302035
  CDS Start-End: 351-1358
ggagacagctaaggaaagaagctggggcgcatgtttctgcccaaagccgggttttggccgaggtgactacacaccccctttcctggctcccataggctaagtgcctggcttcttgagaagcctgcttcttgagaacaaaaaagtgatttaaagcctcatgggagatgagcaatcctcaagacacaagcagaaaaagtcccagtgatacaggaagcgggttcaggaacctgctggttcctgatacataaatcagacagcctctgctgcatgacacgaagcttgcttctgcctggcatctgtgagcagctgccaggctccggccaggatcccttccttctcctcattggctgatggatcccaaggggctcctctccttgaccttcgtgctgtttctctccctggcttttggggcaagctacggaacaggtgggcgcatgatgaactgcccaaagattctccggcagttgggaagcaaagtgctgctgcccctgacatatgaaaggataaataagagcatgaacaaaagcatccacattgtcgtcacaatggcaaaatcactggagaacagtgtcgagaacaaaatagtgtctcttgatccatccgaagcaggccctccacgttatctaggagatcgctacaagttttatctggagaatctcaccctggggatacgggaaagcaggaaggaggatgagggatggtaccttatgaccctggagaaaaatgtttcagttcagcgcttttgcctgcagttgaggctttatgagcaggtctccactccagaaattaaagttttaaacaagacccaggagaacgggacctgcaccttgatactgggctgcacagtggagaagggggaccatgtggcttacagctggagtgaaaaggcgggcacccacccactgaacccagccaacagctcccacctcctgtccctcaccctcggcccccagcatgctgacaatatctacatctgcaccgtgagcaaccctatcagcaacaattcccagaccttcagcccgtggcccggatgcaggacagacccctcagaaacaaaaccatgggcagtgtatgctgggctgttagggggtgtcatcatgattctcatcatggtggtaatactacagttgagaagaagaggtaaaacgaaccattaccagacaacagtggaaaaaaaaagccttacgatctatgcccaagtccagaaaccaggtcctcttcagaagaaacttgactccttcccagctcaggacccttgcaccaccatatatgttgctgccacagagcctgtcccagagtctgtccaggaaacaaattccatcacagtctatgctagtgtgacacttccagagagctgacaccagagaccaacaaagggactttctgaaggaaaatggaaaaaccaaaatgaacactgaacttggccacaggccccaagtttcctctggcagacatgctgcacgtctgtacccttctcagatcaactccctggtgatgtttcttccacatacatctgtgaaatgaacaaggaagtgaggcttcccaagaatttagcttgctgtgcagtggctgcaggcgcagaacagagcgttacttgataacagcgttccatctttgtgttgtagcagatgaaatggacagtaatgtgagttcagactttgggcatcttgctcttggctggaactggataataaaaatcagactgaaagccaggacatctgagtacctatctcacacactggaccaccagtcacaaagtctggaaaagtttacattttggctatctttactttgttctgggagctgatcatgataacctgcagacctgatcaagcctctgtgcctcagtttctctctcaggataaagagtgaatagaggctgaagggtgaatttcttattatacataaaacactctgatattattgtataaaggaagctaagaatattattttatttgcaaaacccagaagctaaaaagtcaataaacagaaagaatgattttgagatctctgagttttgaacagtggactggaaaccatgtaagagccttaaaagtacagttctgtgcaaatggcattcagttttaaagaaaaacgtagcaaatgtttgatggtgctgttacaaaggagcttggaatactcagaggaacttgtcccatggtgatttttcacttctcaaaatgatgtttaaatcccagttctctgttgattcccttgaacaacaaacctggaacctcagctaagactctctgtgaccagattctgaacctcttatatccagggcttcaaggggtattgcaggtcaaggtctttcctaggcactttctactccctgcatacctctcctcacactaaatttatcctctagtagaaaattaagttattttggtctaacagcttcaaatctttgaatgctcaataacttattttgcaagctgcaggcagaaagagactttttaagtaaagtcctttgttttttcctattctctgcttttagacaggctgtcctcaatttaagccctgctttttcttattgtttcttatataaacttggtaagtactgtaagaaacagccactatcataccattgcataataaggagcaccaacttcccagctcaaaactcaggtccttattgccttgtatcttacctcctctatgaggtcaattcacattgtaagcctgttgcttagtgcatctcgtttcctggtaccagcttctttaatagagttcttagttgcaatcaacagaagctggctttggcttttttatgtagaaaaggaacctattgaaaagatactgattggttccaataactgctagaagtttctgcaaaaccatgctttgaaagtgagcaggaaaagaagagactaggctgtggctgggagcacagccaaaattacaaaaccagcccagggatgatgatcctgttcatgcacagccactgtccccagcactaggcacagactctaccactgcctcactgtctctgctggacttggaaacttgatattactgttactgctgcactgtctgccatgaaaatgaattctccagggtcccttcttcatcctttcatctctagcttataattcaaagtctgggattgagtggccaatcctaggtcacatgtccatgtcctatctccaaggggggctgggaattgaatatctggcattttccactttcacttcttatgaattaaggaattctacaaataatagaagtgggattcaggtggtaggcagacaaaaaagcctcacaattatccactacgccacccttgtataaccttaccctcattcactgtctactctcaaaactgtggagctactaatgaagatttgtaaacccgggcttatgagcacccattcctttactacaactcagattgctctagaagctcagttcccagcacttggatttttccagtagctgaattctacctgaaggaagggcagaaacaaagggtgaagaagaggctatcacttccaagtatcctgcacccctgggctcaagacctcactggggagggagtcttttgggccacccaccaaacagcactggcattatgcctctcaccctagaccatggttacacgtggtaaaacaaccccttctggtgatacattcacaactctctagtttcccccaaatggcactatggggagcgggagcttgccttttcctcagacttaaaacaataagttttccccgtgtttcccctctaatgctgttttcttttgaccaagcatgtctgaattctagagaagtcaggaggaacacacccattctcggtttgaagggactgatgttctgaagtacaactgggcacagtcccaggctcttcaggacgcttcctccattcacacagcggggatgtgattgttacagcgggtggtgtgtgctggctgagaagccactgtgaattgattcttcttctgaagtttatgtttctactttttggaaatgaataaattacagccagtccatcaaggaaattgcaa

SEQ ID NO: 181669 - DNA, 1087 bp, Homo sapiens
  Payload ID: 15780
  Gene Symbol: SLAMF1
  Gene Name: signaling lymphocytic activation molecule family member 1
  ENST ID: ENST00000538290
  CDS Start-End: 14-1087
tcctcattggctgatggatcccaaggggctcctctccttgaccttcgtgctgtttctctccctggcttttggggcaagctacggaacaggtgggcgcatgatgaactgcccaaagattctccggcagttgggaagcaaagtgctgctgcccctgacatatgaaaggataaataagagcatgaacaaaagcatccacattgtcgtcacaatggcaaaatcactggagaacagtgtcgagaacaaaatagtgtctcttgatccatccgaagcaggccctccacgttatctaggagatcgctacaagttttatctggagaatctcaccctggggatacgggaaagcaggaaggaggatgagggatggtaccttatgaccctggagaaaaatgtttcagttcagcgcttttgcctgcagttgaggctttatgagcaggtctccactccagaaattaaagttttaaacaagacccaggagaacgggacctgcaccttgatactgggctgcacagtggagaagggggaccatgtggcttacagctggagtgaaaaggcgggcacccacccactgaacccagccaacagctcccacctcctgtccctcaccctcggcccccagcatgctgacaatatctacatctgcaccgtgagcaaccctatcagcaacaattcccagaccttcagcccgtggcccggatgcaggacagacccctcagaaacaaaaccatgggcagtgtatgctgggctgttagggggtgtcatcatgattctcatcatggtggtaatactacagttgagaagaagagccaccttgactactaccaaccaatactggagtcaaaatgtcctgacccaagaccaggagagatgccccggctgccttcccatggtaaaacgaaccattaccagacaacagtggaaaaaaaaagccttacgatctatgcccaagtccagaaaccaggtcctcttcagaagaaacttgactccttcccagctcaggacccttgcaccaccatatatgttgctgccacagagcctgtcccagagtctgtccaggaaacaaattccatcacagtctatgctagtgtga

SEQ ID NO: 181670 - DNA, 1231 bp, Homo sapiens
  Payload ID: 15781
  Gene Symbol: SIT1
  Gene Name: signaling threshold regulating transmembrane adaptor 1
  Uniprot ID: Q9Y3P8
  ENST ID: ENST00000259608
  CDS Start-End: 88-678
gccaccaccagtattggggatgctgagctgcggggtacgggcctgaggagggatgggagtaagaagtgctgtggaaaccgtcaggccatgaaccaggctgaccctcggctcagagcagtgtgcttgtggactctcacatctgcagccatgagcagaggcgacaactgcacggatctactcgcactgggaatcccctccataacccaggcctggggactgtgggtcctcttaggggctgtgacgctgctatttctcatctcgctggctgcacacttgtcccagtggaccaggggccggagcaggagccatccggggcagggacgctctggagagtctgtggaagaggtcccgctgtatgggaacctgcattatctacagacaggacggctgtctcaagacccagagccagaccagcaggatccaactcttggaggccctgccagggctgcagaggaggtgatgtgctataccagcctgcagctgcggcctcctcagggtcggatccccggtcctggaacccccgtcaagtactcggaggtggtgctggactctgagccaaagtcccaggcctcgggccccgagccggagctctatgcctcagtatgtgcccagacccgcagggcccgggcctccttcccggatcaggcctatgccaacagccagcctgcagccagctgagatggagggcctggcacagcggggcgtgcactgccccagccccccgtagcaggggcatgactgtttcccaaccagcacccaaagacgggcgccattgccaagtcacaggatgtgatctaccccggacttcctatctgagcttcaagggagacatctcagggcaaagctttcgtgatggaggaggcaaagacagtagccccctccttatttcttttttctatctgttcctcttagcccccaaactcccaggttctcacttccttcttctggagtttaaccagatcctccccacccccgctccctcatagtctacccccacgcctcagtgtctcctcaggcacaggaagtgggcggtgggggaggggtaagggcctgacagtgggtgggtgggtatattcctcaggagtccacagactggagtggacctggaacttagagacgggagggacccgagcctggcttttgacctaagaaccctagcaggagaatacagtctccatcctgctgtctctgtcctgtccccaagttttcaaataaaactttccaaaaagtg

SEQ ID NO: 181671 - DNA, 1317 bp, Homo sapiens
  Payload ID: 15781
  Gene Symbol: SIT1
  Gene Name: signaling threshold regulating transmembrane adaptor 1
  ENST ID: ENST00000618781
  CDS Start-End: 98-772
cagagactttgccaccaccagtattggggatgctgagctgcggggtacgggcctgaggagggatgggagtaagaagtgctgtggaaaccgtcaggccatgaaccaggctgaccctcggctcagagcagtgtgcttgtggactctcacatctgcagccatgagcagaggcgacaactgcacggatctactcgcactgggaatcccctccataacccaggcctggggactgtgggtcctcttaggggctgtgacgctgctatttctcatctcgctggctgcacacttgtcccagtggaccaggggccggagcaggagccatccggggcagggacggtgggtgaaggacaacagggatgggttgactgagagttctctcttaccgagaagtccccactcatcccctaaactctgcgttgcatctggagagtctgtggaagaggtcccgctgtatgggaacctgcattatctacagacaggacggctgtctcaagacccagagccagaccagcaggatccaactcttggaggccctgccagggctgcagaggaggtgatgtgctataccagcctgcagctgcggcctcctcagggtcggatccccggtcctggaacccccgtcaagtactcggaggtggtgctggactctgagccaaagtcccaggcctcgggccccgagccggagctctatgcctcagtatgtgcccagacccgcagggcccgggcctccttcccggatcaggcctatgccaacagccagcctgcagccagctgagatggagggcctggcacagcggggcgtgcactgccccagccccccgtagcaggggcatgactgtttcccaaccagcacccaaagacgggcgccattgccaagtcacaggatgtgatctaccccggacttcctatctgagcttcaagggagacatctcagggcaaagctttcgtgatggaggaggcaaagacagtagccccctccttatttcttttttctatctgttcctcttagcccccaaactcccaggttctcacttccttcttctggagtttaaccagatcctccccacccccgctccctcatagtctacccccacgcctcagtgtctcctcaggcacaggaagtgggcggtgggggaggggtaagggcctgacagtgggtgggtgggtatattcctcaggagtccacagactggagtggacctggaacttagagacgggagggacccgagcctggcttttgacctaagaaccctagcaggagaatacagtctccatcctgctgtctctgtcctgtccccaagttttcaaataaaactttcc

SEQ ID NO: 181672 - DNA, 3867 bp, Homo sapiens
  Payload ID: 15782
  Gene Symbol: SIRPA
  Gene Name: signal-regulatory protein alpha
  Uniprot ID: P78324
  ENST ID: ENST00000356025
  CDS Start-End: 24-1538
cgctcgcagagaagccgcggcccatggagcccgccggcccggcccccggccgcctcgggccgctgctctgcctgctgctcgccgcgtcctgcgcctggtcaggagtggcgggtgaggaggagctgcaggtgattcagcctgacaagtccgtgttggttgcagctggagagacagccactctgcgctgcactgcgacctctctgatccctgtggggcccatccagtggttcagaggagctggaccaggccgggaattaatctacaatcaaaaagaaggccacttcccccgggtaacaactgtttcagacctcacaaagagaaacaacatggacttttccatccgcatcggtaacatcaccccagcagatgccggcacctactactgtgtgaagttccggaaagggagccccgatgacgtggagtttaagtctggagcaggcactgagctgtctgtgcgcgccaaaccctctgcccccgtggtatcgggccctgcggcgagggccacacctcagcacacagtgagcttcacctgcgagtcccacggcttctcacccagagacatcaccctgaaatggttcaaaaatgggaatgagctctcagacttccagaccaacgtggaccccgtaggagagagcgtgtcctacagcatccacagcacagccaaggtggtgctgacccgcgaggacgttcactctcaagtcatctgcgaggtggcccacgtcaccttgcagggggaccctcttcgtgggactgccaacttgtctgagaccatccgagttccacccaccttggaggttactcaacagcccgtgagggcagagaaccaggtgaatgtcacctgccaggtgaggaagttctacccccagagactacagctgacctggttggagaatggaaacgtgtcccggacagaaacggcctcaaccgttacagagaacaaggatggtacctacaactggatgagctggctcctggtgaatgtatctgcccacagggatgatgtgaagctcacctgccaggtggagcatgacgggcagccagcggtcagcaaaagccatgacctgaaggtctcagcccacccgaaggagcagggctcaaataccgccgctgagaacactggatctaatgaacggaacatctatattgtggtgggtgtggtgtgcaccttgctggtggccctactgatggcggccctctacctcgtccgaatcagacagaagaaagcccagggctccacttcttctacaaggttgcatgagcccgagaagaatgccagagaaataacacaggacacaaatgatatcacatatgcagacctgaacctgcccaaggggaagaagcctgctccccaggctgcggagcccaacaaccacacggagtatgccagcattcagaccagcccgcagcccgcgtcggaggacaccctcacctatgctgacctggacatggtccacctcaaccggacccccaagcagccggcccccaagcctgagccgtccttctcagagtacgccagcgtccaggtcccgaggaagtgaatgggaccgtggtttgctctagcacccatctctacgcgctttcttgtcccacagggagccgccgtgatgagcacagccaacccagttcccggagggctggggcggtgcaggctctgggacccaggggccagggtggctcttctctccccacccctccttggctctccagcacttcctgggcagccacggccccctccccccacattgccacatacctggaggctgacgttgccaaaccagccagggaaccaacctgggaagtggccagaactgcctggggtccaagaactcttgtgcctccgtccatcaccatgtgggttttgaagaccctcgactgcctccccgatgctccgaagcctgatcttccagggtggggaggagaaaatcccacctcccctgacctccaccacctccaccaccaccaccaccaccaccaccaccactaccaccaccacccaactggggctagagtggggaagatttcccctttagatcaaactgccccttccatggaaaagctggaaaaaaactctggaacccatatccaggcttggtgaggttgctgccaacagtcctggcctcccccatccctaggctaaagagccatgagtcctggaggaggagaggacccctcccaaaggactggagacaaaaccctctgcttccttgggtccctccaagactccctggggcccaactgtgttgctccacccggacccatctctcccttctagacctgagcttgcccctccagctagcactaagcaacatctcgctgtggacgcctgtaaattactgagaaatgtgaaacgtgcaatcttgaaactgaggtgttagaaaacttgatctgtggtgttttgttttgttttttttcttaaaacaacagcaacgtgatcttggctgtctgtcatgtgttgaagtccatggttgggtcttgtgaagtctgaggtttaacagtttgttgtcctggagggattttcttacagcgaagacttgagttcctccaagtcccagaaccccaagaatgggcaagaaggatcaggtcagccactccctggagacacagccttctggctgggactgacttggccatgttctcagctgagccacgcggctggtagtgcagccttctgtgaccccgctgtggtaagtccagcctgcccagggctgctgagggctgcctcttgacagtgcagtcttatcgagacccaatgcctcagtctgctcatccgtaaagtggggatagtgaagatgacacccctccccaccacctctcataagcactttaggaacacacagagggtagggatagtggccctggccgtctatcctacccctttagtgaccgcccccatcccggctttctgagctgatccttgaagaagaaatcttccatttctgctctcaaaccctactgggatcaaactggaataaattgaagacagccagggggatggtgcagctgtgaagctcgggctgattccccctctgtcccagaaggttggccagagggtgtgacccagttaccctttaacccccacccttccagtcgggtgtgagggcctgaccgggcccagggcaagcagatgtcgcaagccctatttattcagtcttcactataactcttagagttgagacgctaatgttcatgactcctggccttgggatgcccaagggatttctggctcaggctgtaaaagtagctgagccatcctgcccattcctggaggtcctacaggtgaaactgcaggagctcagcatagacccagctctctgggggatggtcacctggtgatttcaatgatggcatccaggaattagctgagccaacagaccatgtggacagctttggccagagctcccgtgtggcatctgggagccacagtgacccagccacctggctcaggctagttccaaattccaaaagattggcttgtaaaccttcgtctccctctcttttacccagagacagcacatacgtgtgcacacgcatgcacacacacattcagtattttaaaagaatgttttcttggtgccattttcattttattttattttttaattcttggagggggaaataagggaataaggccaaggaagatgtatagctttagctttagcctggcaacctggagaatccacataccttgtgtattgaaccccaggaaaaggaagaggtcgaaccaaccctgcggaaggagcatggtttcaggagtttattttaagactgctgggaaggaaacaggccccattttgtatatagttgcaacttaaactttttggcttgcaaaatatttttgtaataaagatttctgggtaataatgagtc

SEQ ID NO: 181673 - DNA, 3996 bp, Homo sapiens
  Payload ID: 15782
  Gene Symbol: SIRPA
  Gene Name: signal-regulatory protein alpha
  Uniprot ID: P78324
  ENST ID: ENST00000358771
  CDS Start-End: 153-1667
gcggccgctccaggcgcccgttccggagtcggggggaggcccagccgggaggggggaagggggggagccttagtcatttccccgctccagcctgctcccgcccgagcgcgcactcacggccgctctccctcctcgctccgcagccgcggcccatggagcccgccggcccggcccccggccgcctcgggccgctgctctgcctgctgctcgccgcgtcctgcgcctggtcaggagtggcgggtgaggaggagctgcaggtgattcagcctgacaagtccgtgttggttgcagctggagagacagccactctgcgctgcactgcgacctctctgatccctgtggggcccatccagtggttcagaggagctggaccaggccgggaattaatctacaatcaaaaagaaggccacttcccccgggtaacaactgtttcagacctcacaaagagaaacaacatggacttttccatccgcatcggtaacatcaccccagcagatgccggcacctactactgtgtgaagttccggaaagggagccccgatgacgtggagtttaagtctggagcaggcactgagctgtctgtgcgcgccaaaccctctgcccccgtggtatcgggccctgcggcgagggccacacctcagcacacagtgagcttcacctgcgagtcccacggcttctcacccagagacatcaccctgaaatggttcaaaaatgggaatgagctctcagacttccagaccaacgtggaccccgtaggagagagcgtgtcctacagcatccacagcacagccaaggtggtgctgacccgcgaggacgttcactctcaagtcatctgcgaggtggcccacgtcaccttgcagggggaccctcttcgtgggactgccaacttgtctgagaccatccgagttccacccaccttggaggttactcaacagcccgtgagggcagagaaccaggtgaatgtcacctgccaggtgaggaagttctacccccagagactacagctgacctggttggagaatggaaacgtgtcccggacagaaacggcctcaaccgttacagagaacaaggatggtacctacaactggatgagctggctcctggtgaatgtatctgcccacagggatgatgtgaagctcacctgccaggtggagcatgacgggcagccagcggtcagcaaaagccatgacctgaaggtctcagcccacccgaaggagcagggctcaaataccgccgctgagaacactggatctaatgaacggaacatctatattgtggtgggtgtggtgtgcaccttgctggtggccctactgatggcggccctctacctcgtccgaatcagacagaagaaagcccagggctccacttcttctacaaggttgcatgagcccgagaagaatgccagagaaataacacaggacacaaatgatatcacatatgcagacctgaacctgcccaaggggaagaagcctgctccccaggctgcggagcccaacaaccacacggagtatgccagcattcagaccagcccgcagcccgcgtcggaggacaccctcacctatgctgacctggacatggtccacctcaaccggacccccaagcagccggcccccaagcctgagccgtccttctcagagtacgccagcgtccaggtcccgaggaagtgaatgggaccgtggtttgctctagcacccatctctacgcgctttcttgtcccacagggagccgccgtgatgagcacagccaacccagttcccggagggctggggcggtgcaggctctgggacccaggggccagggtggctcttctctccccacccctccttggctctccagcacttcctgggcagccacggccccctccccccacattgccacatacctggaggctgacgttgccaaaccagccagggaaccaacctgggaagtggccagaactgcctggggtccaagaactcttgtgcctccgtccatcaccatgtgggttttgaagaccctcgactgcctccccgatgctccgaagcctgatcttccagggtggggaggagaaaatcccacctcccctgacctccaccacctccaccaccaccaccaccaccaccaccaccactaccaccaccacccaactggggctagagtggggaagatttcccctttagatcaaactgccccttccatggaaaagctggaaaaaaactctggaacccatatccaggcttggtgaggttgctgccaacagtcctggcctcccccatccctaggctaaagagccatgagtcctggaggaggagaggacccctcccaaaggactggagacaaaaccctctgcttccttgggtccctccaagactccctggggcccaactgtgttgctccacccggacccatctctcccttctagacctgagcttgcccctccagctagcactaagcaacatctcgctgtggacgcctgtaaattactgagaaatgtgaaacgtgcaatcttgaaactgaggtgttagaaaacttgatctgtggtgttttgttttgttttttttcttaaaacaacagcaacgtgatcttggctgtctgtcatgtgttgaagtccatggttgggtcttgtgaagtctgaggtttaacagtttgttgtcctggagggattttcttacagcgaagacttgagttcctccaagtcccagaaccccaagaatgggcaagaaggatcaggtcagccactccctggagacacagccttctggctgggactgacttggccatgttctcagctgagccacgcggctggtagtgcagccttctgtgaccccgctgtggtaagtccagcctgcccagggctgctgagggctgcctcttgacagtgcagtcttatcgagacccaatgcctcagtctgctcatccgtaaagtggggatagtgaagatgacacccctccccaccacctctcataagcactttaggaacacacagagggtagggatagtggccctggccgtctatcctacccctttagtgaccgcccccatcccggctttctgagctgatccttgaagaagaaatcttccatttctgctctcaaaccctactgggatcaaactggaataaattgaagacagccagggggatggtgcagctgtgaagctcgggctgattccccctctgtcccagaaggttggccagagggtgtgacccagttaccctttaacccccacccttccagtcgggtgtgagggcctgaccgggcccagggcaagcagatgtcgcaagccctatttattcagtcttcactataactcttagagttgagacgctaatgttcatgactcctggccttgggatgcccaagggatttctggctcaggctgtaaaagtagctgagccatcctgcccattcctggaggtcctacaggtgaaactgcaggagctcagcatagacccagctctctgggggatggtcacctggtgatttcaatgatggcatccaggaattagctgagccaacagaccatgtggacagctttggccagagctcccgtgtggcatctgggagccacagtgacccagccacctggctcaggctagttccaaattccaaaagattggcttgtaaaccttcgtctccctctcttttacccagagacagcacatacgtgtgcacacgcatgcacacacacattcagtattttaaaagaatgttttcttggtgccattttcattttattttattttttaattcttggagggggaaataagggaataaggccaaggaagatgtatagctttagctttagcctggcaacctggagaatccacataccttgtgtattgaaccccaggaaaaggaagaggtcgaaccaaccctgcggaaggagcatggtttcaggagtttattttaagactgctgggaaggaaacaggccccattttgtatatagttgcaacttaaactttttggcttgcaaaatatttttgtaataaagatttctgggtaataatgagtc

SEQ ID NO: 181674 - DNA, 4201 bp, Homo sapiens
  Payload ID: 15782
  Gene Symbol: SIRPA
  Gene Name: signal-regulatory protein alpha
  Uniprot ID: P78324
  ENST ID: ENST00000400068
  CDS Start-End: 361-1875
tccggcccgcacccacccccaagaggggccttcagctttggggctcagaggcacgacctcctggggagggttaaaaggcagacgcccccccgccccccgcgcccccgcgccccgactccttcgccgcctccagcctctcgccagtgggaagcggggagcagccgcgcggccggagtccggaggcgaggggaggtcggccgcaacttccccggtccaccttaagaggacgatgtagccagctcgcagcgctgaccttagaaaaacaagtttgcgcaaagtggagcggggacccggcctctgggcagccccggcggcgcttccagtgccttccagccctcgcgggcggcgcagccgcggcccatggagcccgccggcccggcccccggccgcctcgggccgctgctctgcctgctgctcgccgcgtcctgcgcctggtcaggagtggcgggtgaggaggagctgcaggtgattcagcctgacaagtccgtgttggttgcagctggagagacagccactctgcgctgcactgcgacctctctgatccctgtggggcccatccagtggttcagaggagctggaccaggccgggaattaatctacaatcaaaaagaaggccacttcccccgggtaacaactgtttcagacctcacaaagagaaacaacatggacttttccatccgcatcggtaacatcaccccagcagatgccggcacctactactgtgtgaagttccggaaagggagccccgatgacgtggagtttaagtctggagcaggcactgagctgtctgtgcgcgccaaaccctctgcccccgtggtatcgggccctgcggcgagggccacacctcagcacacagtgagcttcacctgcgagtcccacggcttctcacccagagacatcaccctgaaatggttcaaaaatgggaatgagctctcagacttccagaccaacgtggaccccgtaggagagagcgtgtcctacagcatccacagcacagccaaggtggtgctgacccgcgaggacgttcactctcaagtcatctgcgaggtggcccacgtcaccttgcagggggaccctcttcgtgggactgccaacttgtctgagaccatccgagttccacccaccttggaggttactcaacagcccgtgagggcagagaaccaggtgaatgtcacctgccaggtgaggaagttctacccccagagactacagctgacctggttggagaatggaaacgtgtcccggacagaaacggcctcaaccgttacagagaacaaggatggtacctacaactggatgagctggctcctggtgaatgtatctgcccacagggatgatgtgaagctcacctgccaggtggagcatgacgggcagccagcggtcagcaaaagccatgacctgaaggtctcagcccacccgaaggagcagggctcaaataccgccgctgagaacactggatctaatgaacggaacatctatattgtggtgggtgtggtgtgcaccttgctggtggccctactgatggcggccctctacctcgtccgaatcagacagaagaaagcccagggctccacttcttctacaaggttgcatgagcccgagaagaatgccagagaaataacacaggacacaaatgatatcacatatgcagacctgaacctgcccaaggggaagaagcctgctccccaggctgcggagcccaacaaccacacggagtatgccagcattcagaccagcccgcagcccgcgtcggaggacaccctcacctatgctgacctggacatggtccacctcaaccggacccccaagcagccggcccccaagcctgagccgtccttctcagagtacgccagcgtccaggtcccgaggaagtgaatgggaccgtggtttgctctagcacccatctctacgcgctttcttgtcccacagggagccgccgtgatgagcacagccaacccagttcccggagggctggggcggtgcaggctctgggacccaggggccagggtggctcttctctccccacccctccttggctctccagcacttcctgggcagccacggccccctccccccacattgccacatacctggaggctgacgttgccaaaccagccagggaaccaacctgggaagtggccagaactgcctggggtccaagaactcttgtgcctccgtccatcaccatgtgggttttgaagaccctcgactgcctccccgatgctccgaagcctgatcttccagggtggggaggagaaaatcccacctcccctgacctccaccacctccaccaccaccaccaccaccaccaccaccactaccaccaccacccaactggggctagagtggggaagatttcccctttagatcaaactgccccttccatggaaaagctggaaaaaaactctggaacccatatccaggcttggtgaggttgctgccaacagtcctggcctcccccatccctaggctaaagagccatgagtcctggaggaggagaggacccctcccaaaggactggagacaaaaccctctgcttccttgggtccctccaagactccctggggcccaactgtgttgctccacccggacccatctctcccttctagacctgagcttgcccctccagctagcactaagcaacatctcgctgtggacgcctgtaaattactgagaaatgtgaaacgtgcaatcttgaaactgaggtgttagaaaacttgatctgtggtgttttgttttgttttttttcttaaaacaacagcaacgtgatcttggctgtctgtcatgtgttgaagtccatggttgggtcttgtgaagtctgaggtttaacagtttgttgtcctggagggattttcttacagcgaagacttgagttcctccaagtcccagaaccccaagaatgggcaagaaggatcaggtcagccactccctggagacacagccttctggctgggactgacttggccatgttctcagctgagccacgcggctggtagtgcagccttctgtgaccccgctgtggtaagtccagcctgcccagggctgctgagggctgcctcttgacagtgcagtcttatcgagacccaatgcctcagtctgctcatccgtaaagtggggatagtgaagatgacacccctccccaccacctctcataagcactttaggaacacacagagggtagggatagtggccctggccgtctatcctacccctttagtgaccgcccccatcccggctttctgagctgatccttgaagaagaaatcttccatttctgctctcaaaccctactgggatcaaactggaataaattgaagacagccagggggatggtgcagctgtgaagctcgggctgattccccctctgtcccagaaggttggccagagggtgtgacccagttaccctttaacccccacccttccagtcgggtgtgagggcctgaccgggcccagggcaagcagatgtcgcaagccctatttattcagtcttcactataactcttagagttgagacgctaatgttcatgactcctggccttgggatgcccaagggatttctggctcaggctgtaaaagtagctgagccatcctgcccattcctggaggtcctacaggtgaaactgcaggagctcagcatagacccagctctctgggggatggtcacctggtgatttcaatgatggcatccaggaattagctgagccaacagaccatgtggacagctttggccagagctcccgtgtggcatctgggagccacagtgacccagccacctggctcaggctagttccaaattccaaaagattggcttgtaaaccttcgtctccctctcttttacccagagacagcacatacgtgtgcacacgcatgcacacacacattcagtattttaaaagaatgttttcttggtgccattttcattttattttattttttaattcttggagggggaaataagggaataaggccaaggaagatgtatagctttagctttagcctggcaacctggagaatccacataccttgtgtattgaaccccaggaaaaggaagaggtcgaaccaaccctgcggaaggagcatggtttcaggagtttattttaagactgctgggaaggaaacaggccccattttgtatatagttgcaacttaaactttttggcttgcaaaatatttttgtaataaagatttctgggtaataatga

SEQ ID NO: 181675 - DNA, 4570 bp, Homo sapiens
  Payload ID: 15782
  Gene Symbol: SIRPA
  Gene Name: signal-regulatory protein alpha
  Uniprot ID: P78324
  ENST ID: ENST00000622179
  CDS Start-End: 20-1546
ggcggcgcagccgcggcccatggagcccgccggcccggcccccggccgcctcgggccgctgctctgcctgctgctcgccgcgtcctgcgcctggtcaggagtggcgggtgaggaggagctgcaggtgattcagcctgacaagtccgtgttggttgcagctggagagacagccactctgcgctgcactgcgacctctctgatccctgtggggcccatccagtggttcagaggagctggaccaggccgggaattaatctacaatcaaaaagaaggccacttcccccgggtaacaactgtttcagacctcacaaagagaaacaacatggacttttccatccgcatcggtaacatcaccccagcagatgccggcacctactactgtgtgaagttccggaaagggagccccgatgacgtggagtttaagtctggagcaggcactgagctgtctgtgcgcgccaaaccctctgcccccgtggtatcgggccctgcggcgagggccacacctcagcacacagtgagcttcacctgcgagtcccacggcttctcacccagagacatcaccctgaaatggttcaaaaatgggaatgagctctcagacttccagaccaacgtggaccccgtaggagagagcgtgtcctacagcatccacagcacagccaaggtggtgctgacccgcgaggacgttcactctcaagtcatctgcgaggtggcccacgtcaccttgcagggggaccctcttcgtgggactgccaacttgtctgagaccatccgagttccacccaccttggaggttactcaacagcccgtgagggcagagaaccaggtgaatgtcacctgccaggtgaggaagttctacccccagagactacagctgacctggttggagaatggaaacgtgtcccggacagaaacggcctcaaccgttacagagaacaaggatggtacctacaactggatgagctggctcctggtgaatgtatctgcccacagggatgatgtgaagctcacctgccaggtggagcatgacgggcagccagcggtcagcaaaagccatgacctgaaggtctcagcccacccgaaggagcagggctcaaataccgccgctgagaacactggatctaatgaacggaacatctatattgtggtgggtgtggtgtgcaccttgctggtggccctactgatggcggccctctacctcgtccgaatcagacagaagaaagcccagggctccacttcttctacaaggttgcatgagcccgagaagaatgccagagaaataacacaggtacagtccttggacacaaatgatatcacatatgcagacctgaacctgcccaaggggaagaagcctgctccccaggctgcggagcccaacaaccacacggagtatgccagcattcagaccagcccgcagcccgcgtcggaggacaccctcacctatgctgacctggacatggtccacctcaaccggacccccaagcagccggcccccaagcctgagccgtccttctcagagtacgccagcgtccaggtcccgaggaagtgaatgggaccgtggtttgctctagcacccatctctacgcgctttcttgtcccacagggagccgccgtgatgagcacagccaacccagttcccggagggctggggcggtgcaggctctgggacccaggggccagggtggctcttctctccccacccctccttggctctccagcacttcctgggcagccacggccccctccccccacattgccacatacctggaggctgacgttgccaaaccagccagggaaccaacctgggaagtggccagaactgcctggggtccaagaactcttgtgcctccgtccatcaccatgtgggttttgaagaccctcgactgcctccccgatgctccgaagcctgatcttccagggtggggaggagaaaatcccacctcccctgacctccaccacctccaccaccaccaccaccaccaccaccaccactaccaccaccacccaactggggctagagtggggaagatttcccctttagatcaaactgccccttccatggaaaagctggaaaaaaactctggaacccatatccaggcttggtgaggttgctgccaacagtcctggcctcccccatccctaggctaaagagccatgagtcctggaggaggagaggacccctcccaaaggactggagacaaaaccctctgcttccttgggtccctccaagactccctggggcccaactgtgttgctccacccggacccatctctcccttctagacctgagcttgcccctccagctagcactaagcaacatctcgctgtggacgcctgtaaattactgagaaatgtgaaacgtgcaatcttgaaactgaggtgttagaaaacttgatctgtggtgttttgttttgttttttttcttaaaacaacagcaacgtgatcttggctgtctgtcatgtgttgaagtccatggttgggtcttgtgaagtctgaggtttaacagtttgttgtcctggagggattttcttacagcgaagacttgagttcctccaagtcccagaaccccaagaatgggcaagaaggatcaggtcagccactccctggagacacagccttctggctgggactgacttggccatgttctcagctgagccacgcggctggtagtgcagccttctgtgaccccgctgtggtaagtccagcctgcccagggctgctgagggctgcctcttgacagtgcagtcttatcgagacccaatgcctcagtctgctcatccgtaaagtggggatagtgaagatgacacccctccccaccacctctcataagcactttaggaacacacagagggtagggatagtggccctggccgtctatcctacccctttagtgaccgcccccatcccggctttctgagctgatccttgaagaagaaatcttccatttctgctctcaaaccctactgggatcaaactggaataaattgaagacagccagggggatggtgcagctgtgaagctcgggctgattccccctctgtcccagaaggttggccagagggtgtgacccagttaccctttaacccccacccttccagtcgggtgtgagggcctgaccgggcccagggcaagcagatgtcgcaagccctatttattcagtcttcactataactcttagagttgagacgctaatgttcatgactcctggccttgggatgcccaagggatttctggctcaggctgtaaaagtagctgagccatcctgcccattcctggaggtcctacaggtgaaactgcaggagctcagcatagacccagctctctgggggatggtcacctggtgatttcaatgatggcatccaggaattagctgagccaacagaccatgtggacagctttggccagagctcccgtgtggcatctgggagccacagtgacccagccacctggctcaggctagttccaaattccaaaagattggcttgtaaaccttcgtctccctctcttttacccagagacagcacatacgtgtgcacacgcatgcacacacacattcagtattttaaaagaatgttttcttggtgccattttcattttattttattttttaattcttggagggggaaataagggaataaggccaaggaagatgtatagctttagctttagcctggcaacctggagaatccacataccttgtgtattgaaccccaggaaaaggaagaggtcgaaccaaccctgcggaaggagcatggtttcaggagtttattttaagactgctgggaaggaaacaggccccattttgtatatagttgcaacttaaactttttggcttgcaaaatatttttgtaataaagatttctgggtaataatgagtccttccggtgttcagtattcttgtctttgtgagtgcgtcccggggccgcctcggggcctgcctgccctcctgccaaagcctggaagaggattgaatggaccccagggtttggaaacaacctacagcatttgagcccctcacgtaggttttagagacgtacaatttttgtttgccctggctcagaaggagccggtgtaaggttgagataaaattccatatagacaactgagtttggatctcggctctgctgctttgtagctgtgggagttcaaacagcacctctttgagacttgggccccgcgtcggcacaatggggcaggaatagtccctgccagggtgactgtgtggattcaaggaggttggaagcactgagcccacgcttggcactgggtaggccatcactgaggcttgtgtctttccttcctgccctgaccctgcatagctgagtctcgtggcctctcaccactgatgggatctcggacacccggctcaccctcctcctggggcctcactttccttccccaccaaatgcagacatctaatgcttgtcctgtaatatccttgccagatgactgatgtcaagtgctggtttatagtgggtgctcaataaatgttagtttcctttctatccctccattagatcattaatgatattagtgctaattatgtaataaagttaaggcataaatatgttaa

SEQ ID NO: 181676 - DNA, 1659 bp, Homo sapiens
  Payload ID: 15783
  Gene Symbol: SIRPB1
  Gene Name: signal-regulatory protein beta 1
  ENST ID: ENST00000262929
  CDS Start-End: 1-543
atgcctgtcccagcctcctggccccaccctccttgtcctttcctgctgctgactctattgctgggactcacaggagtggcaggtgaggacgagctacaggtgattcagcctgaaaagtccgtatcagttgcagctggagagtcggccactctgcgctgtgctatgacgtccctgatccctgtggggcccatcatgtggtttagaggagctggagcaggccgggaattaatctacaatcagaaagaaggccacttcccacgggtaacaactgtttcagaactcacaaagagaaacaacctggacttttccatcagcatcagtaacatcaccccagcagacgccggcacctactactgtgtgaagttccggaaagggagccctgacgacgtggagtttaagtctggagcaggcactgagctgtctgtgcgcgaagcagcgctggctcctactgctccactcctcgtagctctcctcctgggccccaagctgctactggtggttggtgtctctgccatctacatctgctggaaacagaaggcctgactgaccctcagtctctgctgcctcctcctttcttgagaagctcagcctgagagaaggagctggcgagaaccttccccacactcagctccaaacgcctcctctcccaggtcatctgcctgcccacacgctcctgttccaccttcacaagaccatgatgccccaaagcagtgtctctattcacggtcctgagcaggggccatgggattgggctctgggcactgactcatggcacctccctagaaggtgagaaacactccaaatctaaacacaccaggacttctcccatccgtcgccttgggactggccataaaccacagactctctccaggctctcaagagttatcctgtcttctggattcctgcctaccccaactcccccagccttgttgaggttctctactgcctcctgaatacacatgaacccctataccaattttaagaaaaaaatgattctctttcctctttgtccaagcatcctatccctcaaacccaaaaagaaagaagctctcccttctctctctgtgatggagacagtatttcttctagtatcctgcagccttcccagtcctgctgcttgtggtagaaatgctgccacagcccaacattgaggagccctcgatgactgccctttacaactcatattcagttctgcctccaaaatgcatgtgtccacttacatgagatggtaaatgtttaacaatggactttctgaaagggaaaaaccaaaagctgttttgcagtgcttgccaatttctctagtgtaataactcccaacctgaccaatttcacactgccaacagttaaacaaccagattgcaagattcctgaaatttaacaattggttttcagggcccagtccaagcctgctgctggaaacctcagagttaaatccctattctccacacctctcacctccaccacccctccctgtcccagccagcatcatctctttggggaccactcctctggctttcatttttcagccacagtgattctttggaaaagtcaaatcatatcacttctctgcttcttccccaacacagctgcatggctcccgctctccctccttcaagtctctgctcaatgtcacttcattaaaggcaccttctataaact

SEQ ID NO: 181677 - DNA, 2207 bp, Homo sapiens
  Payload ID: 15783
  Gene Symbol: SIRPB1
  Gene Name: signal-regulatory protein beta 1
  Uniprot ID: Q5TFQ8
  ENST ID: ENST00000279477
  CDS Start-End: 66-1262
agagcagagtctgcgatcttcccagcacagacgtttggacagagcaggctcctaaggtctccagaatgcccgtgccagcctcctggccccaccttcctagtcctttcctgctgatgacgctactgctggggagactcacaggggtagctggcgaggaagagctgcaggtgattcagcctgacaagtccatatcagttgcagctggagagtcggccactctgcactgcactgtgacttccctgatccctgtggggcccatccagtggttcagaggagctggaccaggccgggaattaatctacaatcagaaagaaggccacttcccacgggtaacaactgtttcagacctcacaaagagaaacaacatggacttttccatccgcatcagtaacatcaccccagcagatgccggcacctactactgtgtgaagttccggaaagggagccccgaccacgtggagtttaagtctggagcaggcaccgagctgtctgtgcgtgccaaaccctctgcccccgtggtatcgggccctgcggcgagggccacacctcagcacacagtgagcttcacctgcgagtcccacggcttctcacccagagacatcaccctgaaatggttcaaaaatgggaatgagctctcagacttccagaccaacgtggaccccgcaggagacagtgtgtcctacagcatccacagcacagccaaggtggtgctgacccgcgaggacgttcactctcaagtcatctgcgaggtggcccacgtcaccttgcagggggaccctcttcgtgggactgccaacttgtctgagaccatccgagttccacccaccttggaggttactcaacagcccgtgagggcagagaaccaggtgaatgtcacctgccaggtgaggaagttctacccccagagactacagctgacctggttggagaatggaaacgtgtccaggacagaaacggcctcaacccttacagaaaacaaggatggtacctacaactggatgagctggctcctggtgaatgtatctgcccacagggatgatgtgaagctcacctgccaggtggagcatgacgggcagccagcggtcagcaaaagccatgacctgaaggtctcagcccacccgaaggagcagggctcaaatactgctcctggcccagcactggcttctgctgctccacttctcatagctttcctcctgggccccaaggtgctgctggtggttggtgtctctgtcatctatgtctactggaagcagaaggcctgactgcatcccagaaggagaccagcaccaggaatacaacagcctcccaggaaatgtttcttaaatgatgagcagatgattaaatatggacatgttacccacagctccttccctcctcccctgccacatggaacccccagtctctcctgcctacttccttccttgaatggctctgactgagagaaggggctggtgagaagcttccccagactgagctccaaacacctcccctcccaggacatcttcctgcccacaggctcctgttgctcctttgcagagtccttgattctccagagcagtcttcattcatggtcctgagcagaggccatgggatggggctctggggagtgactcatgacacctccctaggatgtgggaaacacgccaaatctaaacacatcaggacacctctcctccatcgtcttggactctccgtaagccacaaactgcagtccagattctcaagagttattctgccttctggattcctgcctacccaattacccagccttgttgagattctctattgcctcctgaatacaaattaacactcatcctggttttaaggagaaaaatgattatccttcctctttgtttatacgtatgatataatttggatattttttccctacaaatctcaatgtgaaatttcatcccctatgttggaggtggggtcaggtgggaggtgtttgggtcatggggatggattcatcatgaatgacttggtgttatcttggtctattagcacccacaagatctgattgtttaaaagtgcctagcagctccctcttctctttttctcttcctctctccccatgttatgccaactccacttcactgtccactgtgagcagaagcactctgaggccctcagcagcagatgcaagtaccatgcttcttgtacagtctgcagaaccaaaagccaaataaacctctctttataaatta

SEQ ID NO: 181678 - DNA, 1715 bp, Homo sapiens
  Payload ID: 15783
  Gene Symbol: SIRPB1
  Gene Name: signal-regulatory protein beta 1
  Uniprot ID: O00241
  ENST ID: ENST00000381603
  CDS Start-End: 53-598
cgatcttcccagcacagacgtttggacagagcaggctcctaaggtctccagaatgcccgtgccagcctcctggccccaccttcctagtcctttcctgctgatgacgctactgctggggagactcacaggagtggcaggtgaggacgagctacaggtgattcagcctgaaaagtccgtatcagttgcagctggagagtcggccactctgcgctgtgctatgacgtccctgatccctgtggggcccatcatgtggtttagaggagctggagcaggccgggaattaatctacaatcagaaagaaggccacttcccacgggtaacaactgtttcagaactcacaaagagaaacaacctggacttttccatcagcatcagtaacatcaccccagcagacgccggcacctactactgtgtgaagttccggaaagggagccctgacgacgtggagtttaagtctggagcaggcactgagctgtctgtgcgcgaagcagcgctggctcctactgctccactcctcgtagctctcctcctgggccccaagctgctactggtggttggtgtctctgccatctacatctgctggaaacagaaggcctgactgaccctcagtctctgctgcctcctcctttcttgagaagctcagcctgagagaaggagctggcgagaaccttccccacactcagctccaaacgcctcctctcccaggtcatctgcctgcccacacgctcctgttccaccttcacaagaccatgatgccccaaagcagtgtctctattcacggtcctgagcaggggccatgggattgggctctgggcactgactcatggcacctccctagaaggtgagaaacactccaaatctaaacacaccaggacttctcccatccgtcgccttgggactggccataaaccacagactctctccaggctctcaagagttatcctgtcttctggattcctgcctaccccaactcccccagccttgttgaggttctctactgcctcctgaatacacatgaacccctataccaattttaagaaaaaaatgattctctttcctctttgtccaagcatcctatccctcaaacccaaaaagaaagaagctctcccttctctctctgtgatggagacagtatttcttctagtatcctgcagccttcccagtcctgctgcttgtggtagaaatgctgccacagcccaacattgaggagccctcgatgactgccctttacaactcatattcagttctgcctccaaaatgcatgtgtccacttacatgagatggtaaatgtttaacaatggactttctgaaagggaaaaaccaaaagctgttttgcagtgcttgccaatttctctagtgtaataactcccaacctgaccaatttcacactgccaacagttaaacaaccagattgcaagattcctgaaatttaacaattggttttcagggcccagtccaagcctgctgctggaaacctcagagttaaatccctattctccacacctctcacctccaccacccctccctgtcccagccagcatcatctctttggggaccactcctctggctttcatttttcagccacagtgattctttggaaaagtcaaatcatatcacttctctgcttcttccccaacacagctgcatggctcccgctctccctccttcaagtctctgctcaatgtcacttcattaaaggcaccttctataaacta

SEQ ID NO: 181679 - DNA, 3241 bp, Homo sapiens
  Payload ID: 15783
  Gene Symbol: SIRPB1
  Gene Name: signal-regulatory protein beta 1
  Uniprot ID: O00241
  ENST ID: ENST00000381605
  CDS Start-End: 66-1262
agagcagagtctgcgatcttcccagcacagacgtttggacagagcaggctcctaaggtctccagaatgcccgtgccagcctcctggccccaccttcctagtcctttcctgctgatgacgctactgctggggagactcacaggagtggcaggtgaggacgagctacaggtgattcagcctgaaaagtccgtatcagttgcagctggagagtcggccactctgcgctgtgctatgacgtccctgatccctgtggggcccatcatgtggtttagaggagctggagcaggccgggaattaatctacaatcagaaagaaggccacttcccacgggtaacaactgtttcagaactcacaaagagaaacaacctggacttttccatcagcatcagtaacatcaccccagcagacgccggcacctactactgtgtgaagttccggaaagggagccctgacgacgtggagtttaagtctggagcaggcactgagctgtctgtgcgcgccaaaccctctgcccccgtggtatcgggccctgcggtgagggccacacctgagcacacagtgagcttcacctgcgagtcccatggcttctctcccagagacatcaccctgaaatggttcaaaaatgggaatgagctctcagacttccagaccaacgtggaccccgcaggagacagtgtgtcctacagcatccacagcacagccagggtggtgctgacccgtggggacgttcactctcaagtcatctgcgagatagcccacatcaccttgcagggggaccctcttcgtgggactgccaacttgtctgaggccatccgagttccacccaccttggaggttactcaacagcccatgagggcagagaaccaggcaaacgtcacctgccaggtgagcaatttctacccccggggactacagctgacctggttggagaatggaaatgtgtcccggacagaaacagcttcgaccctcatagagaacaaggatggcacctacaactggatgagctggctcctggtgaacacctgtgcccacagggacgatgtggtgctcacctgtcaggtggagcatgatgggcagcaagcagtcagcaaaagctatgccctggagatctcagcgcaccagaaggagcacggctcagatatcacccatgaagcagcgctggctcctactgctccactcctcgtagctctcctcctgggccccaagctgctactggtggttggtgtctctgccatctacatctgctggaaacagaaggcctgactgaccctcagtctctgctgcctcctcctttcttgagaagctcagcctgagagaaggagctggcgagaaccttccccacactcagctccaaacgcctcctctcccaggtcatctgcctgcccacacgctcctgttccaccttcacaagaccatgatgccccaaagcagtgtctctattcacggtcctgagcaggggccatgggattgggctctgggcactgactcatggcacctccctagaaggtgagaaacactccaaatctaaacacaccaggacttctcccatccgtcgccttgggactggccataaaccacagactctctccaggctctcaagagttatcctgtcttctggattcctgcctaccccaactcccccagccttgttgaggttctctactgcctcctgaatacacatgaacccctataccaattttaagaaaaaaatgattctctttcctctttgtccaagcatcctatccctcaaacccaaaaagaaagaagctctcccttctctctctgtgatggagacagtatttcttctagtatcctgcagccttcccagtcctgctgcttgtggtagaaatgctgccacagcccaacattgaggagccctcgatgactgccctttacaactcatattcagttctgcctccaaaatgcatgtgtccacttacatgagatggtaaatgtttaacaatggactttctgaaagggaaaaaccaaaagctgttttgcagtgcttgccaatttctctagtgtaataactcccaacctgaccaatttcacactgccaacagttaaacaaccagattgcaagattcctgaaatttaacaattggttttcagggcccagtccaagcctgctgctggaaacctcagagttaaatccctattctccacacctctcacctccaccacccctccctgtcccagccagcatcatctctttggggaccactcctctggctttcatttttcagccacagtgattctttggaaaagtcaaatcatatcacttctctgcttcttccccaacacagctgcatggctcccgctctccctccttcaagtctctgctcaatgtcacttcattaaaggcaccttctataaactaccttgtataaaatattatttattttctctatcccggcattctaatttctcttatcctaattaatttttctttagcccttattttgatgagtattatgccgaatacaggcagccctcacttttcatggcagtgcaagattgcaaaaatgactgtgcaacctgaaacccaggaaagcagtctccatagtcaatcagaaaaacaatgatcattctgtgacctttaccattttttgtcaaaatattagaaactctcacactctcagttacaaatgtagaggacaatgaaaatataatgaaataaatatttatttgtgcactacaattcaaagcattagaaacattgagagttcaagtgctgtttctttgtaaaaatgtatccagagtagttggaagagtgcttgcctttttttgtatatttctaatatggagtgatatagtttggctctgtgtctccatccaaatctcatcttaaattgtaatctgcatgtgttgtgggatgggcctggtaggaggtgactgaatcatgggggcggacttcccccttgctgttcttgtgatagtgagttctcataagatctcagtgagttctcatgagatctggttttttgaaagtgtgtggcaagtcccccttcgctctctctctctctctccctcctgccaccatgtgaagaaggtgcctgcttccttttctccttccaccatggttgtaagtttcctgaggcctcccagtcatgcttcctgttaagcctgtggaactgtgagtccaattaaacctcttttattcataaaatatccagtttctggtagttctttatagcagtgtgagaatgggctaatacacggagcaagcattgtttcttttc

SEQ ID NO: 181680 - DNA, 807 bp, Homo sapiens
  Payload ID: 15783
  Gene Symbol: SIRPB1
  Gene Name: signal-regulatory protein beta 1
  ENST ID: ENST00000562014
  CDS Start-End: 1-711
cacacagtgagcttcacctgcgagtcccacggcttctcacccagagacatcaccctgaaatggttcaaaaatgggaatgagctctcagacttccagaccaacgtggaccccgcaggagacagtgtgtcctacagcatccacagcacagccaaggtggtgctgacccgcgaggacgttcactctcaagtcatctgcgaggtggcccacgtcaccttgcagggggaccctcttcgtgggactgccaacttgtctgagaccatccgagttccacccaccttggaggttactcaacagcccgtgagggcagagaaccaggtgaatgtcacctgccaggtgaggaagttctacccccagagactacagctgacctggttggagaatggaaacgtgtccaggacagaaacggcctcaacccttacagaaaacaaggatggtacctacaactggatgagctggctcctggtgaatgtatctgcccacagggatgatgtgaagctcacctgccaggtggagcatgacgggcagccagcggtcagcaaaagccatgacctgaaggtctcagcccacccgaaggagcagggctcaaatactgctcctggcccagcactggcttctgctgctccacttctcatagctttcctcctgggccccaaggtgctgctggtggttggtgtctctgtcatctatgtctactggaagcagaaggcctgactaagcactctgaggccctcagcagcagatgcaagtaccatgcttcttgtacagtctgcagaaccaaaagccaaataaacctctctttataaatta

SEQ ID NO: 181681 - DNA, 583 bp, Homo sapiens
  Payload ID: 15783
  Gene Symbol: SIRPB1
  Gene Name: signal-regulatory protein beta 1
  ENST ID: ENST00000563840
  CDS Start-End: 116-583
atagccacttcctcttgaactgagggaggcagggcttgtcttctctcctcagagcagagcctgacatctccccaccacagacgtttgaacagagcaggctcctgaggtctccaggatgcctgtcccagcctcctggccccaccctccttgtcctttcctgctgctgactctattgctgggactcacaggagtggcaggtgaggacgagctacaggtgattcagcctgaaaagtccgtatcagttgcagctggagagtcggccactctgcgctgtgctatgacgtccctgatccctgtggggcccatcatgtggtttagaggagctggagcaggccgggaattaatctacaatcagaaagaaggccacttcccacgggtaacaactgtttcagaactcacaaagagaaacaacctggacttttccatcagcatcagtaacatcaccccagcagacgccggcacctactactgtgtgaagttccggaaagggagccctgacgacgtggagtttaagtctggagcaggcactgagctgtctgtgcgcgaagcagcgctggctcctactgctccactcctcgtagct

SEQ ID NO: 181682 - DNA, 947 bp, Homo sapiens
  Payload ID: 15783
  Gene Symbol: SIRPB1
  Gene Name: signal-regulatory protein beta 1
  ENST ID: ENST00000569387
  CDS Start-End: 1-234
cacagggatgatgtgaagctcacctgccaggtggagcatgacgggcagccagcggtcagcaaaagccatgacctgaaggtctcagcccacccgaaggagcagggctcaaatactgctcctggcccagcactggcttctgctgctccacttctcatagctttcctcctgggccccaaggtgctgctggtggttggtgtctctgtcatctatgtctactggaagcagaaggcctgactgacatcttcctgcccacaggctcctgttgctcctttgcagagtccttgattctccagagcagtcttcattcatggtcctgagcagaggccatgggatggggctctggggagtgactcatgacacctccctaggatgtgggaaacacgccaaatctaaacacatcaggacacctctcctccatcgtcttggactctccgtaagccacaaactgcagtccagattctcaagagttattctgccttctggattcctgcctacccaattacccagccttgttgagattctctattgcctcctgaatacaaattaacactcatcctggttttaaggagaaaaatgattatccttcctctttgtttatacgtatgatataatttggatattttttccctacaaatctcaatgtgaaatttcatcccctatgttggaggtggggtcaggtgggaggtgtttgggtcatggggatggattcatcatgaatgacttggtgttatcttggtctattagcacccacaagatctgattgtttaaaagtgcctagcagctccctcttctctttttctcttcctctctccccatgttatgccaactccacttcactgtccactgtgagcagaagcactctgaggccctcagcagcagatgcaagtaccatgcttcttgtacagtctgcagaaccaaaagccaaataaacctctctttataaatta

SEQ ID NO: 181683 - DNA, 655 bp, Homo sapiens
  Payload ID: 15783
  Gene Symbol: SIRPB1
  Gene Name: signal-regulatory protein beta 1
  ENST ID: ENST00000565230
  CDS Start-End: 1-395
ttccacccaccttggaggttactcaacagcccgtgagggcagagaaccaggtgaatgtcacctgccaggtgaggaagttctacccccagagactacagctgacctggttggagaatggaaacgtgtccaggacagaaacggcctcaacccttacagaaaacaaggatggtacctacaactggatgagctggctcctggtgaatgtatctgcccacagggatgatgtgaagctcacctgccaggtggagcatgacgggcagccagcggtcagcaaaagccatgacctgaaggtctcagcccacccgaaggagcagggctcaaatactgctcctgtgagtctggagttttacagaaggggaaaccaggacttgggaagcaatgggggatattgttgaagacaattagatcaaggcattagaccagatgactggcccaaactaattaaggcccagcactggcttctgctgctccacttctcatagctttcctcctgggccccaaggtgctgctggtggttggtgtctctgtcatctatgtctactggaagcagaaggcctgactaagcactctgaggccctcagcagcagatgcaagtaccatgcttcttgtacagtctgcagaaccaaaagccaaataaacctctctttataaatta

SEQ ID NO: 181684 - DNA, 1701 bp, Homo sapiens
  Payload ID: 15783
  Gene Symbol: SIRPB1
  Gene Name: signal-regulatory protein beta 1
  Uniprot ID: Q5TFQ8
  ENST ID: ENST00000568365
  CDS Start-End: 66-1262
agagcagagtctgcgatcttcccagcacagacgtttggacagagcaggctcctaaggtctccagaatgcccgtgccagcctcctggccccaccttcctagtcctttcctgctgatgacgctactgctggggagactcacaggggtagctggcgaggaagagctgcaggtgattcagcctgacaagtccatatcagttgcagctggagagtcggccactctgcactgcactgtgacttccctgatccctgtggggcccatccagtggttcagaggagctggaccaggccgggaattaatctacaatcagaaagaaggccacttcccacgggtaacaactgtttcagacctcacaaagagaaacaacatggacttttccatccgcatcagtaacatcaccccagcagatgccggcacctactactgtgtgaagttccggaaagggagccccgaccacgtggagtttaagtctggagcaggcaccgagctgtctgtgcgtgccaaaccctctgcccccgtggtatcgggccctgcggcgagggccacacctcagcacacagtgagcttcacctgcgagtcccacggcttctcacccagagacatcaccctgaaatggttcaaaaatgggaatgagctctcagacttccagaccaacgtggaccccgcaggagacagtgtgtcctacagcatccacagcacagccaaggtggtgctgacccgcgaggacgttcactctcaagtcatctgcgaggtggcccacgtcaccttgcagggggaccctcttcgtgggactgccaacttgtctgagaccatccgagttccacccaccttggaggttactcaacagcccgtgagggcagagaaccaggtgaatgtcacctgccaggtgaggaagttctacccccagagactacagctgacctggttggagaatggaaacgtgtccaggacagaaacggcctcaacccttacagaaaacaaggatggtacctacaactggatgagctggctcctggtgaatgtatctgcccacagggatgatgtgaagctcacctgccaggtggagcatgacgggcagccagcggtcagcaaaagccatgacctgaaggtctcagcccacccgaaggagcagggctcaaatactgctcctggcccagcactggcttctgctgctccacttctcatagctttcctcctgggccccaaggtgctgctggtggttggtgtctctgtcatctatgtctactggaagcagaaggcctgactctccttccctcctcccctgccacatggaacccccagtctctcctgcctacttccttccttgaatggctctgactgagagaaggggctggtgagaagcttccccagactgagctccaaacacctcccctcccaggacatcttcctgcccacaggctcctgttgctcctttgcagagtccttgattctccagagcagtcttcattcatggtcctgagcagaggccatgggatggggctctggggagtgactcatgacacctccctaggatgtgggaaacacgccaaatctaaacacatcaggacacctctcctccatcgtcttggactctccgtaagccacaaactgcagtccagattctcaagagttattctgccttctggattcctgcctacccaattacccagccttgttgagattctctattgcctcctgaatac

SEQ ID NO: 181685 - DNA, 472 bp, Homo sapiens
  Payload ID: 15783
  Gene Symbol: SIRPB1
  Gene Name: signal-regulatory protein beta 1
  ENST ID: ENST00000569629
  CDS Start-End: 1-177
cggaaagggagccccgaccacgtggagtttaagtctggagcaggcaccgagctgtctgtgcgtgaagcagcgctggctcctactgctccactcctcgtagctctcctcctgggccccaagctgctactggtggttggtgtctctgccatctacatctgctggaaacagaaggcctgactgaccctcagtctctgctgcctcctcctttcttgagaagctcagcctgagagaaggagctggcgagaaccttccccacactcagctccaaacgcctcctctcccaggtcatctgcctgcccacacgctcctgttccaccttcacaagaccatgatgccccaaagcagtgtctctattcacggtcctgagcaggggccatgggattgggctctgggcactgactcatggcacctccctagaaggtgagaaacactccaaatctaaacacaccaggacttctcccatccgtcgcct

SEQ ID NO: 181686 - DNA, 928 bp, Homo sapiens
  Payload ID: 15783
  Gene Symbol: SIRPB1
  Gene Name: signal-regulatory protein beta 1
  ENST ID: ENST00000566055
  CDS Start-End: 1-234
cacagggatgatgtgaagctcacctgccaggtggagcatgacgggcagccagcggtcagcaaaagccatgacctgaaggtctcagcccacccgaaggagcagggctcaaatactgctcctggcccagcactggcttctgctgctccacttctcatagctttcctcctgggccccaaggtgctgctggtggttggtgtctctgtcatctatgtctactggaagcagaaggcctgactgctcctgttgctcctttgcagagtccttgattctccagagcagtcttcattcatggtcctgagcagaggccatgggatggggctctggggagtgactcatgacacctccctaggatgtgggaaacacgccaaatctaaacacatcaggacacctctcctccatcgtcttggactctccgtaagccacaaactgcagtccagattctcaagagttattctgccttctggattcctgcctacccaattacccagccttgttgagattctctattgcctcctgaatacaaattaacactcatcctggttttaaggagaaaaatgattatccttcctctttgtttatacgtatgatataatttggatattttttccctacaaatctcaatgtgaaatttcatcccctatgttggaggtggggtcaggtgggaggtgtttgggtcatggggatggattcatcatgaatgacttggtgttatcttggtctattagcacccacaagatctgattgtttaaaagtgcctagcagctccctcttctctttttctcttcctctctccccatgttatgccaactccacttcactgtccactgtgagcagaagcactctgaggccctcagcagcagatgcaagtaccatgcttcttgtacagtctgcagaaccaaaagccaaataaacctctctttataaatta

SEQ ID NO: 181687 - DNA, 814 bp, Homo sapiens
  Payload ID: 15783
  Gene Symbol: SIRPB1
  Gene Name: signal-regulatory protein beta 1
  ENST ID: ENST00000565076
  CDS Start-End: 1-549
gggaatgagctctcagacttccagaccaacgtggaccccgcaggagacagtgtgtcctacagcatccacagcacagccagggtggtgctgacccgtggggacgttcactctcaagtcatctgcgagatagcccacatcaccttgcagggggaccctcttcgtgggactgccaacttgtctgaggccatccgagttccacccaccttggaggttactcaacagcccatgagggcagagaaccaggcaaacgtcacctgccaggtgagcaatttctacccccggggactacagctgacctggttggagaatggaaatgtgtcccggacagaaacagcttcgaccctcatagagaacaaggatggcacctacaactggatgagctggctcctggtgaacacctgtgcccacagggacgatgtggtgctcacctgtcaggtggagcatgatgggcagcaagcagtcagcaaaagctatgccctggagatctcagcgcaccagaaggagcacggctcagatatcacccatggtgcggttacttcccatttttaaattttgtctttttctttaatgttaaaagcaatattcatgcttgtcataaaataagctagaagtctataaatataaagtagaattttaacgtctacattaaaatcctacactccatgggtcaccactacttagaaggttcaaggtaacaattggccatttgtagacacccttaagccccatctaccaggagaaactgtgcgtcaagtctgatgcacaacttgatagatattttgacataaatatacattaaaggaaaaaagagaga

SEQ ID NO: 181688 - DNA, 907 bp, Homo sapiens
  Payload ID: 15783
  Gene Symbol: SIRPB1
  Gene Name: signal-regulatory protein beta 1
  ENST ID: ENST00000565087
  CDS Start-End: 1-234
cacagggatgatgtgaagctcacctgccaggtggagcatgacgggcagccagcggtcagcaaaagccatgacctgaaggtctcagcccacccgaaggagcagggctcaaatactgctcctggcccagcactggcttctgctgctccacttctcatagctttcctcctgggccccaaggtgctgctggtggttggtgtctctgtcatctatgtctactggaagcagaaggcctgactagtccttgattctccagagcagtcttcattcatggtcctgagcagaggccatgggatggggctctggggagtgactcatgacacctccctaggatgtgggaaacacgccaaatctaaacacatcaggacacctctcctccatcgtcttggactctccgtaagccacaaactgcagtccagattctcaagagttattctgccttctggattcctgcctacccaattacccagccttgttgagattctctattgcctcctgaatacaaattaacactcatcctggttttaaggagaaaaatgattatccttcctctttgtttatacgtatgatataatttggatattttttccctacaaatctcaatgtgaaatttcatcccctatgttggaggtggggtcaggtgggaggtgtttgggtcatggggatggattcatcatgaatgacttggtgttatcttggtctattagcacccacaagatctgattgtttaaaagtgcctagcagctccctcttctctttttctcttcctctctccccatgttatgccaactccacttcactgtccactgtgagcagaagcactctgaggccctcagcagcagatgcaagtaccatgcttcttgtacagtctgcagaaccaaaagccaaataaacctctctttataaatta

SEQ ID NO: 181689 - DNA, 2642 bp, Homo sapiens
  Payload ID: 15784
  Gene Symbol: SIRPB2
  Gene Name: signal-regulatory protein beta 2
  Uniprot ID: Q5JXA9
  ENST ID: ENST00000359801
  CDS Start-End: 38-1066
agaggagccccaagtcttggggaccacagaagatgccatgtgctccacgatgtcggcccccacctgcctggcccacttgcctccctgcttcctgctgctggcactggtccttgtcccctcagatgcctctgggcagagcagcaggaatgactggcaggtgctacagcccgagggccccatgctggtggcagaaggtgagacacttctactgaggtgtatggtggtcggctcctgcactgatggtatgataaaatgggtgaaggtgagcactcaggaccaacaggaaatttataactttaaacgtggctccttccctggggtaatgcccatgatccaacggacatcagaaccactgaattgtgattattccatctatatccacaatgtcaccagggagcacactggaacctaccactgtgtgaggtttgatggtttgagtgaacactcagaaatgaaatcggatgaaggcacctcagtgcttgtgaagggagctggggaccctgaaccagacctgtggatcatccagccccaggaattggtgttggggaccactggagacactgtctttctgaactgcacagtgcttggagacggtccccctggacccatcaggtggttccagggagctggtctgagccgggaggccatttacaactttggaggcatctcccaccccaaggagacagcggtgcaggcctccaacaatgacttcagcattcttctgcaaaacgtctccagtgaggatgcaggcacctattactgtgtaaagtttcagaggaaacccaacaggcaatacctgtctggacagggcaccagcctgaaagtgaaagcaaaatctacctcttccaaagaggcagaattcaccagtgaacctgcaactgagatgtctccaacaggcctcctggttgtgttcgcacctgtggtcctggggctgaaggcaattaccttggctgcactcctactggccctggctacctctcggaggagccctgggcaagaagatgtcaagaccacaggcccagcaggagccatgaacaccttagcatggagcaagggtcaagagtgaggggtcagccccagagtgaggaccctctgagttggagaggagccagggctcctcaaccatttccctacctccagtcccagcctctaggtgcccccaggcctcatgacaaactcctagatccctacatctggttttggtccacctagtgaaattcccttctttgcaccgggcttccctctaaaatgtctccctttctctttttggcctgttcaagacctccttgcttttcagtccctggctcagtctctcctcaacacccttgcccctgctgcagccctttctggtgcgccctgcccctttccccacctcgctacatccttcttggcctccaacatccaactcagagtcttcttcccaggagatgtctgtaagaatctctgaactcaaccagccagaccatctgtgcccctccatctacacctttctccccactccttcctgccttccttccatccccctcatggctggcttgggcaggtataatattagaatgcaggttcagcaactataacaaagctcttaaataacagtggcttaaaccagtggaaatcaaccagaaagttgaccatcagcaggccaagcaatacagagactccctggtattgagacccaggattcactgatctcattgctaccaggtccaccttctaggcagccagactggaaaagagggcaggaaaggggagcaggaccctcccctttaagtgcacagtcaggaacttggccacctcacttatctctacttggctggaatgtggtcacatggtcacacctagctgcaagaaacactgggagatgtagtctttatttctggcagcaatgcgcccagctgcaagttttcactagagaaaccagatggcagatatcaggggataaccagttatctccaccacagcagcatacagacagcctctcacctgccctgtgggacacctgagttcaatgcccagctagctagccagcacttcttcccactatcacctcccctggggcagcatgatgtggggcagtagttcccaagatgagtgattttgcccccactggacttttggcaatgtctagagatgtttttggttggcacaacctgggggggtgctaccaccatctagtggactgagaagccctgacatggggaagagtgtgcatgcccaggagtcagacacacctgcctttaaccctgaggcctctgcctcctccctgtgcaccctcagtgactaatcagagtcccttcccatcacggaacatccaggatactaatgtggacttctctgcattgtgtaagaaccaattcaagaccaggcacggtggcttatgcatgtaatcccagcactttgggaggccgaggtgggtggatcacctgagttcaggagtttgagaccagcctggctaacatggtgaaacctcgtctctactaaaaatacaaaaaattagccaggcgtggtggtgtgcacctgtaatcccagctacttgggaggatggggcaggagaaccgcttgaactgggaggcagaggctgcagtgagctgagatcgcgccattgcactccagcctgggcaacaagagcaaaactccgtctc

SEQ ID NO: 181690 - DNA, 884 bp, Homo sapiens
  Payload ID: 15784
  Gene Symbol: SIRPB2
  Gene Name: signal-regulatory protein beta 2
  Uniprot ID: Q5JXA9
  ENST ID: ENST00000444444
  CDS Start-End: 123-857
acttccccaagcagctgtggccaagagacgcagaaactgccttgtccacgggccccgcctcagactccaacactcacaagagagcagaggagccccaagtcttggggaccacagaagatgccatgtgctccacgatgtcggcccccacctgcctggcccacttgcctccctgcttcctgctgctggcactggtccttgtcccctcagatgcctctgggcagagcagcaggaatgactggcaggtgctacagcccgagggccccatgctggtggcagaaggagctggggaccctgaaccagacctgtggatcatccagccccaggaattggtgttggggaccactggagacactgtctttctgaactgcacagtgcttggagacggtccccctggacccatcaggtggttccagggagctggtctgagccgggaggccatttacaactttggaggcatctcccaccccaaggagacagcggtgcaggcctccaacaatgacttcagcattcttctgcaaaacgtctccagtgaggatgcaggcacctattactgtgtaaagtttcagaggaaacccaacaggcaatacctgtctggacagggcaccagcctgaaagtgaaagcaaaatctacctcttccaaagaggcagaattcaccagtgaacctgcaactgagatgtctccaacaggcctcctggttgtgttcgcacctgtggtcctggggctgaaggcaattaccttggctgcactcctactggccctggctacctctcggaggagccctgggcaagaagatgtcaagaccacaggcccagcaggagccatgaacaccttagcatggagcaagggtcaagagtgaggggtcagccccagagtgaggaccctc

SEQ ID NO: 181691 - DNA, 1930 bp, Homo sapiens
  Payload ID: 15784
  Gene Symbol: SIRPB2
  Gene Name: signal-regulatory protein beta 2
  ENST ID: ENST00000481731
  CDS Start-End: 160-1029
tattgcaccaacagccttgtgttgctgcaatgaaaacacttccccaagcagctgtggccaagagacgcagaaactgccttgtccacgggccccgcctcagactccaacactcacaagagagcagaggagccccaagtcttggggaccacagaagatgccatgtgctccacgatgtcggcccccacctgcctggcccacttgcctccctgcttcctgctgctggcactggtccttgtcccctcagatgcctctgggcagagcagcaggaatgactggcaggtgctacagcccgagggccccatgctggtggcagaaggtgagacacttctactgaggtgtatggtggtcggctcctgcactgatggtatgataaaatgggtgaaggtgagcactcaggaccaacaggaaatttataactttaaacgtggctccttccctggggtaatgcccatgatccaacggacatcagaaccactgaattgtgattattccatctatatccacaatgtcaccagggagcacactggaacctaccactgtgtgaggtttgatggtttgagtgaacactcagaaatgaaatcggatgaaggcacctcagtgcttgtgaagggagctggggaccctgaaccagacctgtggatcatccagccccaggaattggtgttggggaccactggagacactgtctttctgaactgcacagtgcttggagacggtccccctggacccatcaggtggttccagggagctggtctgagccgggaggccatttacaactttggaggcatctcccaccccaaggagacagcggtgcaggcctccaacaatgacttcagcattcttctgcaaaacgtctccagtgaggatgcaggcacctattactgtgtaaagtttcagaggaaacccaacaggcaatacctgtctggacagggcaccagcctgaaagtgaaagcaaaatctacctcttccaaagaggcagaattcaccagtgaacctgcaactgagatgtctccaacaggtttgcagtgatctgttacagcggccacgggaagctgaaacagcaggaaagcatggaggtggttctccactaactggagccaccctcattgaatcctgaaacgtggttgaaagctgactctgtgccaggccctaatcagtgtgctgagaaagaaacagaagtctgctctctcagagcttacctcctcccgagagaagacagacaatgagcaagtaaccctagggtggacagaagaggcctcctgataaagtgacatttgagcagacacctgaaggaggtgaggaagagagccctgcagatacccaggggaagagctgaaaagtacaaggaacagcgaatgcaaaggtcctgaggcaggagcgtgcttgacttgcacaagaacagcaaacaccaagcagaatgcctggcctgtattagaccccgtaaacgcctgaactacatacatggcagagatgaagcacacagtctcggaaatctggctgtgcaggttcaaattccagttctcctacttatctcttggggaagtgcgggaatcttcagttcttgtctgcttggaagaaagatttcagccaagagacacacagcaaaggtgaagtagcagagtttattgaagaaagataaagtacgttcctagaaaggagtgggctgacctggctggaaaacagcatcaggcaaaaaacagcagtagcagtgtttatttaaagagacagtacactctgaaagaacgagccagcagcagctggtgctgggggaccctctttatgagaatcttacatgattattcgtgcaggggcatgagggagcgtcacttacaatcatgttttaggtggtccccctggctgtgaatgttgtgtgtttgtacgcgctagtaaacacattgcctgtctcattagcatttaaaatctccactca

SEQ ID NO: 181692 - DNA, 1605 bp, Homo sapiens
  Payload ID: 15784
  Gene Symbol: SIRPB2
  Gene Name: signal-regulatory protein beta 2
  ENST ID: ENST00000486775
  CDS Start-End: 229-1098
ttagcacagtgactacaggaatcacagcccagacacaaaagcaggaaaccctttgaccgggctccttcctattgcaccaacagccttgtgttgctgcaatgaaaacacttccccaagcagctgtggccaagagacgcagaaactgccttgtccacgggccccgcctcagactccaacactcacaagagagcagaggagccccaagtcttggggaccacagaagatgccatgtgctccacgatgtcggcccccacctgcctggcccacttgcctccctgcttcctgctgctggcactggtccttgtcccctcagatgcctctgggcagagcagcaggaatgactggcaggtgctacagcccgagggccccatgctggtggcagaaggtgagacacttctactgaggtgtatggtggtcggctcctgcactgatggtatgataaaatgggtgaaggtgagcactcaggaccaacaggaaatttataactttaaacgtggctccttccctggggtaatgcccatgatccaacggacatcagaaccactgaattgtgattattccatctatatccacaatgtcaccagggagcacactggaacctaccactgtgtgaggtttgatggtttgagtgaacactcagaaatgaaatcggatgaaggcacctcagtgcttgtgaagggagctggggaccctgaaccagacctgtggatcatccagccccaggaattggtgttggggaccactggagacactgtctttctgaactgcacagtgcttggagacggtccccctggacccatcaggtggttccagggagctggtctgagccgggaggccatttacaactttggaggcatctcccaccccaaggagacagcggtgcaggcctccaacaatgacttcagcattcttctgcaaaacgtctccagtgaggatgcaggcacctattactgtgtaaagtttcagaggaaacccaacaggcaatacctgtctggacagggcaccagcctgaaagtgaaagcaaaatctacctcttccaaagaggcagaattcaccagtgaacctgcaactgagatgtctccaacaggtttgcagtgatctgttacagcggccacgggaagctgaaacagcaggaaagcatggaggtggttctccactaactggaggccctaatcagtgtgctgagaaagaaacagaagtctgctctctcagagcttacctcctcccgagagaagacagacaatgagcaagtaaccctagggtggacagaagaggcctcctgataaagtgacatttgagcagacacctgaaggaggtgaggaagagagccctgcagatacccaggggaagagctgaaaagtacaaggaacagcgaatgcaaaggtcctgaggcaggagcgtgcttgacttgcacaagaacagcaaacaccaagcagaatgcctggcctgtattagaccccgtaaacgcctgaactacatacatggcagagatgaagcacacagtctcggaaatctggctgtgcaggttcaaattccagttctcctacttatctcttgggtgagtttgtttctctcagtttccttgtctataaactggtaataaca

SEQ ID NO: 181693 - DNA, 478 bp, Homo sapiens
  Payload ID: 15784
  Gene Symbol: SIRPB2
  Gene Name: signal-regulatory protein beta 2
  ENST ID: ENST00000608073
  CDS Start-End: 55-315
aacactcacaagagagcagaggagccccaagtcttggggaccacagaagatgccatgtgctccacgatgtcggcccccacctgcctggcccacttgcctccctgcttcctgctgctggcactggtccttgtcccctcagatgcctctgggcagagcagcaggaatgactggcaggtgctacagcccgagggccccatgctggtggcagaaggtgagacacttctactgaggtgtatggtggtcggctcctgcactgatggtatgataaaatgggtgaagggagcacactggaacctaccactgtgtgaggtttgatggtttgagtgaacactcagaaatgaaatcggatgaaggcacctcagtgcttgtgaagggagctggggaccctgaaccagacctgtggatcatccagccccaggaattggtgttggggaccactggagacactgtctttctgaactgcacagtgcttggagac

SEQ ID NO: 181694 - DNA, 823 bp, Homo sapiens
  Payload ID: 15785
  Gene Symbol: SIRPD
  Gene Name: signal-regulatory protein delta
  ENST ID: ENST00000381621
  CDS Start-End: 53-649
gggcatctccaggacaggcattcaggcagagcaagctccaggtttcaccacaatgcccatccctgcctccccactccacccacctctgccttccttactgctgtatctgctgcttgaactggcaggagtcacacatgtgttccatgtgcaacaaacggagatgtcacagactgtatcaactggggagtcaatcatcttgagttgcagcgtacccaataccttaccaaatggacctgtcttgtggttcaagggaacagggccaaaccggaaattaatctacaatttcaaacaaggtaactttcccagagtaaaagagattggagacaccaccaagcctggcaacacagacttttccacccgcatccgtgaaatctctcttgctgatgctggcacctattactgcgtgaagttcataaaaggaagagctatcaaggagtaccaatcaggtcggggcactcaggtgtttgttactgcagagcagaatccaagacctcccaagaacagacctgcaggcagagcaggctccagggcccaccatgatgcccatacctgcctctcggccctgcctgagagaaacagcacaaactatttcgtccaaccctgctgctgcctccggctgctgggactcacaggcttgctgtcaaaataatccaaacagggaaggaacgtacaagtaaataacaaaagcccccatactcttctgactccctggagacagctactttttaggagtttcatttgccttcttcaagagagctttcttccactgacataaaatgccagcttgatcgtacaataaatctgtctatttacctgggtccaa

SEQ ID NO: 181695 - DNA, 1958 bp, Homo sapiens
  Payload ID: 15785
  Gene Symbol: SIRPD
  Gene Name: signal-regulatory protein delta
  Uniprot ID: Q9H106
  ENST ID: ENST00000381623
  CDS Start-End: 1191-1784
atttcagaacaacgggataggatgatgacatcacaaggggatggggactcttgtcgtctcagagagaacgtgccagcctggctctgctttcttttcctagagggtctaacacctctcccggccctgacatctagctggttcctgaggaggaggcagaagtcatgaggaggcaatggggaaacagccatggcagccagtgcctgcctgtggatgcttggacattaaagggtcaccagctgagtgtgggctgagtgtccctgaacacaacatttgtgcttaggaagaacccattccagagctgagagagaaggatgccaacatgctgcttcctccctctttctgggggcatttcttctgcccctccaatcccatctctgagagctggtcccaggtccagcccaagcaggagaggcagccctcaccttcccaggtgtttgtaggcatgttactctccctcctagagagtgttccccgcagctccgccttccctgcaggcctcctccatcctctaaagcacaaatcatcaccacctgcacaactcgaatgtctttctcagccatgcctgattcctctgcaggaaggaaaaaggaagcagttcctggtagtgtatggagggacccacagaaaagccaagagcccacagcagatattgcttgttttttacctctaactactctggagtgcaagaaagggcatccattgtaaagtccaactcttaccaagtgggtgaggctatagacatcttgtctctttcttcagctgtgcagctcagacaggcccagatgttgagctcatgcaggagctagacccatacctgcgcatcatgtggatgaggcctttgtctagcctatgtgtctgaggctcctagataggcaaaggccatgaagttggggagaacctgtgagatgggatgaaactcaggaaggagtataaggctgtgggtgtcaagccccccagccccagcaaagctaaatacttccagcagcaacttcctagcttgaagcaaccttgtctgttcaattttataatcacaaaggaaaaagtgtcccagtcccctggcctttcctctcatcacaatccccttcctctgacatcacagaggcaagaactgtcttctctgctcggagcactgagtcgagggcatctccaggacaggcattcaggcagagcaagctccaggtttcaccacaatgcccatccctgcctccccactccacccacctctgccttccttactgctgtatctgctgcttgaactggcaggagtcacacatgtgttccatgtgcaacaaacggagatgtcacagactgtatcaactggggagtcaatcatcttgagttgcagcgtacccaataccttaccaaatggacctgtcttgtggttcaagggaacagggccaaaccggaaattaatctacaatttcaaacaaggtaactttcccagagtaaaagagattggagacaccaccaagcctggcaacacagacttttccacccgcatccgtgaaatctctcttgctgatgctggcacctattactgcgtgaagttcataaaaggaagagctatcaaggagtaccaatcaggtcggggcactcaggtgtttgttactgagcagaatccaagacctcccaagaacagacctgcaggcagagcaggctccagggcccaccatgatgcccatacctgcctctcggccctgcctgagagaaacagcacaaactatttcgtccaaccctgctgctgcctccggctgctgggactcacaggcttgctgtcaaaataatccaaacagggaaggaacgtacaagtaaataacaaaagcccccatactcttctgactccctggagacagctactttttaggagtttcatttgccttcttcaagagagctttcttccactgacataaaatgccagcttgatcgtacaataaatctgtctatttacctgggtccaa

SEQ ID NO: 181696 - DNA, 416 bp, Homo sapiens
  Payload ID: 15785
  Gene Symbol: SIRPD
  Gene Name: signal-regulatory protein delta
  ENST ID: ENST00000429387
  CDS Start-End: 1-242
caaatggacctgtcttgtggttcaagggaacagggccaaaccggaaattaatctacaatttcaaacaagagcagaatccaagacctcccaagaacagacctgcaggcagagcaggctccagggcccaccatgatgcccatacctgcctctcggccctgcctgagagaaacagcacaaactatttcgtccaaccctgctgctgcctccggctgctgggactcacaggcttgctgtcaaaataatccaaacagggaaggaacgtacaagtaaataacaaaagcccccatactcttctgactccctggagacagctactttttaggagtttcatttgccttcttcaagagagctttcttccactgacataaaatgccagcttgatcgtacaataaatctgtctatttacctgggtccaa

SEQ ID NO: 181697 - DNA, 831 bp, Homo sapiens
  Payload ID: 15786
  Gene Symbol: SIRPG
  Gene Name: signal-regulatory protein gamma
  Uniprot ID: Q9P1W8
  ENST ID: ENST00000216927
  CDS Start-End: 1-831
atgcctgtcccagcctcctggccccatcctcctggtcctttcctgcttctgactctactgctgggacttacagaagtggcaggtgaggaggagctacagatgattcagcctgagaagctcctgttggtcacagttggaaagacagccactctgcactgcactgtgacctccctgcttcccgtgggacccgtcctgtggttcagaggagttggaccaggccgggaattaatctacaatcaaaaagaaggccacttccccagggtaacaacagtttcagacctcacaaagagaaacaacatggacttttccatccgcatcagtagcatcaccccagcagatgtcggcacatactactgtgtgaagtttcgaaaagggagccctgagaacgtggagtttaagtctggaccaggcactgagatggctttgggtgccaaaccctctgcccccgtggtattgggccctgcggcgaggaccacacctgagcatacagtgagtttcacctgtgagtcccatggcttctctcccagagacatcaccctgaaatggttcaaaaatgggaatgagctctcagacttccagaccaacgtggaccccacaggacagagtgtggcctacagcatccgcagcacagccagggtggtactggacccctgggacgttcgctctcaggtcatctgcgaggtggcccatgtcaccttgcagggggaccctcttcgtgggactgccaacttgtctgaggccatccgaggcccggcatcatcccttactgcgctgctcctcatagctgtcctcctgggccccatctacgtcccctggaagcagaagacctga

SEQ ID NO: 181698 - DNA, 1716 bp, Homo sapiens
  Payload ID: 15786
  Gene Symbol: SIRPG
  Gene Name: signal-regulatory protein gamma
  Uniprot ID: Q9P1W8
  ENST ID: ENST00000303415
  CDS Start-End: 66-1229
agagcagggcctgacatctccccagaacagacgtttgaacagagcaggcttctgaggtctccaaaatgcctgtcccagcctcctggccccatcctcctggtcctttcctgcttctgactctactgctgggacttacagaagtggcaggtgaggaggagctacagatgattcagcctgagaagctcctgttggtcacagttggaaagacagccactctgcactgcactgtgacctccctgcttcccgtgggacccgtcctgtggttcagaggagttggaccaggccgggaattaatctacaatcaaaaagaaggccacttccccagggtaacaacagtttcagacctcacaaagagaaacaacatggacttttccatccgcatcagtagcatcaccccagcagatgtcggcacatactactgtgtgaagtttcgaaaagggagccctgagaacgtggagtttaagtctggaccaggcactgagatggctttgggtgccaaaccctctgcccccgtggtattgggccctgcggcgaggaccacacctgagcatacagtgagtttcacctgtgagtcccatggcttctctcccagagacatcaccctgaaatggttcaaaaatgggaatgagctctcagacttccagaccaacgtggaccccacaggacagagtgtggcctacagcatccgcagcacagccagggtggtactggacccctgggacgttcgctctcaggtcatctgcgaggtggcccatgtcaccttgcagggggaccctcttcgtgggactgccaacttgtctgaggccatccgagttccacccaccttggaggttactcaacagcccatgagggtggggaaccaggtaaacgtcacctgccaggtgaggaagttctacccccagagcctacagctgacctggtcggagaatggaaacgtgtgccagagagaaacagcctcgacccttacagagaacaaggatggtacctacaactggacaagctggttcctggtgaacatatctgaccaaagggatgatgtggtcctcacctgccaggtgaagcatgatgggcagctggcggtcagcaaacgccttgccctagaggtcacagtccaccagaaggaccagagctcagatgctacccctggcccggcatcatcccttactgcgctgctcctcatagctgtcctcctgggccccatctacgtcccctggaagcagaagacctgactctccttccttcctcccctgccacgtgggaccctcatctctgctgcctccttcctttcctgagaggctcagcttgagagaatgagccagtgagaagcttctctagacttggctccaaacatctcccctcccaagacatctgcctgcccacaggctcctgttgctccttcacacagacctggatgccccagagcaaggtcttcattcatggtcctgagcaggtgccatgggattgggctctgggcactgacttaacggcacctccctagaaggcgagaaacatgccaaatctaaacacaccaggactcccatccatcgccttgagactgaccgtaaaccacagacgctctccaggttctcaagagttatcctgccttccagattcctgcctatcccaactccccagccttgttgaggttctctattgcctcttgaatacaaatgcactcccaaagtggttttaagaaaataaaaagattatccttcc

SEQ ID NO: 181699 - DNA, 1042 bp, Homo sapiens
  Payload ID: 15786
  Gene Symbol: SIRPG
  Gene Name: signal-regulatory protein gamma
  Uniprot ID: Q9P1W8
  ENST ID: ENST00000344103
  CDS Start-End: 43-555
agaacagacgtttgaacagagcaggcttctgaggtctccaaaatgcctgtcccagcctcctggccccatcctcctggtcctttcctgcttctgactctactgctgggacttacagaagtggcaggtgaggaggagctacagatgattcagcctgagaagctcctgttggtcacagttggaaagacagccactctgcactgcactgtgacctccctgcttcccgtgggacccgtcctgtggttcagaggagttggaccaggccgggaattaatctacaatcaaaaagaaggccacttccccagggtaacaacagtttcagacctcacaaagagaaacaacatggacttttccatccgcatcagtagcatcaccccagcagatgtcggcacatactactgtgtgaagtttcgaaaagggagccctgagaacgtggagtttaagtctggaccaggcactgagatggctttgggtggcccggcatcatcccttactgcgctgctcctcatagctgtcctcctgggccccatctacgtcccctggaagcagaagacctgactctccttccttcctcccctgccacgtgggaccctcatctctgctgcctccttcctttcctgagaggctcagcttgagagaatgagccagtgagaagcttctctagacttggctccaaacatctcccctcccaagacatctgcctgcccacaggctcctgttgctccttcacacagacctggatgccccagagcaaggtcttcattcatggtcctgagcaggtgccatgggattgggctctgggcactgacttaacggcacctccctagaaggcgagaaacatgccaaatctaaacacaccaggactcccatccatcgccttgagactgaccgtaaaccacagacgctctccaggttctcaagagttatcctgccttccagattcctgcctatcccaactccccagccttgttgaggttctctattgcctcttgaatacaaatgcactcccaaagtggttttaagaaaataaaaagattatccttcc

SEQ ID NO: 181700 - DNA, 1732 bp, Homo sapiens
  Payload ID: 15786
  Gene Symbol: SIRPG
  Gene Name: signal-regulatory protein gamma
  Uniprot ID: Q9P1W8
  ENST ID: ENST00000381580
  CDS Start-End: 181-1245
aagcatgatgggttttactagaacgtttcagtgtcactaagtcacagaagaggaggacaagaagaggaattatggcagggaccagctttatcacagtggtgtacctggtttggcagggtgctcacaacttgtttgtgggatgtggaggtatcagaagtggcaggtgaggaggagctacagatgattcagcctgagaagctcctgttggtcacagttggaaagacagccactctgcactgcactgtgacctccctgcttcccgtgggacccgtcctgtggttcagaggagttggaccaggccgggaattaatctacaatcaaaaagaaggccacttccccagggtaacaacagtttcagacctcacaaagagaaacaacatggacttttccatccgcatcagtagcatcaccccagcagatgtcggcacatactactgtgtgaagtttcgaaaagggagccctgagaacgtggagtttaagtctggaccaggcactgagatggctttgggtgccaaaccctctgcccccgtggtattgggccctgcggcgaggaccacacctgagcatacagtgagtttcacctgtgagtcccatggcttctctcccagagacatcaccctgaaatggttcaaaaatgggaatgagctctcagacttccagaccaacgtggaccccacaggacagagtgtggcctacagcatccgcagcacagccagggtggtactggacccctgggacgttcgctctcaggtcatctgcgaggtggcccatgtcaccttgcagggggaccctcttcgtgggactgccaacttgtctgaggccatccgagttccacccaccttggaggttactcaacagcccatgagggtggggaaccaggtaaacgtcacctgccaggtgaggaagttctacccccagagcctacagctgacctggtcggagaatggaaacgtgtgccagagagaaacagcctcgacccttacagagaacaaggatggtacctacaactggacaagctggttcctggtgaacatatctgaccaaagggatgatgtggtcctcacctgccaggtgaagcatgatgggcagctggcggtcagcaaacgccttgccctagaggtcacagtccaccagaaggaccagagctcagatgctacccctggcccggcatcatcccttactgcgctgctcctcatagctgtcctcctgggccccatctacgtcccctggaagcagaagacctgactctccttccttcctcccctgccacgtgggaccctcatctctgctgcctccttcctttcctgagaggctcagcttgagagaatgagccagtgagaagcttctctagacttggctccaaacatctcccctcccaagacatctgcctgcccacaggctcctgttgctccttcacacagacctggatgccccagagcaaggtcttcattcatggtcctgagcaggtgccatgggattgggctctgggcactgacttaacggcacctccctagaaggcgagaaacatgccaaatctaaacacaccaggactcccatccatcgccttgagactgaccgtaaaccacagacgctctccaggttctcaagagttatcctgccttccagattcctgcctatcccaactccccagccttgttgaggttctctattgcctcttgaatacaaatgcactcccaaagtggttttaagaaaataaaaagattatccttcc

SEQ ID NO: 181701 - DNA, 1383 bp, Homo sapiens
  Payload ID: 15786
  Gene Symbol: SIRPG
  Gene Name: signal-regulatory protein gamma
  Uniprot ID: Q9P1W8
  ENST ID: ENST00000381583
  CDS Start-End: 66-896
agagcagggcctgacatctccccagaacagacgtttgaacagagcaggcttctgaggtctccaaaatgcctgtcccagcctcctggccccatcctcctggtcctttcctgcttctgactctactgctgggacttacagaagtggcaggtgaggaggagctacagatgattcagcctgagaagctcctgttggtcacagttggaaagacagccactctgcactgcactgtgacctccctgcttcccgtgggacccgtcctgtggttcagaggagttggaccaggccgggaattaatctacaatcaaaaagaaggccacttccccagggtaacaacagtttcagacctcacaaagagaaacaacatggacttttccatccgcatcagtagcatcaccccagcagatgtcggcacatactactgtgtgaagtttcgaaaagggagccctgagaacgtggagtttaagtctggaccaggcactgagatggctttgggtgccaaaccctctgcccccgtggtattgggccctgcggcgaggaccacacctgagcatacagtgagtttcacctgtgagtcccatggcttctctcccagagacatcaccctgaaatggttcaaaaatgggaatgagctctcagacttccagaccaacgtggaccccacaggacagagtgtggcctacagcatccgcagcacagccagggtggtactggacccctgggacgttcgctctcaggtcatctgcgaggtggcccatgtcaccttgcagggggaccctcttcgtgggactgccaacttgtctgaggccatccgaggcccggcatcatcccttactgcgctgctcctcatagctgtcctcctgggccccatctacgtcccctggaagcagaagacctgactctccttccttcctcccctgccacgtgggaccctcatctctgctgcctccttcctttcctgagaggctcagcttgagagaatgagccagtgagaagcttctctagacttggctccaaacatctcccctcccaagacatctgcctgcccacaggctcctgttgctccttcacacagacctggatgccccagagcaaggtcttcattcatggtcctgagcaggtgccatgggattgggctctgggcactgacttaacggcacctccctagaaggcgagaaacatgccaaatctaaacacaccaggactcccatccatcgccttgagactgaccgtaaaccacagacgctctccaggttctcaagagttatcctgccttccagattcctgcctatcccaactccccagccttgttgaggttctctattgcctcttgaatacaaatgcactcccaaagtggttttaagaaaataaaaagattatccttcc

SEQ ID NO: 181702 - DNA, 6213 bp, Homo sapiens
  Payload ID: 15787
  Gene Symbol: SIK3
  Gene Name: SIK family kinase 3
  ENST ID: ENST00000375300
  CDS Start-End: 7-3972
aacaagatggcggcggcggcggcgagcggagctggcggggctgccggggccgggactgggggagccgggcccgcgggccgcctgctgcctccgcccgcgccggggtccccagccgcccccgctgccgtgtcccctgcggccggccagccgcgtcccccagccccggcctcccgcggacccatgcccgcccgtatcggctactacgagatcgaccgcaccatcggcaagggcaacttcgcggtggtcaagcgggccacgcacctcgtcaccaaggccaaggttgctatcaagatcatagataagacccagctggatgaagaaaacttgaagaagattttccgggaagttcaaattatgaagatgctttgccacccccatatcatcaggctctaccaggttatggagacagaacggatgatttatctggtgacagaatatgctagtggaggggaaatatttgaccacctggtggcccatggtagaatggcagaaaaggaggcacgtcggaagttcaaacagatcgtcacagctgtctatttttgtcactgtcggaacattgttcatcgtgatttaaaagctgaaaatttacttctggatgccaatctgaatatcaaaatagcagattttggtttcagtaacctcttcactcctgggcagctgctgaagacctggtgtggcagccctccctatgctgcacctgaactctttgaaggaaaagaatatgatgggcccaaagtggacatctggagccttggagttgtcctctacgtgcttgtgtgcggtgccctgccatttgatggaagcacactgcagaatctgcgggcccgcgtgctgagtggaaagttccgcatcccattttttatgtccacagaatgtgagcatttgatccgccatatgttggtgttagatcccaataagcgcctctccatggagcagatctgcaagcacaagtggatgaagctaggggacgccgatcccaactttgacaggttaatagctgaatgccaacaactaaaggaagaaagacaggtggaccccctgaatgaggatgtcctcttggccatggaggacatgggactggacaaagaacagacactgcagtcattaagatcagatgcctatgatcactatagtgcaatctacagcctgctgtgtgatcgacataagagacataaaaccctgcgtctcggagcacttcctagcatgccccgagccctggcctttcaagcaccagtcaatatccaggcggagcaggcaggtactgctatgaacatcagcgttccccaggtgcagctgatcaacccagagaaccaaattgtggagccggatgggacactgaatttggacagtgatgagggtgaagagccttcccctgaagcattggtgcgctatttgtcaatgaggaggcacacagtgggtgtggctgacccacgcacggaagttatggaagatctgcagaagctcctacctggctttcctggagtcaacccccaggctccattcctgcaggtggcccctaatgtgaacttcatgcacaacctgttgcctatgcaaaacttgcaaccaaccgggcaacttgagtacaaggagcagtctctcctacagccgcccacgctacagctgttgaatggaatgggcccccttggccggagggcatcagatggaggagccaacatccaactgcatgcccagcagctgctgaagcgcccacggggaccctctccgcttgtcaccatgacaccagcagtgccagcagttacccctgtggacgaggagagctcagacggggagccagaccaggaagctgtgcagagctctacctacaaggactccaacactctgcacctccctacggagcgtttctcccctgtgcgccggttctcagatggggctgcgagcatccaggccttcaaagctcacctggaaaaaatgggcaacaacagcagcatcaaacagctgcagcaggagtgtgagcagctgcagaagatgtacggggggcagattgatgaaagaaccctggagaagacccagcagcagcatatgttataccagcaggagcagcaccatcaaattctccagcaacaaattcaagactctatctgtcctcctcagccatctccacctcttcaggctgcatgtgaaaatcagccagccctccttacccatcagctccagaggttaaggattcagccttcaagcccaccccccaaccaccccaacaaccatctcttcaggcagcccagtaatagtcctccccccatgagcagtgccatgatccagcctcacggggctgcatcttcttcccagtttcaaggcttaccttcccgcagtgcaatctttcagcagcaacctgagaactgttcctctcctcccaacgtggcactaacctgcttgggtatgcagcagcctgctcagtcacagcaggtcaccatccaagtccaagagcctgttgacatgctcagcaacatgccaggcacagctgcaggctccagtgggcgcggcatctccatcagccccagtgctggtcagatgcagatgcagcaccgtaccaacctgatggccaccctcagctatgggcaccgtcccttgtccaagcagctgagtgctgacagtgcagaggctcacagcttgaacgtgaatcggttctcccctgctaactacgaccaggcgcatttacacccccatctgttttcggaccagtcccggggttcccccagcagctacagcccttcaacaggagtggggttctctccaacccaagccctgaaagtccctccacttgaccaattccccaccttccctcccagtgcacatcagcagccgccacactataccacgtcggcactacagcaggccctgctgtctcccacgccgccagactatacaagacaccagcaggtaccccacatccttcaaggactgctttctccccggcattcgctcaccggccactcggacatccggctgcccccaacagagtttgcacagctcattaaaaggcagcagcaacaacggcagcagcagcagcaacagcagcaacagcaagaataccaggaactgttcaggcacatgaaccaaggggatgcggggagtctggctcccagccttgggggacagagcatgacagagcgccaggctttatcttatcaaaatgctgactcttatcaccatcacaccagcccccagcatctgctacaaatcagggcacaagaatgtgtctcacaggcttcctcacccaccccgccccacgggtatgctcaccagccggcactgatgcattcagagagcatggaggaggactgctcgtgtgagggggccaaggatggcttccaagacagtaagagttcaagtacattgaccaaaggttgccatgacagccctctgctcttgagtaccggtggacctggggaccctgaatctttgctaggaactgtgagtcatgcccaagaattggggatacatccctatggtcatcagccaactgctgcattcagtaaaaataaggtgcccagcagagagcctgtcatagggaactgcatggatagaagttctccaggacaagcagtggagctgccggatcacaatgggctcgggtacccagcacgcccctccgtccatgagcaccacaggccccgggccctccagagacaccacacgatccagaacagcgacgatgcttatgtacagctggataacttgccaggaatgagtctcgtggctgggaaagcacttagctctgcccggatgtcggatgcagttctcagtcagtcttcgctcatgggcagccagcagtttcaggatggggaaaatgaggaatgtggggcaagcctgggaggtcatgagcacccagacctgagtgatggcagccagcatttaaactcctcttgctatccatctacgtgtattacagacattctgctcagctacaagcaccccgaagtctccttcagcatggagcaggcaggcgtgtaacaagaaacagagagttttgtgtacagcttgggaatgaaaaggttgattgtaaacccacagtatctagcagcgttgtgccaaattgcccttgtgtttctctccacccaaaatatcacagctgctttcctcacatttggttcatccgtgtgctgttcttttgggttctgagagggttttgccatgtttgcttgtatgaccaagtcaccaaggaaataaacaggaaggaaatccatgttctccatcttttgtgaaagtatatttgagttggtggttttttgttttgtttgggggtttgtgttttgttttgtttttggtatgttttcttccagaggtgatatactttcttttttttcttcctttcttttttttctttcgttccttttttgaaacaggagagcaaagcagttagagttcagaggccagcggcctcagggccactccctccctagccttcatcagcagagcaccctccatccccctgcattgctcttctgtgaaagcaaatactaaaggatgccatcctctggaatcctaatggcaggcaaagggagagaggaagggtgacggcttctggcacttagaaaacaaaaagaacaaaaaaagagaaacccccaagcctggaacgcagagaggtctttactgctgggatccacggaaaacatgtctgtcctagccaagatcatatgaagagtttggcacggaggctgagaatgacctggcatagatggtttgccagttaggatgtctcaatttgagcctttgcttttggtggataactcagctcccctcttgtaacctggaaagttggttgcctttatcatcctgctggttttatccatggactgaacacccaacagcagtgcactatgctttctatggcatctttcattctcattttatattgtgctataaaaaggattgtttctccatatatatattatatatgtgtgtatatatataatataatatatgtgtatatatatattatatatataatatataatataatatattatatatatattatatatataatatatatataaaatatatatatatatgctctcctctttcagcctctttgtcacagggaagaagtgtaggaggttgccttgggccctgcctctctcctaacctcctcttccccactgggtaccctcagcccctatattttaattcttgatcatgtagaaattgtttttggtaaatgttgatattattgttattatcattattaataaataaagagaaaaggaatttttgtttaaatgagaaatgtttaaccagattctgttctatttgaattgtgacttgcaccttttgttcaaagtatttcctttaggcattgtaattgtgaacagctcttacttgtgccagtgacagatgcagtggtctcctttccccagttgaagcagtgcatacgcagtagctattatttgtgttatctttatttctcttcattgttagaaaccaaagtcttctctgctggctggggctgagagagggtctgggttatctccttctgatcttcaaaacaagagagagaccttgaatacactgactcttccaccctttttttttctgggaaaggagagcaagaggtcccgagtcccctcctagtctttcatcctgaatttgcacagaggaaagcgggtgcccggcatggccatcctgatgttgctggcgggatccccatgcaccttgtccttctccactgatactggcagctcggctcctggacccaagatcccttgagtggaattctgcagtgcaagagcccttcgtgggagctgtcccatgtttccatggtccccagtctcccctccacttggtggggtcaccaactactcaccagaagggggcttaccaagaaagccctaaaaagctgttgacttatctgcgcttgttccaactcttatgcccccaacctgccctaccaccaccacgcgctcagcctgatgtgtttacatggtactgtatgtatgggagagcagactgcaccctccagcaacaacagatgaaagccagtgagcctactaaccgtgccatcttgcaaactacactttaaaaaaaactcattgctttgtattgtagtaaccaatatgtgcagtatacgttgaatgtatatgaacatactttcctatttctgttctttgaaaatgtcagaaatatttttttctttctcattttatgttgaactaaaaaggattaaaaaaaaaatctccagactcaagttgctaa

SEQ ID NO: 181703 - DNA, 3858 bp, Homo sapiens
  Payload ID: 15787
  Gene Symbol: SIK3
  Gene Name: SIK family kinase 3
  ENST ID: ENST00000446921
  CDS Start-End: 23-3808
ggaggtttcactgcacaacaagatggcggcggcggcggcgagcggagctggcggggctgccggggccgggactgggggagccgggcccgcgggccgcctgctgcctccgcccgcgccggggtccccagccgcccccgctgccgtgtcccctgcggccggccagccgcgtcccccagccccggcctcccgcggacccatgcccgcccgtatcggctactacgagatcgaccgcaccatcggcaagggcaacttcgcggtggtcaagcgggccacgcacctcgtcaccaaggccaaggttgctatcaagatcatagataagacccagctggatgaagaaaacttgaagaagattttccgggaagttcaaattatgaagatgctttgccacccccatatcatcaggctctaccaggttatggagacagaacggatgatttatctggtgacagaatatgctagtggaggggaaatatttgaccacctggtggcccatggtagaatggcagaaaaggaggcacgtcggaagttcaaacagatcgtcacagctgtctatttttgtcactgtcggaacattgttcatcgtgatttaaaagctgaaaatttacttctggatgccaatctgaatatcaaaatagcagattttggtttcagtaacctcttcactcctgggcagctgctgaagacctggtgtggcagccctccctatgctgcacctgaactctttgaaggaaaagaatatgatgggcccaaagtggacatctggagccttggagttgtcctctacgtgcttgtgtgcggtgccctgccatttgatggaagcacactgcagaatctgcgggcccgcgtgctgagtggaaagttccgcatcccattttttatgtccacagaatgtgagcatttgatccgccatatgttggtgttagatcccaataagcgcctctccatggagcagatctgcaagcacaagtggatgaagctaggggacgccgatcccaactttgacaggttaatagctgaatgccaacaactaaaggaagaaagacaggtggaccccctgaatgaggatgtcctcttggccatggaggacatgggactggacaaagaacagacactgcaggcggagcaggcaggtactgctatgaacatcagcgttccccaggtgcagctgatcaacccagagaaccaaattgtggagccggatgggacactgaatttggacagtgatgagggtgaagagccttcccctgaagcattggtgcgctatttgtcaatgaggaggcacacagtgggtgtggctgacccacgcacggaagttatggaagatctgcagaagctcctacctggctttcctggagtcaacccccaggctccattcctgcaggtggcccctaatgtgaacttcatgcacaacctgttgcctatgcaaaacttgcaaccaaccgggcaacttgagtacaaggagcagtctctcctacagccgcccacgctacagctgttgaatggaatgggcccccttggccggagggcatcagatggaggagccaacatccaactgcatgcccagcagctgctgaagcgcccacggggaccctctccgcttgtcaccatgacaccagcagtgccagcagttacccctgtggacgaggagagctcagacggggagccagaccaggaagctgtgcagaggtacttggcaaataggtccaaaagacatacactggccatgaccaaccctacagctgagatcccaccggacctacaacggcagctaggacagcagcctttccgttcccgggtctggcctcctcacctggtacctgatcagcatcgctctacctacaaggactccaacactctgcacctccctacggagcgtttctcccctgtgcgccggttctcagatggggctgcgagcatccaggccttcaaagctcacctggaaaaaatgggcaacaacagcagcatcaaacagctgcagcaggagtgtgagcagctgcagaagatgtacggggggcagattgatgaaagaaccctggagaagacccagcagcagcatatgttataccagcaggagcagcaccatcaaattctccagcaacaaattcaagactctatctgtcctcctcagccatctccacctcttcaggctgcatgtgaaaatcagccagccctccttacccatcagctccagaggttaaggattcagccttcaagcccaccccccaaccaccccaacaaccatctcttcaggcagcccagtaatagtcctccccccatgagcagtgccatgatccagcctcacggggctgcatcttcttcccagtttcaaggcttaccttcccgcagtgcaatctttcagcagcaacctgagaactgttcctctcctcccaacgtggcactaacctgcttgggtatgcagcagcctgctcagtcacagcaggtcaccatccaagtccaagagcctgttgacatgctcagcaacatgccaggcacagctgcaggctccagtgggcgcggcatctccatcagccccagtgctggtcagatgcagatgcagcaccgtaccaacctgatggccaccctcagctatgggcaccgtcccttgtccaagcagctgagtgctgacagtgcagaggctcacagtgcacatcagcagccgccacactataccacgtcggcactacagcaggccctgctgtctcccacgccgccagactatacaagacaccagcaggtaccccacatccttcaaggactgctttctccccggcattcgctcaccggccactcggacatccggctgcccccaacagagtttgcacagctcattaaaaggcagcagcaacaacggcagcagcagcagcaacagcagcaacagcaagaataccaggaactgttcaggcacatgaaccaaggggatgcggggagtctggctcccagccttgggggacagagcatgacagagcgccaggctttatcttatcaaaatgctgactcttatcaccatcacaccagcccccagcatctgctacaaatcagggcacaagaatgtgtctcacaggcttcctcacccaccccgccccacgggtatgctcaccagccggcactgatgcattcagagagcatggaggaggactgctcgtgtgagggggccaaggatggcttccaagacagtaagagttcaagtacattgaccaaaggttgccatgacagccctctgctcttgagtaccggtggacctggggaccctgaatctttgctaggaactgtgagtcatgcccaagaattggggatacatccctatggtcatcagccaactgctgcattcagtaaaaataaggtgcccagcagagagcctgtcatagggaactgcatggatagaagttctccaggacaagcagtggagctgccggatcacaatgggctcgggtacccagcacgcccctccgtccatgagcaccacaggccccgggccctccagagacaccacacgatccagaacagcgacgatgcttatgtacagctggataacttgccaggaatgagtctcgtggctgggaaagcacttagctctgcccggatgtcggatgcagttctcagtcagtcttcgctcatgggcagccagcagtttcaggatggggaaaatgaggaatgtggggcaagcctgggaggtcatgagcacccagacctgagtgatggcagccagcatttaaactcctcttgctatccatctacgtgtattacagacattctgctcagctacaagcaccccgaagtctccttcagcatggagcaggcaggcgtgtaacaagaaacagagagttttgtgtacagcttgggaatgaaaaggttgattgt

SEQ ID NO: 181704 - DNA, 6331 bp, Homo sapiens
  Payload ID: 15787
  Gene Symbol: SIK3
  Gene Name: SIK family kinase 3
  ENST ID: ENST00000445177
  CDS Start-End: 1-4090
cggagctggcggggctgccggggccgggactgggggagccgggcccgcgggccgcctgctgcctccgcccgcgccggggtccccagccgcccccgctgccgtgtcccctgcggccggccagccgcgtcccccagccccggcctcccgcggacccatgcccgcccgtatcggctactacgagatcgaccgcaccatcggcaagggcaacttcgcggtggtcaagcgggccacgcacctcgtcaccaaggccaaggttgctatcaagatcatagataagacccagctggatgaagaaaacttgaagaagattttccgggaagttcaaattatgaagatgctttgccacccccatatcatcaggctctaccaggttatggagacagaacggatgatttatctggtgacagaatatgctagtggaggggaaatatttgaccacctggtggcccatggtagaatggcagaaaaggaggcacgtcggaagttcaaacagatcgtcacagctgtctatttttgtcactgtcggaacattgttcatcgtgatttaaaagctgaaaatttacttctggatgccaatctgaatatcaaaatagcagattttggtttcagtaacctcttcactcctgggcagctgctgaagacctggtgtggcagccctccctatgctgcacctgaactctttgaaggaaaagaatatgatgggcccaaagtggacatctggagccttggagttgtcctctacgtgcttgtgtgcggtgccctgccatttgatggaagcacactgcagaatctgcgggcccgcgtgctgagtggaaagttccgcatcccattttttatgtccacagaatgtgagcatttgatccgccatatgttggtgttagatcccaataagcgcctctccatggagcagatctgcaagcacaagtggatgaagctaggggacgccgatcccaactttgacaggttaatagctgaatgccaacaactaaaggaagaaagacaggtggaccccctgaatgaggatgtcctcttggccatggaggacatgggactggacaaagaacagacactgcagtcattaagatcagatgcctatgatcactatagtgcaatctacagcctgctgtgtgatcgacataagagacataaaaccctgcgtctcggagcacttcctagcatgccccgagccctggcctttcaagcaccagtcaatatccaggcggagcaggcaggtactgctatgaacatcagcgttccccaggtgcagctgatcaacccagagaaccaaattgtggagccggatgggacactgaatttggacagtgatgagggtgaagagccttcccctgaagcattggtgcgctatttgtcaatgaggaggcacacagtgggtgtggctgacccacgcacggaagttatggaagatctgcagaagctcctacctggctttcctggagtcaacccccaggctccattcctgcaggtggcccctaatgtgaacttcatgcacaacctgttgcctatgcaaaacttgcaaccaaccgggcaacttgagtacaaggagcagtctctcctacagccgcccacgctacagctgttgaatggaatgggcccccttggccggagggcatcagatggaggagccaacatccaactgcatgcccagcagctgctgaagcgcccacggggaccctctccgcttgtcaccatgacaccagcagtgccagcagttacccctgtggacgaggagagctcagacggggagccagaccaggaagctgtgcagaggtacttggcaaataggtccaaaagacatacactggccatgaccaaccctacagctgagatcccaccggacctacaacggcagctaggacagcagcctttccgttcccgggtctggcctcctcacctggtacctgatcagcatcgctctacctacaaggactccaacactctgcacctccctacggagcgtttctcccctgtgcgccggttctcagatggggctgcgagcatccaggccttcaaagctcacctggaaaaaatgggcaacaacagcagcatcaaacagctgcagcaggagtgtgagcagctgcagaagatgtacggggggcagattgatgaaagaaccctggagaagacccagcagcagcatatgttataccagcaggagcagcaccatcaaattctccagcaacaaattcaagactctatctgtcctcctcagccatctccacctcttcaggctgcatgtgaaaatcagccagccctccttacccatcagctccagaggttaaggattcagccttcaagcccaccccccaaccaccccaacaaccatctcttcaggcagcccagtaatagtcctccccccatgagcagtgccatgatccagcctcacggggctgcatcttcttcccagtttcaaggcttaccttcccgcagtgcaatctttcagcagcaacctgagaactgttcctctcctcccaacgtggcactaacctgcttgggtatgcagcagcctgctcagtcacagcaggtcaccatccaagtccaagagcctgttgacatgctcagcaacatgccaggcacagctgcaggctccagtgggcgcggcatctccatcagccccagtgctggtcagatgcagatgcagcaccgtaccaacctgatggccaccctcagctatgggcaccgtcccttgtccaagcagctgagtgctgacagtgcagaggctcacagcttgaacgtgaatcggttctcccctgctaactacgaccaggcgcatttacacccccatctgttttcggaccagtcccggggttcccccagcagctacagcccttcaacaggagtggggttctctccaacccaagccctgaaagtccctccacttgaccaattccccaccttccctcccagtgcacatcagcagccgccacactataccacgtcggcactacagcaggccctgctgtctcccacgccgccagactatacaagacaccagcaggtaccccacatccttcaaggactgctttctccccggcattcgctcaccggccactcggacatccggctgcccccaacagagtttgcacagctcattaaaaggcagcagcaacaacggcagcagcagcagcaacagcagcaacagcaagaataccaggaactgttcaggcacatgaaccaaggggatgcggggagtctggctcccagccttgggggacagagcatgacagagcgccaggctttatcttatcaaaatgctgactcttatcaccatcacaccagcccccagcatctgctacaaatcagggcacaagaatgtgtctcacaggcttcctcacccaccccgccccacgggtatgctcaccagccggcactgatgcattcagagagcatggaggaggactgctcgtgtgagggggccaaggatggcttccaagacagtaagagttcaagtacattgaccaaaggttgccatgacagccctctgctcttgagtaccggtggacctggggaccctgaatctttgctaggaactgtgagtcatgcccaagaattggggatacatccctatggtcatcagccaactgctgcattcagtaaaaataaggtgcccagcagagagcctgtcatagggaactgcatggatagaagttctccaggacaagcagtggagctgccggatcacaatgggctcgggtacccagcacgcccctccgtccatgagcaccacaggccccgggccctccagagacaccacacgatccagaacagcgacgatgcttatgtacagctggataacttgccaggaatgagtctcgtggctgggaaagcacttagctctgcccggatgtcggatgcagttctcagtcagtcttcgctcatgggcagccagcagtttcaggatggggaaaatgaggaatgtggggcaagcctgggaggtcatgagcacccagacctgagtgatggcagccagcatttaaactcctcttgctatccatctacgtgtattacagacattctgctcagctacaagcaccccgaagtctccttcagcatggagcaggcaggcgtgtaacaagaaacagagagttttgtgtacagcttgggaatgaaaaggttgattgtaaacccacagtatctagcagcgttgtgccaaattgcccttgtgtttctctccacccaaaatatcacagctgctttcctcacatttggttcatccgtgtgctgttcttttgggttctgagagggttttgccatgtttgcttgtatgaccaagtcaccaaggaaataaacaggaaggaaatccatgttctccatcttttgtgaaagtatatttgagttggtggttttttgttttgtttgggggtttgtgttttgttttgtttttggtatgttttcttccagaggtgatatactttcttttttttcttcctttcttttttttctttcgttccttttttgaaacaggagagcaaagcagttagagttcagaggccagcggcctcagggccactccctccctagccttcatcagcagagcaccctccatccccctgcattgctcttctgtgaaagcaaatactaaaggatgccatcctctggaatcctaatggcaggcaaagggagagaggaagggtgacggcttctggcacttagaaaacaaaaagaacaaaaaaagagaaacccccaagcctggaacgcagagaggtctttactgctgggatccacggaaaacatgtctgtcctagccaagatcatatgaagagtttggcacggaggctgagaatgacctggcatagatggtttgccagttaggatgtctcaatttgagcctttgcttttggtggataactcagctcccctcttgtaacctggaaagttggttgcctttatcatcctgctggttttatccatggactgaacacccaacagcagtgcactatgctttctatggcatctttcattctcattttatattgtgctataaaaaggattgtttctccatatatatattatatatgtgtgtatatatataatataatatatgtgtatatatatattatatatataatatataatataatatattatatatatattatatatataatatatatataaaatatatatatatatgctctcctctttcagcctctttgtcacagggaagaagtgtaggaggttgccttgggccctgcctctctcctaacctcctcttccccactgggtaccctcagcccctatattttaattcttgatcatgtagaaattgtttttggtaaatgttgatattattgttattatcattattaataaataaagagaaaaggaatttttgtttaaatgagaaatgtttaaccagattctgttctatttgaattgtgacttgcaccttttgttcaaagtatttcctttaggcattgtaattgtgaacagctcttacttgtgccagtgacagatgcagtggtctcctttccccagttgaagcagtgcatacgcagtagctattatttgtgttatctttatttctcttcattgttagaaaccaaagtcttctctgctggctggggctgagagagggtctgggttatctccttctgatcttcaaaacaagagagagaccttgaatacactgactcttccaccctttttttttctgggaaaggagagcaagaggtcccgagtcccctcctagtctttcatcctgaatttgcacagaggaaagcgggtgcccggcatggccatcctgatgttgctggcgggatccccatgcaccttgtccttctccactgatactggcagctcggctcctggacccaagatcccttgagtggaattctgcagtgcaagagcccttcgtgggagctgtcccatgtttccatggtccccagtctcccctccacttggtggggtcaccaactactcaccagaagggggcttaccaagaaagccctaaaaagctgttgacttatctgcgcttgttccaactcttatgcccccaacctgccctaccaccaccacgcgctcagcctgatgtgtttacatggtactgtatgtatgggagagcagactgcaccctccagcaacaacagatgaaagccagtgagcctactaaccgtgccatcttgcaaactacactttaaaaaaaactcattgctttgtattgtagtaaccaatatgtgcagtatacgttgaatgtatatgaacatactttcctatttctgttctttgaaaatgtcagaaatatttttttctttctcattttatgttgaactaaaaaggattaaaaaaaaaatctccagactcaagttgctaa

SEQ ID NO: 181705 - DNA, 3816 bp, Homo sapiens
  Payload ID: 15787
  Gene Symbol: SIK3
  Gene Name: SIK family kinase 3
  ENST ID: ENST00000415541
  CDS Start-End: 1-456
cgtcccccagccccggcctcccgcggacccatgcccgcccgtatcggctactacgagatcgaccgcaccatcggcaagggcaacttcgcggtggtcaagcgggccacgcacctcgtcaccaaggccaaggttgctatcaagatcatagataagacccagctggatgaagaaaacttgaagaagattttccgggaagttcaaattatgaagatgctttgccacccccatatcatcaggctctaccaggttatggagacagaacggatgatttatctggtgacagaatatgctagtggaggggaaatatttggaggatttggacatcagcaattctcattctgccccgagctgcctattgctgagtcctggagaagtgcagttaagagatgggggccccttcttctactcagcccccacttgtggaacttgatcagaccacctggtggcccatggtagaatggcagaaaaggaggcacgtcggaagttcaaacagatcgtcacagctgtctatttttgtcactgtcggaacattgttcatcgtgatttaaaagctgaaaatttacttctggatgccaatctgaatatcaaaatagcagattttggtttcagtaacctcttcactcctgggcagctgctgaagacctggtgtggcagccctccctatgctgcacctgaactctttgaaggaaaagaatatgatgggcccaaagtggacatctggagccttggagttgtcctctacgtgcttgtgtgcggtgccctgccatttgatggaagcacactgcagaatctgcgggcccgcgtgctgagtggaaagttccgcatcccattttttatgtccacagaatgtgagcatttgatccgccatatgttggtgttagatcccaataagcgcctctccatggagcagatctgcaagcacaagtggatgaagctaggggacgccgatcccaactttgacaggttaatagctgaatgccaacaactaaaggaagaaagacaggtggaccccctgaatgaggatgtcctcttggccatggaggacatgggactggacaaagaacagacactgcagtcattaagatcagatgcctatgatcactatagtgcaatctacagcctgctgtgtgatcgacataagagacataaaaccctgcgtctcggagcacttcctagcatgccccgagccctggcctttcaagcaccagtcaatatccaggcggagcaggcaggtactgctatgaacatcagcgttccccaggtgcagctgatcaacccagagaaccaaattgtggagccggatgggacactgaatttggacagtgatgagggtgaagagccttcccctgaagcattggtgcgctatttgtcaatgaggaggcacacagtgggtgtggctgacccacgcacggaagttatggaagatctgcagaagctcctacctggctttcctggagtcaacccccaggctccattcctgcaggtggcccctaatgtgaacttcatgcacaacctgttgcctatgcaaaacttgcaaccaaccgggcaacttgagtacaaggagcagtctctcctacagccgcccacgctacagctgttgaatggaatgggcccccttggccggagggcatcagatggaggagccaacatccaactgcatgcccagcagctgctgaagcgcccacggggaccctctccgcttgtcaccatgacaccagcagtgccagcagttacccctgtggacgaggagagctcagacggggagccagaccaggaagctgtgcagagctctacctacaaggactccaacactctgcacctccctacggagcgtttctcccctgtgcgccggttctcagatggggctgcgagcatccaggccttcaaagctcacctggaaaaaatgggcaacaacagcagcatcaaacagctgcagcaggagtgtgagcagctgcagaagatgtacggggggcagattgatgaaagaaccctggagaagacccagcagcagcatatgttataccagcaggagcagcaccatcaaattctccagcaacaaattcaagactctatctgtcctcctcagccatctccacctcttcaggctgcatgtgaaaatcagccagccctccttacccatcagctccagaggttaaggattcagccttcaagcccaccccccaaccaccccaacaaccatctcttcaggcagcccagtaatagtcctccccccatgagcagtgccatgatccagcctcacggggctgcatcttcttcccagtttcaaggcttaccttcccgcagtgcaatctttcagcagcaacctgagaactgttcctctcctcccaacgtggcactaacctgcttgggtatgcagcagcctgctcagtcacagcaggtcaccatccaagtccaagagcctgttgacatgctcagcaacatgccaggcacagctgcaggctccagtgggcgcggcatctccatcagccccagtgctggtcagatgcagatgcagcaccgtaccaacctgatggccaccctcagctatgggcaccgtcccttgtccaagcagctgagtgctgacagtgcagaggctcacagtgcacatcagcagccgccacactataccacgtcggcactacagcaggccctgctgtctcccacgccgccagactatacaagacaccagcaggtaccccacatccttcaaggactgctttctccccggcattcgctcaccggccactcggacatccggctgcccccaacagagtttgcacagctcattaaaaggcagcagcaacaacggcagcagcagcagcaacagcagcaacagcaagaataccaggaactgttcaggcacatgaaccaaggggatgcggggagtctggctcccagccttgggggacagagcatgacagagcgccaggctttatcttatcaaaatgctgactcttatcaccatcacaccagcccccagcatctgctacaaatcagggcacaagaatgtgtctcacaggcttcctcacccaccccgccccacgggtatgctcaccagccggcactgatgcattcagagagcatggaggaggactgctcgtgtgagggggccaaggatggcttccaagacagtaagagttcaagtacattgaccaaaggttgccatgacagccctctgctcttgagtaccggtggacctggggaccctgaatctttgctaggaactgtgagtcatgcccaagaattggggatacatccctatggtcatcagccaactgctgcattcagtaaaaataaggtgcccagcagagagcctgtcatagggaactgcatggatagaagttctccaggacaagcagtggagctgccggatcacaatgggctcgggtacccagcacgcccctccgtccatgagcaccacaggccccgggccctccagagacaccacacgatccagaacagcgacgatgcttatgtacagctggataacttgccaggaatgagtctcgtggctgggaaagcacttagctctgcccggatgtcggatgcagttctcagtcagtcttcgctcatgggcagccagcagtttcaggatggggaaaatgaggaatgtggggcaagcctgggaggtcatgagcacccagacctgagtgatggcagccagcatttaaactcctcttgctatccatctacgtgtattacagacattctgctcagctacaagcaccccgaagtctccttcagcatggagcaggcaggcgtgtaacaagaaacagagagttttgtgtacagcttgggaatgaaaaggttgattgt

SEQ ID NO: 181706 - DNA, 294 bp, Homo sapiens
  Payload ID: 15787
  Gene Symbol: SIK3
  Gene Name: SIK family kinase 3
  ENST ID: ENST00000454905
  CDS Start-End: 1-214
gaacagcgacgatgcttatgtacagctggataacttgccaggaatgagtctcgtggctgggaaagcacttagctctgcccggatgtcggatgcagttctcagtcagtcttcgctcatgggcagccagcagtttcaggatggggaaaatgaggacattctgctcagctacaagcaccccgaagtctccttcagcatggagcaggcaggcgtgtaacaagaaacagagagagagcaaagcagttagagttcagaggccagcggcctcagggccactccctccctagccttcatcag

SEQ ID NO: 181707 - DNA, 3054 bp, Homo sapiens
  Payload ID: 15787
  Gene Symbol: SIK3
  Gene Name: SIK family kinase 3
  ENST ID: ENST00000413553
  CDS Start-End: 1-1519
taagacccagctggatgaagaaaacttgaagaagattttccgggaagttcaaattatgaagatgctttgccacccccatatcatcaggctctaccaggttatggagacagaacggatgatttatctggtgacagaatatgctagtggaggggaaatatttgaccacctggtggcccatggtagaatggcagaaaaggaggcacgtcggaagttcaaacagatcgtcacagctgtctatttttgtcactgtcggaacattgttcatcgtgatttaaaagctgaaaatttacttctggatgccaatctgaatatcaaaatagcagattttggtttcagtaacctcttcactcctgggcagctgctgaagacctggtgtggcagccctccctatgctgcacctgaactctttgaaggaaaagaatatgatgggcccaaagtggacatctggagccttggagttgtcctctacgtgcttgtgtgcggtgccctgccatttgatggaagcacactgcagaatctgcgggcccgcgtgctgagtggaaagttccgcatcccattttttatgtccacagaatgtgagcatttgatccgccatatgttggtgttagatcccaataagcgcctctccatggagcagatctgcaagcacaagtggatgaagctaggggacgccgatcccaactttgacaggttaatagctgaatgccaacaactaaaggaagaaagacaggtggaccccctgaatgaggatgtcctcttggccatggaggacatgggactggacaaagaacagacactgcagtcattaagatcagatgcctatgatcactatagtgcaatctacagcctgctgtgtgatcgacataagagacataaaaccctgcgtctcggagcacttcctagcatgccccgagccctggcctttcaagcaccagtcaatatccaggcggagcaggcaggtactgctatgaacatcagcgttccccaggtgcagctgatcaacccagagaaccaaattgtggagccggatgggacactgaatttggacagtgatgagggtgaagagccttcccctgaagcattggtgcgctatttgtcaatgaggaggcacacagtgggtgtggctgacccacgcacggaagttatggaagatctgcagaagctcctacctggctttcctggagtcaacccccaggctccattcctgcaggtggcccctaatgtgaacttcatgcacaacctgttgcctatgcaaaacttgcaaccaaccgggcaacttgagtacaaggagcagtctctcctacagccgcccacgctacagctgttgaatggaatgggcccccttggccggagggcatcagatggaggagccaacatccaactgcatgcccagcagctgctgaagcgcccacggggaccctctccgcttgtcaccatgacaccagcagtgccagcagttacccctgtggacgaggagagctcagacggggagccagaccaggaagctgtgcagaggtaatgtgacatctggcagtgcttgcagaagcccctgggcaggctcccctgcaaccagcgaaaggtcacctctgcccaaggaggtggtagagtgcagcttcaacatttgtgtggtctctttgctcaagccagatggcatgttccaccccacatggaagtaacagaagactacccagaaaatgtcatttctgtaagcaccattggaagtcccctaagtgacagcaataaccataagaactttttctttcctccctccttcttccttgtcccctgccttcatattgcaactctgatagtattcacaaggcacaaagcctgctcgtacctgccaagaactgtttactgaaaaggaattggagatgtgggatgacagtgatcctagctagtctggccatggacctctggcatggacttttcctttccaggagaatgaatacctcttgtactgtttgctgtgtgcttcttccacccccttgtaccaacaaagagatattgaaaaagagaatatgggattcgggccagggacagatgcaaatatccattgtttacagaaccttgttgagagatgcctaactcacagagaacggcagtgaccatcaggcatgctgtactgttcatttggcctcagttccgttagccctggtccttagctccatgcatgcccccttgtgggagttgattttcttattatccggggagggggtttcaccagaatccagcatgtattttcccagaaatacaggtgttcttcaagattatatgttttttcctttgagggaagttgaaataaaatggttttcatgggcttttggggaactttgggtgtctttatccaatggttattaaaacattaatggcttactctttggcaagttcacataacactgattactctacagtctgttaactgattttagctgaaaggggcaagatagttaagaatgaaatgagaccattttttaagaacctgccagttgctggctaggactctcatcctatccccagtagctctgtgtgagagctgctattcagaaagcagctggtcctatgtggaaagaaaaccatggcaaacaggggtgttggcaggtgggccagctccttctacagcttggccaatagaaggaaaattctggtaacttttttttttccttgatgctgttgtttctatagtttgctgataagagggtatataaggttacaaatgggccctactgggtcatgaagaaatgagaaatcaggaaatttactgcctttctaccttaaaagagacagcaatattttatcttctttgtcttagactttccttcctccaggtctaccttctttcttctttagaccaacatttcaagggtataatgcccatcagttttgatgtaataaaaaaggtgtagtgcctcttttattcatgcctccagaagagcagcagcggtggaggaagtcatccaccagacaaagagggacaatatcttattgatggtattaactaagtgctgggtctgaaagatcttccgaataaaagccatcagtttgggaactctt

SEQ ID NO: 181708 - DNA, 1895 bp, Homo sapiens
  Payload ID: 15788
  Gene Symbol: SIL1
  Gene Name: SIL1 nucleotide exchange factor
  Uniprot ID: Q9H173
  ENST ID: ENST00000265195
  CDS Start-End: 147-1532
ctggaattgtgggagttgtgtctgccactcggctgccggaggccgaaggccagctattacttctctactgaggccaactgtgagccctggtgtgtttcattggcaggagaagaggctaattaagtgaaactgaaaggtccctgactatggctccccagagcctgccttcatctaggatggctcctctgggcatgctgcttgggctgctgatggccgcctgcttcaccttctgcctcagtcatcagaacctgaaggagtttgccctgaccaacccagagaagagcagcaccaaagaaacagagagaaaagaaaccaaagccgaggaggagctggatgccgaagtcctggaggtgttccacccgacgcatgagtggcaggcccttcagccagggcaggctgtccctgcaggatcccacgtacggctgaatcttcagactggggaaagagaggcaaaactccaatatgaggacaagttccgaaataatttgaaaggcaaaaggctggatatcaacaccaacacctacacatctcaggatctcaagagtgcactggcaaaattcaaggagggggcagagatggagagttcaaaggaagacaaggcaaggcaggctgaggtaaagcggctcttccgccccattgaggaactgaagaaagactttgatgagctgaatgttgtcattgagactgacatgcagatcatggtacggctgatcaacaagttcaatagttccagctccagtttggaagagaagattgctgcgctctttgatcttgaatattatgtccatcagatggacaatgcgcaggacctgctttcctttggtggtcttcaagtggtgatcaatgggctgaacagcacagagcccctcgtgaaggagtatgctgcgtttgtgctgggcgctgccttttccagcaaccccaaggtccaggtggaggccatcgaagggggagccctgcagaagctgctggtcatcctggccacggagcagccgctcactgcaaagaagaaggtcctgtttgcactgtgctccctgctgcgccacttcccctatgcccagcggcagttcctgaagctcggggggctgcaggtcctgaggaccctggtgcaggagaagggcacggaggtgctcgccgtgcgcgtggtcacactgctctacgacctggtcacggagaagatgttcgccgaggaggaggctgagctgacccaggagatgtccccagagaagctgcagcagtatcgccaggtacacctcctgccaggcctgtgggaacagggctggtgcgagatcacggcccacctcctggcgctgcccgagcatgatgcccgtgagaaggtgctgcagacactgggcgtcctcctgaccacctgccgggaccgctaccgtcaggacccccagctcggcaggacactggccagcctgcaggctgagtaccaggtgctggccagcctggagctgcaggatggtgaggacgagggctacttccaggagctgctgggctctgtcaacagcttgctgaaggagctgagatgaggccccacaccaggactggactgggatgccgctagtgaggctgaggggtgccagcgtgggtgggcttctcaggcaggaggacatcttggcagtgctggcttggccattaaatggaaacctgaaggccatcctctttctgctgtgtgtctgtgtagactgggcacagccctgtggccggggggtcaggtgagtggttgggtgatgggctctgctgacgtgcagggctcagcccagggcatccaggaacaggctccagggcaggaacctgggcccaggagttgcaagtctctgcttcttaccaagcagcagctctgtaccttgggaagtcgcttaattgctctgagcttgtttcctcatctgtca

SEQ ID NO: 181709 - DNA, 1923 bp, Homo sapiens
  Payload ID: 15788
  Gene Symbol: SIL1
  Gene Name: SIL1 nucleotide exchange factor
  Uniprot ID: Q9H173
  ENST ID: ENST00000394817
  CDS Start-End: 141-1526
gcggcgtgacagctgccagctcaccggctcagacggtcgccgccgcgtttgcgcagggggagctggtcgccgccgcggccgcctggaattgtgggagttgtgtctgccactcggctgccggaggccgaaggtccctgactatggctccccagagcctgccttcatctaggatggctcctctgggcatgctgcttgggctgctgatggccgcctgcttcaccttctgcctcagtcatcagaacctgaaggagtttgccctgaccaacccagagaagagcagcaccaaagaaacagagagaaaagaaaccaaagccgaggaggagctggatgccgaagtcctggaggtgttccacccgacgcatgagtggcaggcccttcagccagggcaggctgtccctgcaggatcccacgtacggctgaatcttcagactggggaaagagaggcaaaactccaatatgaggacaagttccgaaataatttgaaaggcaaaaggctggatatcaacaccaacacctacacatctcaggatctcaagagtgcactggcaaaattcaaggagggggcagagatggagagttcaaaggaagacaaggcaaggcaggctgaggtaaagcggctcttccgccccattgaggaactgaagaaagactttgatgagctgaatgttgtcattgagactgacatgcagatcatggtacggctgatcaacaagttcaatagttccagctccagtttggaagagaagattgctgcgctctttgatcttgaatattatgtccatcagatggacaatgcgcaggacctgctttcctttggtggtcttcaagtggtgatcaatgggctgaacagcacagagcccctcgtgaaggagtatgctgcgtttgtgctgggcgctgccttttccagcaaccccaaggtccaggtggaggccatcgaagggggagccctgcagaagctgctggtcatcctggccacggagcagccgctcactgcaaagaagaaggtcctgtttgcactgtgctccctgctgcgccacttcccctatgcccagcggcagttcctgaagctcggggggctgcaggtcctgaggaccctggtgcaggagaagggcacggaggtgctcgccgtgcgcgtggtcacactgctctacgacctggtcacggagaagatgttcgccgaggaggaggctgagctgacccaggagatgtccccagagaagctgcagcagtatcgccaggtacacctcctgccaggcctgtgggaacagggctggtgcgagatcacggcccacctcctggcgctgcccgagcatgatgcccgtgagaaggtgctgcagacactgggcgtcctcctgaccacctgccgggaccgctaccgtcaggacccccagctcggcaggacactggccagcctgcaggctgagtaccaggtgctggccagcctggagctgcaggatggtgaggacgagggctacttccaggagctgctgggctctgtcaacagcttgctgaaggagctgagatgaggccccacaccaggactggactgggatgccgctagtgaggctgaggggtgccagcgtgggtgggcttctcaggcaggaggacatcttggcagtgctggcttggccattaaatggaaacctgaaggccatcctctttctgctgtgtgtctgtgtagactgggcacagccctgtggccggggggtcaggtgagtggttgggtgatgggctctgctgacgtgcagggctcagcccagggcatccaggaacaggctccagggcaggaacctgggcccaggagttgcaagtctctgcttcttaccaagcagcagctctgtaccttgggaagtcgcttaattgctctgagcttgtttcctcatctgtcaggagtgccattaaaggagaaaaatcacgtagaaa

SEQ ID NO: 181710 - DNA, 581 bp, Homo sapiens
  Payload ID: 15788
  Gene Symbol: SIL1
  Gene Name: SIL1 nucleotide exchange factor
  ENST ID: ENST00000507002
  CDS Start-End: 207-581
gtctgccactcggctgccggaggccgaaggccagctattacttctctactgaggccaactgtgagccctggtgtgtttcattggcaggagaagaggctaattaagtgaaactgaaagggcatatctcttgttggatggctggacccaccatggtagatggaggcttcagaattatctagaagtggtagaagactcgttatacctctatgcaggaaatgtctgacatgtccctgactatggctccccagagcctgccttcatctaggatggctcctctgggcatgctgcttgggctgctgatggccgcctgcttcaccttctgcctcagtcatcagaacctgaaggagtttgccctgaccaacccagagaagagcagcaccaaagaaacagagagaaaagaaaccaaagccgaggaggagctggatgccgaagtcctggaggtgttccacccgacgcatgagtggcaggcccttcagccagggcaggctgtccctgcaggatcccacgtacggctgaatcttcagactggggaaagagaggcaaaactccaatatgaggacaagttccgaaataatttgaaa

SEQ ID NO: 181711 - DNA, 442 bp, Homo sapiens
  Payload ID: 15788
  Gene Symbol: SIL1
  Gene Name: SIL1 nucleotide exchange factor
  ENST ID: ENST00000505353
  CDS Start-End: 159-442
ctctctctctctctctctcactctgtgtacgtgtgtgtgtatactgaggaaaggccatgtgaagacatggcaagagggcagccatctgcaagctaagatgagagtcttcagctggaaccttgatcttggacttctggccttcagaattgtccctgactatggctccccagagcctgccttcatctaggatggctcctctgggcatgctgcttgggctgctgatggccgcctgcttcaccttctgcctcagtcatcagaacctgaaggagtttgccctgaccaacccagagaagagcagcaccaaagaaacagagagaaaagaaaccaaagccgaggaggagctggatgccgaagtcctggaggtgttccacccgacgcatgagtggcaggcccttcagccagggcaggctgtccctgcaggatcccacgtacggctgaatct

SEQ ID NO: 181712 - DNA, 572 bp, Homo sapiens
  Payload ID: 15788
  Gene Symbol: SIL1
  Gene Name: SIL1 nucleotide exchange factor
  ENST ID: ENST00000513453
  CDS Start-End: 203-572
cacacccagggatggccagtcacctatccagagcctggtgtggtgctgtgaactcaatccctgtctttcagtgtgattggtgccccagggagccaggttgctgggggaagctctcgtggcactcagccgttccattttgtcggcaaaaaaagagggggggagctggcagaaagctaaggcttttgctgctgggtccctgactatggctccccagagcctgccttcatctaggatggctcctctgggcatgctgcttgggctgctgatggccgcctgcttcaccttctgcctcagtcatcagaacctgaaggagtttgccctgaccaacccagagaagagcagcaccaaagaaacagagagaaaagaaaccaaagccgaggaggagctggatgccgaagtcctggaggtgttccacccgacgcatgagtggcaggcccttcagccagggcaggctgtccctgcaggatcccacgtacggctgaatcttcagactggggaaagagaggcaaaactccaatatgaggacaagttccgaaataatttgaaaggcaaaaggctggatatcaacacca

SEQ ID NO: 181713 - DNA, 250 bp, Homo sapiens
  Payload ID: 15788
  Gene Symbol: SIL1
  Gene Name: SIL1 nucleotide exchange factor
  ENST ID: ENST00000505945
  CDS Start-End: 1-250
ctcaagagtgcactggcaaaattcaaggagggggcagagatggagagttcaaaggaagacaagatggacaatgcgcaggacctgctttcctttggtggtcttcaagtggtgatcaatgggctgaacagcacagagcccctcgtgaaggagtatgctgcgtttgtgctgggcgctgccttttccagcaaccccaaggtccaggtggaggccatcgaagggggagccctgcagaagctgctggtcatcctgg

SEQ ID NO: 181714 - DNA, 496 bp, Homo sapiens
  Payload ID: 15788
  Gene Symbol: SIL1
  Gene Name: SIL1 nucleotide exchange factor
  ENST ID: ENST00000505830
  CDS Start-End: 126-496
gagttgtgtctgccactcggctgccggaggccgaagggcatatctcttgttggatggctggacccaccatggtagatggaggcttcagaattatctagaagtggtagaagactcgttatacctctatgcaggaaatgtctgacatgtccctgactatggctccccagagcctgccttcatctaggatggctcctctgggcatgctgcttgggctgctgatggccgcctgcttcaccttctgcctcagtcatcagaacctgaaggagtttgccctgaccaacccagagaagagcagcaccaaagaaacagagagaaaagaaaccaaagccgaggaggagctggatgccgaagtcctggaggtgttccacccgacgcatgagtggcaggcccttcagccagggcaggctgtccctgcaggatcccacgtacggctgaatcttcagactggggaaagagaggcaaaactccaatatgaggacaagttccgaaataattt

SEQ ID NO: 181715 - DNA, 1714 bp, Homo sapiens
  Payload ID: 15788
  Gene Symbol: SIL1
  Gene Name: SIL1 nucleotide exchange factor
  ENST ID: ENST00000509534
  CDS Start-End: 214-1620
attacttctctactgaggccaactgtgagccctggtgtgtttcattggcaggagaagaggctaattaagtgaaactgaaagaacaaataaaatgatgagtccagtttctgtggctgatttcacagacccctcgagagacagcacggctatggaaagagcatggctttggggccaaactggctttgaattctgactctactgctctgtggctgcatgaactctggcacgtccctgactatggctccccagagcctgccttcatctaggatggctcctctgggcatgctgcttgggctgctgatggccgcctgcttcaccttctgcctcagtcatcagaacctggagtttgccctgaccaacccagagaagagcagcaccaaagaaacagagagaaaagaaaccaaagccgaggaggagctggatgccgaagtcctggaggtgttccacccgacgcatgagtggcaggcccttcagccagggcaggctgtccctgcaggatcccacgtacggctgaatcttcagactggggaaagagaggcaaaactccaatatgaggacaagttccgaaataatttgaaaggcaaaaggctggatatcaacaccaacacctacacatctcaggatctcaagagtgcactggcaaaattcaaggagggggcagagatggagagttcaaaggaagacaaggcaaggcaggctgaggtaaagcggctcttccgccccattgaggaactgaagaaagactttgatgagctgaatgttgtcattgagactgacatgcagatcatggtacggctgatcaacaagttcaatagttccagctccagtttggaagagaagattgctgcgctctttgatcttgaatattatgtccatcagatggacaatgcgcaggacctgctttcctttggtggtcttcaagtggtgatcaatgggctgaacagcacagagcccctcgtgaaggagtatgctgcgtttgtgctgggcgctgccttttccagcaaccccaaggtccaggtggaggccatcgaagggggagccctgcagaagctgctggtcatcctggccacggagcagccgctcactgcaaagaagaaggtcctgtttgcactgtgctccctgctgcgccacttcccctatgcccagcggcagttcctgaagctcggggggctgcaggtcctgaggaccctggtgcaggagaagggcacggaggtgctcgccgtgcgcgtggtcacactgctctacgacctggtcacggagaagatgttcgccgaggaggaggctgagctgacccaggagatgtccccagagaagctgcagcagtatcgccaggtacacctcctgccaggcctgtgggaacagggctggtgcgagatcacggcccacctcctggcgctgcccgagcatgatgcccgtgagaaggtgctgcagacactgggcgtcctcctgaccacctgccgggaccgctaccgtcaggacccccagctcggcaggacactggccagcctgcaggctgagtaccaggtgctggccagcctggagctgcaggatggtgaggacgagggctacttccaggagctgctgggctctgtcaacagcttgctgaaggagctgagatgaggccccacaccaggactggactgggatgccgctagtgaggctgaggggtgccagcgtgggtgggcttctcaggcaggaggacatcttggcagtg

SEQ ID NO: 181716 - DNA, 675 bp, Homo sapiens
  Payload ID: 15788
  Gene Symbol: SIL1
  Gene Name: SIL1 nucleotide exchange factor
  ENST ID: ENST00000508639
  CDS Start-End: 187-675
gggagttgtgtctgccactcggctgccggaggccgaagggcccaatccccacccccagtcttgtctgaattgtgtggaagacatgaggcactgagagaggtgggggccgagtggcctcctcccacctgctccccaaacatctgctctgggctgcagtaagctggcaatacagattggtccctgactatggctccccagagcctgccttcatctaggatggctcctctgggcatgctgcttgggctgctgatggccgcctgcttcaccttctgcctcagtcatcagaacctgaaggagtttgccctgaccaacccagagaagagcagcaccaaagaaacagagagaaaagaaaccaaagccgaggaggagctggatgccgaagtcctggaggtgttccacccgacgcatgagtggcaggcccttcagccagggcaggctgtccctgcaggatcccacgtacggctgaatcttcagactggggaaagagaggcaaaactccaatatgaggacaagttccgaaataatttgaaaggcaaaaggctggatatcaacaccaacacctacacatctcaggatctcaagagtgcactggcaaaattcaaggagggggcagagatggagagttcaaaggaagacaaggcaaggcaggctgaggtaaagcggctcttccgcccc

SEQ ID NO: 181717 - DNA, 5050 bp, Homo sapiens
  Payload ID: 15789
  Gene Symbol: SIN3A
  Gene Name: SIN3 transcription regulator family member A
  Uniprot ID: Q96ST3
  ENST ID: ENST00000360439
  CDS Start-End: 183-4004
gttaaacagctgcttttaatttggtccccccaatctcaggcgtttggggggctagtccgccggccgctcggtctggccggcccgacgtggtgtgggccctgcgggccctgggaccgagctgaggggaggctcggagttccgcggccgaggttttgtagtgcatccctgagcatgagcacagaatgaagcggcgtttggatgaccaggagtcaccggtgtatgcagcccagcagcgtcggatccctggcagcacagaggcttttcctcaccagcaccgggtgcttgcccctgcccctcctgtgtatgaagcagtgtctgagaccatgcagtcagctacgggaattcagtactctgtaacacccagctaccaggtttcagccatgccacagagctccggcagtcatgggcccgctatagcagcagttcatagcagccatcatcacccaacagcggtgcagccccacggaggccaggtggtccagagtcatgctcatccagccccaccagttgcaccagtgcagggacagcagcaatttcagaggctgaaggtggaggatgcgctatcttatcttgaccaggtgaagctgcagtttggtagtcagcctcaggtctacaatgatttccttgacatcatgaaggaatttaaatctcagagcatcgacaccccaggagtgattagtcgtgtgtcccagctattcaaaggccaccccgatctgataatgggattcaacaccttcttgccccctggctacaaaattgaggtgcaaaccaatgacatggtgaatgtgacaactcctggccaggttcatcagattcccacccatggcatccagccacagcctcaaccaccaccccaacatccttcccagccttcagcccagtcagccccagctcctgcccagccagctcctcagcccccacctgccaaagtcagcaagccctcccaactgcaagcacatactccggccagtcagcagactcccccacttccaccgtatgcatccccacgttctccgccggtccagcctcacacaccagtgacaatctcgttgggaacggccccatccttgcagaacaatcaacctgtggagtttaatcatgccatcaactatgttaataagatcaagaacagatttcagggccaaccagacatctacaaagcattcctggagattttgcacacatatcagaaagagcagagaaatgccaaggaagctggaggaaactacactccagcattgacagagcaggaggtgtatgcccaggttgctcgtctctttaaaaaccaggaagatttgttgtcagagtttggacaattcctaccagatgccaacagctccgtgcttttaagcaaaacaactgctgagaaggttgattctgtgagaaatgatcatggaggcactgtcaagaagccccaactgaacaacaagccgcagaggcccagccagaatggctgccagatccgcagacatcctacaggaaccacccctccagttaagaagaaacccaaactgctcaatctgaaggattcttctatggcagatgccagcaaacatggtggtggaacagaatcgttattttttgataaggtccgaaaggctcttcggagtgcagaagcctacgaaaatttcctacgctgtcttgttatttttaaccaggaggtgatctctcgtgctgagcttgtgcaactagtctctcctttcctggggaaattccctgagttgtttaattggtttaaaaactttctgggctataaggagtctgtacatctggaaacttatccaaaggagcgagccacagagggcattgctatggagatagattatgcttcttgtaaacgattgggctccagctatcgagccttaccaaagagttaccagcagcccaagtgtacaggacggactcctctctgtaaagaggttttaaatgatacctgggtttccttcccttcgtggtctgaggactctacctttgtgagttccaagaagactcaatatgaagaacatatttatcgttgtgaagatgaacgctttgagcttgatgtagttttagagaccaatctggcaacaatccgggttctggaagcaatacagaagaagctttcccgcttgtctgctgaagaacaagccaaatttcgcttggacaacacccttgggggcacatcagaagtcatccatagaaaagcactccagaggatatatgctgataaagcagctgacatcattgatggtctgagaaagaatccctccattgctgttccaattgtccttaaaaggttgaagatgaaagaggaagaatggcgagaagctcagagaggctttaacaaagtatggcgagaacaaaatgagaaatactacttgaagtctctggaccaccaggggatcaactttaaacagaatgacaccaaggtcctgaggtctaagagcttactcaatgagattgagagtatctatgatgagaggcaagagcaggctacggaggagaatgctggtgtacctgttggcccacacctctcacttgcgtatgaagacaaacaaatactggaagatgctgctgctctgattatccaccatgtgaagaggcagacaggcattcagaaggaggacaaatataagataaaacaaatcatgcatcattttattccagatttgctctttgcccaaagaggtgatctctcagatgtggaggaagaggaagaagaagagatggatgtagatgaagccacaggggcagttaagaagcacaatggtgttgggggcagtccccctaagtccaagttactgtttagtaacacagcagctcaaaaattaagaggaatggatgaagtatacaacctcttctatgtcaacaacaactggtatatttttatgcgactgcaccagattctctgcctgaggctgctacggatttgttcccaagccgaacggcaaattgaagaagaaaaccgagagagagaatgggaacgggaagtgctgggcataaagcgagacaagagtgacagccctgccattcagctacgtctcaaagaacctatggatgttgatgtagaagattattacccagctttcctggacatggtgcggagcctgctggatggcaacatagactcatcacagtatgaagattcactgagagagatgttcaccattcatgcctacattgcctttaccatggacaaactgatccagagcattgtcagacagctgcagcatatcgtgagtgatgagatctgtgtgcaggtgactgacctttacctggcagaaaataataatggggccaccggaggccagctgaacacacagaactcaaggagcctcctggagtcaacgtatcagcggaaagctgagcagctaatgtcagatgagaattgctttaagcttatgtttattcagagccaaggccaggtccagctgactattgagcttctggacacagaagaggagaattcggatgaccctgtggaagcagagcgctggtcagactacgtggagcgatacatgaattcagatactacctcgcctgagcttcgtgaacatctagcacagaaaccagtatttctccccaggaatctacggcggatccggaagtgtcaacgtggtcgagagcagcaggaaaaggaagggaaggaaggaaacagcaagaagaccatggagaatgtggatagtctggataagctggagtgtagattcaagctgaattcctacaagatggtgtatgtgatcaaatcagaggactatatgtatcggaggaccgccctgctccgggctcatcagtcccatgagcgtgtaagcaagcgtctacatcagagattccaggcctgggtagataaatggaccaaggagcatgtgccccgtgaaatggcagcagagaccagcaagtggctcatgggtgaggggctggagggcctggtgccctgtaccaccacctgtgatacagagaccctgcattttgtgagcattaacaagtatcgtgtcaaatacggcacagtattcaaagccccttaactgcaaagccagagcagataacttggggtgtgtgtggggatgtgtgtgtgggcctatgcactcacacactgaagaaacaaggaagatgcctttcaagcctcactgggcctctctgggacatggccacctgacctgtgtgtggctggtgcagcctggcaccaagtgggctacctgttaggaacatgaataccttacaaagctgaagctggaacttttcccaaagggttttgggtatagcctgccctggaggggaaggaagtccatgcaagcaaagacatgcagtttgcttgcacacaccagcagagctaagactggagtctcctgtggcctaactttcaatgagggaaccggatgctgttcacactttgactggatggagatgcatttacaaaacagactggagaaggacttaatactcagatggattggaactatcatggtcactgctcctctcccctccccacaaaaggaaaaaaaagctggatttgattttttttttctggtcactcgagcacatctaagatcacccattaggttttatctgggacctgcagtttggctttgggattgatcatcttgtggattttattcctgacgattcccttgctgcctacccttttctctcctctggttctcaacctcaacgagttcaaatcagttgtcctttttagctcccgtggaactgttttgtatctgcctctttactagtctaccttagtgccatccaccagctttactctctgacacacacacgcacacacacacacaattttaacttgtttttttgtacataatgtacatactgtcaattttttattaaaagaaatatgctttgatgtgctagcataactgctctagcttcttgtgtaccatagtactgtggcttcagatttagtacctatgaacagatgtacaagacatttattacactttttaccaaagggagttaccattgtagtacttttgtgtaaaacttgtcttcccctttgcccccaacttttttttttttttttttgtaaataaataaagcttggttcttacttaag

SEQ ID NO: 181718 - DNA, 6737 bp, Homo sapiens
  Payload ID: 15789
  Gene Symbol: SIN3A
  Gene Name: SIN3 transcription regulator family member A
  Uniprot ID: Q96ST3
  ENST ID: ENST00000394947
  CDS Start-End: 316-4137
gggatttcccgggtaacagagaagcggccgcggcggtagaggcggcggagacggtttctccatcttcccccctccccttcccccctcggagtttccctccctccctccctccctccttcccagtctgggcaccggagcctgtgaccgcttcgttagtggagaggtagctggcagtccgcttcggcgggcctgtgccccgcgccgttctcggggcctccctgctgagctcgcggctcacgctgagagggacacgcagtgacgagcggccgaagcagctttgcggttttgtagtgcatccctgagcatgagcacagaatgaagcggcgtttggatgaccaggagtcaccggtgtatgcagcccagcagcgtcggatccctggcagcacagaggcttttcctcaccagcaccgggtgcttgcccctgcccctcctgtgtatgaagcagtgtctgagaccatgcagtcagctacgggaattcagtactctgtaacacccagctaccaggtttcagccatgccacagagctccggcagtcatgggcccgctatagcagcagttcatagcagccatcatcacccaacagcggtgcagccccacggaggccaggtggtccagagtcatgctcatccagccccaccagttgcaccagtgcagggacagcagcaatttcagaggctgaaggtggaggatgcgctatcttatcttgaccaggtgaagctgcagtttggtagtcagcctcaggtctacaatgatttccttgacatcatgaaggaatttaaatctcagagcatcgacaccccaggagtgattagtcgtgtgtcccagctattcaaaggccaccccgatctgataatgggattcaacaccttcttgccccctggctacaaaattgaggtgcaaaccaatgacatggtgaatgtgacaactcctggccaggttcatcagattcccacccatggcatccagccacagcctcaaccaccaccccaacatccttcccagccttcagcccagtcagccccagctcctgcccagccagctcctcagcccccacctgccaaagtcagcaagccctcccaactgcaagcacatactccggccagtcagcagactcccccacttccaccgtatgcatccccacgttctccgccggtccagcctcacacaccagtgacaatctcgttgggaacggccccatccttgcagaacaatcaacctgtggagtttaatcatgccatcaactatgttaataagatcaagaacagatttcagggccaaccagacatctacaaagcattcctggagattttgcacacatatcagaaagagcagagaaatgccaaggaagctggaggaaactacactccagcattgacagagcaggaggtgtatgcccaggttgctcgtctctttaaaaaccaggaagatttgttgtcagagtttggacaattcctaccagatgccaacagctccgtgcttttaagcaaaacaactgctgagaaggttgattctgtgagaaatgatcatggaggcactgtcaagaagccccaactgaacaacaagccgcagaggcccagccagaatggctgccagatccgcagacatcctacaggaaccacccctccagttaagaagaaacccaaactgctcaatctgaaggattcttctatggcagatgccagcaaacatggtggtggaacagaatcgttattttttgataaggtccgaaaggctcttcggagtgcagaagcctacgaaaatttcctacgctgtcttgttatttttaaccaggaggtgatctctcgtgctgagcttgtgcaactagtctctcctttcctggggaaattccctgagttgtttaattggtttaaaaactttctgggctataaggagtctgtacatctggaaacttatccaaaggagcgagccacagagggcattgctatggagatagattatgcttcttgtaaacgattgggctccagctatcgagccttaccaaagagttaccagcagcccaagtgtacaggacggactcctctctgtaaagaggttttaaatgatacctgggtttccttcccttcgtggtctgaggactctacctttgtgagttccaagaagactcaatatgaagaacatatttatcgttgtgaagatgaacgctttgagcttgatgtagttttagagaccaatctggcaacaatccgggttctggaagcaatacagaagaagctttcccgcttgtctgctgaagaacaagccaaatttcgcttggacaacacccttgggggcacatcagaagtcatccatagaaaagcactccagaggatatatgctgataaagcagctgacatcattgatggtctgagaaagaatccctccattgctgttccaattgtccttaaaaggttgaagatgaaagaggaagaatggcgagaagctcagagaggctttaacaaagtatggcgagaacaaaatgagaaatactacttgaagtctctggaccaccaggggatcaactttaaacagaatgacaccaaggtcctgaggtctaagagcttactcaatgagattgagagtatctatgatgagaggcaagagcaggctacggaggagaatgctggtgtacctgttggcccacacctctcacttgcgtatgaagacaaacaaatactggaagatgctgctgctctgattatccaccatgtgaagaggcagacaggcattcagaaggaggacaaatataagataaaacaaatcatgcatcattttattccagatttgctctttgcccaaagaggtgatctctcagatgtggaggaagaggaagaagaagagatggatgtagatgaagccacaggggcagttaagaagcacaatggtgttgggggcagtccccctaagtccaagttactgtttagtaacacagcagctcaaaaattaagaggaatggatgaagtatacaacctcttctatgtcaacaacaactggtatatttttatgcgactgcaccagattctctgcctgaggctgctacggatttgttcccaagccgaacggcaaattgaagaagaaaaccgagagagagaatgggaacgggaagtgctgggcataaagcgagacaagagtgacagccctgccattcagctacgtctcaaagaacctatggatgttgatgtagaagattattacccagctttcctggacatggtgcggagcctgctggatggcaacatagactcatcacagtatgaagattcactgagagagatgttcaccattcatgcctacattgcctttaccatggacaaactgatccagagcattgtcagacagctgcagcatatcgtgagtgatgagatctgtgtgcaggtgactgacctttacctggcagaaaataataatggggccaccggaggccagctgaacacacagaactcaaggagcctcctggagtcaacgtatcagcggaaagctgagcagctaatgtcagatgagaattgctttaagcttatgtttattcagagccaaggccaggtccagctgactattgagcttctggacacagaagaggagaattcggatgaccctgtggaagcagagcgctggtcagactacgtggagcgatacatgaattcagatactacctcgcctgagcttcgtgaacatctagcacagaaaccagtatttctccccaggaatctacggcggatccggaagtgtcaacgtggtcgagagcagcaggaaaaggaagggaaggaaggaaacagcaagaagaccatggagaatgtggatagtctggataagctggagtgtagattcaagctgaattcctacaagatggtgtatgtgatcaaatcagaggactatatgtatcggaggaccgccctgctccgggctcatcagtcccatgagcgtgtaagcaagcgtctacatcagagattccaggcctgggtagataaatggaccaaggagcatgtgccccgtgaaatggcagcagagaccagcaagtggctcatgggtgaggggctggagggcctggtgccctgtaccaccacctgtgatacagagaccctgcattttgtgagcattaacaagtatcgtgtcaaatacggcacagtattcaaagccccttaactgcaaagccagagcagataacttggggtgtgtgtggggatgtgtgtgtgggcctatgcactcacacactgaagaaacaaggaagatgcctttcaagcctcactgggcctctctgggacatggccacctgacctgtgtgtggctggtgcagcctggcaccaagtgggctacctgttaggaacatgaataccttacaaagctgaagctggaacttttcccaaagggttttgggtatagcctgccctggaggggaaggaagtccatgcaagcaaagacatgcagtttgcttgcacacaccagcagagctaagactggagtctcctgtggcctaactttcaatgagggaaccggatgctgttcacactttgactggatggagatgcatttacaaaacagactggagaaggacttaatactcagatggattggaactatcatggtcactgctcctctcccctccccacaaaaggaaaaaaaagctggatttgattttttttttctggtcactcgagcacatctaagatcacccattaggttttatctgggacctgcagtttggctttgggattgatcatcttgtggattttattcctgacgattcccttgctgcctacccttttctctcctctggttctcaacctcaacgagttcaaatcagttgtcctttttagctcccgtggaactgttttgtatctgcctctttactagtctaccttagtgccatccaccagctttactctctgacacacacacgcacacacacacacaattttaacttgtttttttgtacataatgtacatactgtcaattttttattaaaagaaatatgctttgatgtgctagcataactgctctagcttcttgtgtaccatagtactgtggcttcagatttagtacctatgaacagatgtacaagacatttattacactttttaccaaagggagttaccattgtagtacttttgtgtaaaacttgtcttcccctttgcccccaacttttttttttttttttttgtaaataaataaagcttggttcttacttaaggaataaactctcaacccacgtcccttgtcctcaccagaaaatactgtgaagcagggattttgacttcagttccttatccagggtagaaacaggattttgcttaaaatacttgttacttgtcccaaatcaaaatattccaaaatcttagaatacttaagtcttttagtacgtgtttttttcccttgttcaaataatctgaaaatattttatatttgggtaagttgtcaagctatgtagtttgtatttctatatattttttcttattcacattggtgatggatgggggtgagcaacttaaataccaaaccagtgtttgaaaaaaaagtgtgcataaggcatgtggtataccttataaatggagttgggagggagagaatttgaaatgggatacctatttttttaattacataaatttaaactagcagacatttaaacatgaatgattaggatttttctatgtggttaacctggactttctgaacaaagaccaactgagcccctcccagtactctggtggatttttcttcagcaaccattacgcaagtcttagttgtaaccagcaatgttctgtgtgttttatgtttgctttttagttaaaaatcaccaccaccaccaaaaagaaaaacaaaattttttggctcctggattttcaaaacacatggtagacctctctgattttaggcttttattgtttaaagacagtgtctcgctttatgacccacactggagtgcagtgccacgatcatagctcactgcaggcttgacctcccaggctcaagcagtcctcccacctcggcctcctgagtagctgcatgccaccacgcccagctaattttttaactttttgtagagacagggtcttgctatgctgcccaggttggtctcaaactcctggcctcaagctgtcctcccacctcggcctcgcaaagtgctgagattacaggtgtgagccaccctggcctgattttaggctttttttgtactggggagaagagactgtgagccaaagtgtagggtgccaaaaagagctttgtgggatgagattttagggcaaagctggggcagtgtctgacttggcggtggtcatgtgtactgatttaggggaaagatcttgaggttttctcaaataattcacctatccccgtgttccctcaagaaaggtcatgttgacctggaaccataggggaaattggtggggtgtgatcagggtcagccccagctgttgctgcccctgcagtgttttgtccagagcacttgcctgcaggtcaggataggatttcaaggccagttcaggagaaagtcccaacccaccagtgcaaccaacaaaagagtaagttttacctacagcctgggttttcacaagtagcatttttattcctcctgctgtctgacatctgagctccaagctctaaacccaacctgtattatatgcagcagcaggttatctttgttttaaatcacatttgttattctgtacttagtcacctttccgtgtgatctgcatttgaaatgttgtaaacttggtcagtatttccattaaaatatcagggctaa

SEQ ID NO: 181719 - DNA, 4930 bp, Homo sapiens
  Payload ID: 15789
  Gene Symbol: SIN3A
  Gene Name: SIN3 transcription regulator family member A
  Uniprot ID: Q96ST3
  ENST ID: ENST00000394949
  CDS Start-End: 260-4081
ccagtctgggcaccggagcctgtgaccgcttcgttagtggagaggtagctggcagtccgcttcggcgggcctgtgccccgcgccgttctcggggcctccctgctgagctcgcggctcacgctgagagggacacgcagtgacgagcggccgaagcagctttgcggtgagagcacgctgggccgggggccgggcgggagcctggtggcgggtaacgccggactcgagggttttgtagtgcatccctgagcatgagcacagaatgaagcggcgtttggatgaccaggagtcaccggtgtatgcagcccagcagcgtcggatccctggcagcacagaggcttttcctcaccagcaccgggtgcttgcccctgcccctcctgtgtatgaagcagtgtctgagaccatgcagtcagctacgggaattcagtactctgtaacacccagctaccaggtttcagccatgccacagagctccggcagtcatgggcccgctatagcagcagttcatagcagccatcatcacccaacagcggtgcagccccacggaggccaggtggtccagagtcatgctcatccagccccaccagttgcaccagtgcagggacagcagcaatttcagaggctgaaggtggaggatgcgctatcttatcttgaccaggtgaagctgcagtttggtagtcagcctcaggtctacaatgatttccttgacatcatgaaggaatttaaatctcagagcatcgacaccccaggagtgattagtcgtgtgtcccagctattcaaaggccaccccgatctgataatgggattcaacaccttcttgccccctggctacaaaattgaggtgcaaaccaatgacatggtgaatgtgacaactcctggccaggttcatcagattcccacccatggcatccagccacagcctcaaccaccaccccaacatccttcccagccttcagcccagtcagccccagctcctgcccagccagctcctcagcccccacctgccaaagtcagcaagccctcccaactgcaagcacatactccggccagtcagcagactcccccacttccaccgtatgcatccccacgttctccgccggtccagcctcacacaccagtgacaatctcgttgggaacggccccatccttgcagaacaatcaacctgtggagtttaatcatgccatcaactatgttaataagatcaagaacagatttcagggccaaccagacatctacaaagcattcctggagattttgcacacatatcagaaagagcagagaaatgccaaggaagctggaggaaactacactccagcattgacagagcaggaggtgtatgcccaggttgctcgtctctttaaaaaccaggaagatttgttgtcagagtttggacaattcctaccagatgccaacagctccgtgcttttaagcaaaacaactgctgagaaggttgattctgtgagaaatgatcatggaggcactgtcaagaagccccaactgaacaacaagccgcagaggcccagccagaatggctgccagatccgcagacatcctacaggaaccacccctccagttaagaagaaacccaaactgctcaatctgaaggattcttctatggcagatgccagcaaacatggtggtggaacagaatcgttattttttgataaggtccgaaaggctcttcggagtgcagaagcctacgaaaatttcctacgctgtcttgttatttttaaccaggaggtgatctctcgtgctgagcttgtgcaactagtctctcctttcctggggaaattccctgagttgtttaattggtttaaaaactttctgggctataaggagtctgtacatctggaaacttatccaaaggagcgagccacagagggcattgctatggagatagattatgcttcttgtaaacgattgggctccagctatcgagccttaccaaagagttaccagcagcccaagtgtacaggacggactcctctctgtaaagaggttttaaatgatacctgggtttccttcccttcgtggtctgaggactctacctttgtgagttccaagaagactcaatatgaagaacatatttatcgttgtgaagatgaacgctttgagcttgatgtagttttagagaccaatctggcaacaatccgggttctggaagcaatacagaagaagctttcccgcttgtctgctgaagaacaagccaaatttcgcttggacaacacccttgggggcacatcagaagtcatccatagaaaagcactccagaggatatatgctgataaagcagctgacatcattgatggtctgagaaagaatccctccattgctgttccaattgtccttaaaaggttgaagatgaaagaggaagaatggcgagaagctcagagaggctttaacaaagtatggcgagaacaaaatgagaaatactacttgaagtctctggaccaccaggggatcaactttaaacagaatgacaccaaggtcctgaggtctaagagcttactcaatgagattgagagtatctatgatgagaggcaagagcaggctacggaggagaatgctggtgtacctgttggcccacacctctcacttgcgtatgaagacaaacaaatactggaagatgctgctgctctgattatccaccatgtgaagaggcagacaggcattcagaaggaggacaaatataagataaaacaaatcatgcatcattttattccagatttgctctttgcccaaagaggtgatctctcagatgtggaggaagaggaagaagaagagatggatgtagatgaagccacaggggcagttaagaagcacaatggtgttgggggcagtccccctaagtccaagttactgtttagtaacacagcagctcaaaaattaagaggaatggatgaagtatacaacctcttctatgtcaacaacaactggtatatttttatgcgactgcaccagattctctgcctgaggctgctacggatttgttcccaagccgaacggcaaattgaagaagaaaaccgagagagagaatgggaacgggaagtgctgggcataaagcgagacaagagtgacagccctgccattcagctacgtctcaaagaacctatggatgttgatgtagaagattattacccagctttcctggacatggtgcggagcctgctggatggcaacatagactcatcacagtatgaagattcactgagagagatgttcaccattcatgcctacattgcctttaccatggacaaactgatccagagcattgtcagacagctgcagcatatcgtgagtgatgagatctgtgtgcaggtgactgacctttacctggcagaaaataataatggggccaccggaggccagctgaacacacagaactcaaggagcctcctggagtcaacgtatcagcggaaagctgagcagctaatgtcagatgagaattgctttaagcttatgtttattcagagccaaggccaggtccagctgactattgagcttctggacacagaagaggagaattcggatgaccctgtggaagcagagcgctggtcagactacgtggagcgatacatgaattcagatactacctcgcctgagcttcgtgaacatctagcacagaaaccagtatttctccccaggaatctacggcggatccggaagtgtcaacgtggtcgagagcagcaggaaaaggaagggaaggaaggaaacagcaagaagaccatggagaatgtggatagtctggataagctggagtgtagattcaagctgaattcctacaagatggtgtatgtgatcaaatcagaggactatatgtatcggaggaccgccctgctccgggctcatcagtcccatgagcgtgtaagcaagcgtctacatcagagattccaggcctgggtagataaatggaccaaggagcatgtgccccgtgaaatggcagcagagaccagcaagtggctcatgggtgaggggctggagggcctggtgccctgtaccaccacctgtgatacagagaccctgcattttgtgagcattaacaagtatcgtgtcaaatacggcacagtattcaaagccccttaactgcaaagccagagcagataacttggggtgtgtgtggggatgtgtgtgtgggcctatgcactcacacactgaagaaacaaggaagatgcctttcaagcctcactgggcctctctgggacatggccacctgacctgtgtgtggctggtgcagcctggcaccaagtgggctacctgttaggaacatgaataccttacaaagctgaagctggaacttttcccaaagggttttgggtatagcctgccctggaggggaaggaagtccatgcaagcaaagacatgcagtttgcttgcacacaccagcagagctaagactggagtctcctgtggcctaactttcaatgagggaaccggatgctgttcacactttgactggatggagatgcatttacaaaacagactggagaaggacttaatactcagatggattggaactatcatggtcactgctcctctcccctccccacaaaaggaaaaaaaagctggatttgattttttttttctggtcactcgagcacatctaagatcacccattaggttttatctgggacctgcagtttggctttgggattgatcatcttgtggattttattcctgacgattcccttgctgcctacccttttctctcctctggttctcaacctcaacgagttcaaatcagttgtcctttttagctcccgtggaactgttttgtatctgcctctttactagtctaccttagtgccatccaccagctttactctctgacacacacacgcacacacacacacaattttaacttgtttttttgtacataatgtacatactgtcaattttttattaaaagaaatatgctttgatgtgctagcataa

SEQ ID NO: 181720 - DNA, 510 bp, Homo sapiens
  Payload ID: 15789
  Gene Symbol: SIN3A
  Gene Name: SIN3 transcription regulator family member A
  ENST ID: ENST00000565264
  CDS Start-End: 456-510
agctgagtcttccctctgcggggcggggtcgggggagtgggcgggatttcccgggtaacagagaagcggccgcggcggtagaggcggcggagacggtttctccatcttcccccctccccttcccccctcggagtttccctccctccctccctccctccttcccagtctgggcaccggagcctgtgaccgcttcgttagtggagaggtagctggcagtccgcttcggcgggcctgtgccccgcgccgttctcggggcctccctgctgagctcgcggctcacgctgagagggacacgcagtgacgagcggccgaagcagctttgcggctcgagtgcagtagcgagatctcagctcacctcagcctctgtctcctggactcacatgatcctcccacgtcagcctcctaaatagctgggattacaggttttgtagtgcatccctgagcatgagcacagaatgaagcggcgtttggatgaccaggagtcaccggtgtatgcagcccagcagcgtc

SEQ ID NO: 181721 - DNA, 565 bp, Homo sapiens
  Payload ID: 15789
  Gene Symbol: SIN3A
  Gene Name: SIN3 transcription regulator family member A
  ENST ID: ENST00000568431
  CDS Start-End: 175-565
tcaggactcctcgcctggctcggaagggtctcactctgtcacccaggctggagtgcagtggcgcaatctcagttcactgcaaccttcgcctcccagactcaagcaatctcacctcagccctccaagtagctgggactacaggttttgtagtgcatccctgagcatgagcacagaatgaagcggcgtttggatgaccaggagtcaccggtgtatgcagcccagcagcgtcggatccctggcagcacagaggcttttcctcaccagcaccgggtgcttgcccctgcccctcctgtgtatgaagcagtgtctgagaccatgcagtcagctacgggaattcagtactctgtaacacccagctaccaggtttcagccatgccacagagctccggcagtcatgggcccgctatagcagcagttcatagcagccatcatcacccaacagcggtgcagccccacggaggccaggtggtccagagtcatgctcatccagccccaccagttgcaccagtgcagggacagcagcaatttcagaggctgaaggtggaggatgcgctatcttatcttg

SEQ ID NO: 181722 - DNA, 590 bp, Homo sapiens
  Payload ID: 15789
  Gene Symbol: SIN3A
  Gene Name: SIN3 transcription regulator family member A
  ENST ID: ENST00000562776
  CDS Start-End: 165-590
aaagagcccctgcgcctcgccgctagccctgcgagctgccgggtctccaaactccctggccgtggcggtcgagtcagcattcggtgccggaacccgtcaggccgcgacccagcaaggagctcgcatcggtggttttgtagtgcatccctgagcatgagcacagaatgaagcggcgtttggatgaccaggagtcaccggtgtatgcagcccagcagcgtcggatccctggcagcacagaggcttttcctcaccagcaccgggtgcttgcccctgcccctcctgtgtatgaagcagtgtctgagaccatgcagtcagctacgggaattcagtactctgtaacacccagctaccaggtttcagccatgccacagagctccggcagtcatgggcccgctatagcagcagttcatagcagccatcatcacccaacagcggtgcagccccacggaggccaggtggtccagagtcatgctcatccagccccaccagttgcaccagtgcagggacagcagcaatttcagaggctgaaggtggaggatgcgctatcttatcttgaccaggtgaagctgcagtttggtagtcagcctcag

SEQ ID NO: 181723 - DNA, 617 bp, Homo sapiens
  Payload ID: 15789
  Gene Symbol: SIN3A
  Gene Name: SIN3 transcription regulator family member A
  ENST ID: ENST00000564778
  CDS Start-End: 89-617
aatagcccgtggggggcgttcccccccattcaggactcctcgcctggctcggaaggttttgtagtgcatccctgagcatgagcacagaatgaagcggcgtttggatgaccaggagtcaccggtgtatgcagcccagcagcgtcggatccctggcagcacagaggcttttcctcaccagcaccgggtgcttgcccctgcccctcctgtgtatgaagcagtgtctgagaccatgcagtcagctacgggaattcagtactctgtaacacccagctaccaggtttcagccatgccacagagctccggcagtcatgggcccgctatagcagcagttcatagcagccatcatcacccaacagcggtgcagccccacggaggccaggtggtccagagtcatgctcatccagccccaccagttgcaccagtgcagggacagcagcaatttcagaggctgaaggtggaggatgcgctatcttatcttgaccaggtgaagctgcagtttggtagtcagcctcaggtctacaatgatttccttgacatcatgaaggaatttaaatctcagagcatcgacaccccaggagtgattagtcgtgtgtcccagctattcaaaggccaccccg

SEQ ID NO: 181724 - DNA, 549 bp, Homo sapiens
  Payload ID: 15789
  Gene Symbol: SIN3A
  Gene Name: SIN3 transcription regulator family member A
  ENST ID: ENST00000568309
  CDS Start-End: 229-549
attcaggactcctcgcctggctcggaagctacccagccttcatgctgttttggaacatgtcaagcacatgtgagccctcacaaagacatgagggtctttgcggttgctgtcccctctgcctagaaggcttcctccactaatttctgcatgactagctccctcacttcctttactcagaagttaccttatcagtaggttttgtagtgcatccctgagcatgagcacagaatgaagcggcgtttggatgaccaggagtcaccggtgtatgcagcccagcagcgtcggatccctggcagcacagaggcttttcctcaccagcaccgggtgcttgcccctgcccctcctgtgtatgaagcagtgtctgagaccatgcagtcagctacgggaattcagtactctgtaacacccagctaccaggtttcagccatgccacagagctccggcagtcatgggcccgctatagcagcagttcatagcagccatcatcacccaacagcggtgcagccccacggaggccaggtggtccagagtcatgctcatccagcccca

SEQ ID NO: 181725 - DNA, 554 bp, Homo sapiens
  Payload ID: 15789
  Gene Symbol: SIN3A
  Gene Name: SIN3 transcription regulator family member A
  ENST ID: ENST00000570115
  CDS Start-End: 185-554
tagcccgtggggggcgttcccccccattcaggactcctcgcctggctcggaaggctcgagtgcagtagcgagatctcagctcacctcagcctctgtctcctggactcacatgatcctcccacgtcagcctcctaaatagctgggattacaggttttgtagtgcatccctgagcatgagcacagaatgaagcggcgtttggatgaccaggagtcaccggtgtatgcagcccagcagcgtcggatccctggcagcacagaggcttttcctcaccagcaccgggtgcttgcccctgcccctcctgtgtatgaagcagtgtctgagaccatgcagtcagctacgggaattcagtactctgtaacacccagctaccaggtttcagccatgccacagagctccggcagtcatgggcccgctatagcagcagttcatagcagccatcatcacccaacagcggtgcagccccacggaggccaggtggtccagagtcatgctcatccagccccaccagttgcaccagtgcagggacagcagcaatttcagaggctgaaggtgg

SEQ ID NO: 181726 - DNA, 4078 bp, Homo sapiens
  Payload ID: 15789
  Gene Symbol: SIN3A
  Gene Name: SIN3 transcription regulator family member A
  ENST ID: ENST00000567289
  CDS Start-End: 276-746
ggcggcggagacggtttctccatcttcccccctccccttcccccctcggagtttccctccctccctccctccctccttcccagtctgggcaccggagcctgtgaccgcttcgttagtggagaggtagctggcagtccgcttcggcgggcctgtgccccgcgccgttctcggggcctccctgctgagctcgcggctcacgctgagagggacacgcagtgacgagcggccgaagcagctttgcggttttgtagtgcatccctgagcatgagcacagaatgaagcggcgtttggatgaccaggagtcaccggtgtatgcagcccagcagcgtcggatccctggcagcacagaggcttttcctcaccagcaccgggtgcttgcccctgcccctcctgtgtatgaagcagtgtctgagaccatgcagtcagctacgggaattcagtactctgtaacacccagctaccaggtttcagccatgccacagagctccggcagtcatgggcccgctatagcagcagttcatagcagccatcatcacccaacagcggtgcagccccacggaggccaggtggtccagagtcatgctcatccagccccaccagttgcaccagtgcagggacagcagcaatttcagaggctgaaggtggtattcagctctttttcttgggtcaaaaaatttatctttagcaggaaatactggttgcagcttgttggttgtggtggtacaacttctaacctgagatactagctgtcgaatcacaagttttaccgtttttgttttgtgaaatttgcttatgtttcctatcttggcatcagtgcctgatccagagaagaatatactcaaatgtttgtggactgtatgaatgcatgtcggtcaaatgttatcaggattgtggggccattttaatacaaaataaaccttaaaattcattttttggctgcttccttttgaactctctattgagcacatatatgattggctacaggttagtacagtaaattggcccagtaatatatcttacagttcaatctttttaaattcttaaaaatttttttttttagtttttagtttcagagatgggagtctcactgtgttccccaggctggtctcaaactgctggcctcaagtgattctcccatcttggccttcgaaagtgttgggattacaggtgcgagccactatgcccagctcatgcctgtaatgttcttattacctttatctttttattcctgtttatgaatagctgaattgactcacatcatcaagtccattcttagtaaaacacatgctcctttttggggggaatctttataaagttcagggaaaactgtaactgtgaatgaattatcagtgttttcatattttctgctgagtatgtgtggtacgttttcagtgctttgaaattcatgaggcatccctggagaagtgaagcttgtgttcccagctaaccttgtatctctgaccacttgaatgttacttttcaaaatatgtgattgttgcagcaagtgttcaggtttcaatttttctaattttacgtttatataaaattaagttcaggaaataataaatggaggaactctgaagagatgttaaatcttcatttggttattgcaacctacttatgttgcttgcaggcacgaatgagaaataaaccctctaaggacatatccatatgcagcaaatagttgtttcttctgttttccctgatacttactttagttcttcttgatccctgccctcgttggtgtggattcttgggaacttgtttaatattggcctaagagtattaaatgctacataaatattataaagtacagcaaagctatgtgatttagagtaattttgtaaaatttactctctatattggcttacatagtattgactaatgcatagccttttaaagagagtacaggttttttaggcctgaagcttcactctggattctgtctttgggaaaatgtgtataaggaatattgatgtttcctttaaaacattttcagtctgttgtagagtgatggctgtgtaccaaaatgtattattgctgcgggcttagcactttactaagtcctgaaaatattttttttaaaacttggttgtgcgtgatttaattctgtattaacactgtatattcagtagttatactttaatgttgcaaaatagcttataaacttgcttattaaactaacaaaaacatatgtatttctatagcctttttcaatcaaccctatcaaagcacaacaccagtttttacccaccttcctcacaggactctttggtataagtatatggattatgttttgtttgctttatggaaactggcaaggaaacaaggaaaggttttggatttggggttatagagtgagtcatagatagagttaggatttcttgttgtgttcttttagtcacaagctcttgactatattcctgcataaaataacttgttgaatttcctttctgatgaggagaggtaaaatgcttcttgtacctccatgtaatttaactcagtattcccacattgcctgtcatttttggatcagtcttaaaatgcattacaagcatttgaatcaacttcaataaatcatttatattctataataatgtaggccgggcatggtggcttacacctgtaatcccagcactttgggaggccgaggtgggtggatcacctgaggtcaggagttcaagaccagcctgacaaatgtgatgaaaccatgcctctactaaaaatacaaaatgagccaggcatggtggcgcatgcctgtaataatcccagctactcaggaggctgaggcaggagaatcgttggaacccaggaggcagagattgcagtaagccaagatcataccactgcactcgagtctgggcgacaagagtgaaactccgtctcagaaaaaacaaacaaaaaaaaagaaatgttcagtgagaatgcttacacattatttcaagcctcaacattgtcttttttttttgttttttgtctttggtagattggtggtgacaagaagggatttgaacgatttgaggcatgtttggtgttatttagttattgaatgtcagcagcagtgatatttggtacatatttagcaggttatctttacagttgcttgtgtttttctctcccaacaagattgtagacttcaggagattcggggccttaatagtaaatccctgttgaagtgagctaagaaactttatcagcagagtctaagggtctccccaagtgcttccttaaatctgtagcttctaaataactacatccaagttttttttttaagttgtgctacctagaactgtatacatgcatttatagagagtttatataagagttggactatgctttaggtgatgagagaatttcctcactatttttacatgtaggtgtcttatttattatgtgagtgtcatgcagagtttttaaagcataggattattctataacttttattttacttttttgtttttttgagacagagtctcactctgctgcccaggctgtagtgcagtggcgccatctcaactcactgcaccctcccctgcctgggttcaagtgattcttatgcctcagtctcccaaatagctgggattacaggcatgcaccaccaagcctaatttttgtatttttttttttttttactaggacggggtttttccatgttagccaggctgctctcaaactcctggcctcaagggatccaccctccttggcctcccagagtactaggattacaggcatgagccaccacacctggcctataactaatttttaaacagtggtttgcttggtttgctgtgactttcagtacctttttgtttcagacatatacatatcacacataattgctttcttttgggtttctgtactttttccgtctctgcagtagttaccttataccataccatgtcttattgataactgttcttttgttgtgtaatgatgcatgctattcttaaatatcttccaaagtcttggttccttttgcaaacttaatatattttgtgttcacttaagttggtcattaatgaaacattttagtatggaaagttcagaatatgaattaaaatagtccattgaatttcaa

SEQ ID NO: 181727 - DNA, 567 bp, Homo sapiens
  Payload ID: 15789
  Gene Symbol: SIN3A
  Gene Name: SIN3 transcription regulator family member A
  ENST ID: ENST00000568190
  CDS Start-End: 274-567
attcaggactcctcgcctggctcggaagacgaagtctcgctctgtcaccaggctggagtgcagtggcatgatcacagctcactgcagtgttgatcttctggacttaagcgaccctcctaccttagcctcccatgtagctgggactacagggctaggcttgctgacatatgggctattggaggatatgcaggtccacatcctttatttgcagttctgaaatgcaagagtttttgttttttggttttgtagtgcatccctgagcatgagcacagaatgaagcggcgtttggatgaccaggagtcaccggtgtatgcagcccagcagcgtcggatccctggcagcacagaggcttttcctcaccagcaccgggtgcttgcccctgcccctcctgtgtatgaagcagtgtctgagaccatgcagtcagctacgggaattcagtactctgtaacacccagctaccaggtttcagccatgccacagagctccggcagtcatgggcccgctatagcagcagttcatagcagccatcatcacccaacagcggtgcagccccacggaggccaggtg

SEQ ID NO: 181728 - DNA, 5037 bp, Homo sapiens
  Payload ID: 15790
  Gene Symbol: SIN3B
  Gene Name: SIN3 transcription regulator family member B
  Uniprot ID: O75182
  ENST ID: ENST00000248054
  CDS Start-End: 22-3414
ggcgcagctccgacttcggacatggcgcacgctggcggtggcagcggtggcagcggtgccggcggccccgcgggccgggggctgagcggcgcccgctggggtcgctcgggctccgcaggccacgagaagctgccggtgcacgtagaagacgccctcacctatctggaccaggtgaagatccgctttggcagcgaccctgccacctacaacggcttcctggagatcatgaaggagttcaaaagccagagcatcgatactcctggagtcatcagacgtgtctcgcagctcttccacgagcaccctgacctcattgttggattcaacgcttttcttcccctcggatatagaatagacattcccaagaatggcaagttaaacatacagtcgcctctgacaagccaggagaattcgcacaaccacggggacggtgcagaggacttcaagcagcaggtgccgtataaagaggacaaaccccaggtgcccctggagtccgattccgtggaattcaacaacgccatcagctatgtgaataagattaaaacccgcttcctagaccacccagaaatctacaggtcattcctggagatcctgcacacgtaccagaaggagcagctgaacacgaggggccggccattccgaggcatgtctgaagaggaggtgttcaccgaggtggccaacctcttccggggccaggaggacctgctctcagagtttggacagttcctgcccgaagccaagcggtctctgttcacaggaaacgggccgtgcgagatgcacagcgtgcagaagaacgagcacgacaagaccccggagcacagcaggaagcgctcccggccctcgctcctccgccccgtgtctgcacccgccaagaaaaaaatgaaacttcgtggtaccaaagacctgtccatcgctgcagtggggaagtacgggactctgcaggaattttctttctttgacaaggtccgccgggtgctgaagagccaggaggtgtatgaaaacttcctccgctgcatcgcactcttcaaccaggagctggtgtctggctctgagctcctgcagctcgtcagcccatttctggggaaatttccagaactctttgcacagttcaagtccttcctgggggtaaaagagctgtccttcgcgccacccatgagcgacagatccggggacgggataagccgggaaattgattatgcatcctgcaagcgcataggatccagctaccgggcactccccaaaacctaccagcagcccaagtgcagtgggaggacagccatctgcaaggaggtactgaacgacacctgggtctccttcccttcctggtctgaggactccacgttcgtcagctccaagaagacaccgtacgaggagcagcttcaccgctgtgaggacgagcgcttcgagttagacgttgtcctggagacgaacctggccacaatccgtgtgttggaaagtgtgcagaagaagctgtctcggatggcgccggaagaccaggagaagttccggctggacgactccctgggaggcacgtcggaggtgatccagcgccgtgccatttatcgcatctatggcgacaaggccccggagatcatcgagagcctcaagaagaaccctgtcaccgctgtccccgttgtcctgaaaagactgaaggccaaggaagaggagtggcgggaggcccagcagggcttcaacaagatctggcgggagcagtatgagaaggcgtacctcaagtcccttgaccaccaggctgtgaacttcaagcagaacgacaccaaggccctgcgctccaagagcttgctcaacgagatcgagagcgtctacgacgagcaccaggagcagcactcggagggccgcagtgccccctctagcgagccgcacctcatctttgtgtacgaggaccggcagatcctggaggacgcagcagcgctcatcagctactacgtgaagcggcagccggccatccagaaggaggaccagggcaccatccaccagctgctgcaccagttcgtgcccagcctcttcttctctcagcagctggacctgggcgcctccgaggagtcagctgatgaggaccgggacagcccccaggggcagaccacagaccccagtgagcggaagaagccggcgccaggaccccacagtagccccccagaggagaagggggccttcggggatgccccggccactgagcagccacccctgccgcccccagccccgcacaagcccctggacgatgtctacagcctattttttgccaacaacaactggtacttcttcctgcgcctgcaccagaccctgtgctccaggctgctgaagatctaccgccaggcgcagaagcagcttctggagtatcggaccgagaaggagcgggagaagctgctgtgtgagggccgcagggagaagggcagcgaccccgccatggagctgcggctgaagcagcccagtgaagtggagctggaggagtactacccggccttcctggacatggtgcggagcctgctggagggcagcatcgaccccacgcagtacgaggacaccctacgcgagatgttcaccatccatgcctacgtgggcttcaccatggacaagctggtgcagaacattgcgcggcagctgcaccacctcgtgagcgatgacgtctgcctgaaggtggtggagctctacctgaacgagaagaagcggggtgccgctggtgggaacctgtcctcccgctgcgtccgcgctgctagggagaccagctaccagtggaaggctgagcgctgcatggccgacgagaactgcttcaaggtgatgttcctgcagcgcaaagggcaggtgatcatgaccatcgagctcctggacaccgaggaggcccagacggaggaccctgtggaggtccagcacctggctcggtacgtggagcagtatgtggggaccgagggcgcgtccagctcgcccactgagggcttcctcctgaaacctgtgttcctgcagaggaacctcaagaagttccgccgccggtggcagagcgagcaggcgcgggccctgcgcggtgaggccaggagctcctggaagcggctggtgggcgtggagagcgcctgcgacgtggactgccgcttcaagctcagcactcacaagatggtgttcatcgtgaactccgaggactacatgtaccgtcgcgggaccctctgccgggccaagcaggtgcagcccctggtcctgctccgccaccaccagcactttgaggagtggcacagccgctggctggaggacaatgtgacggtggaggcggctagcctggtgcaggactggctgatgggtgaggaggacgaggacatggtaccctgcaagacgctgtgtgagacagtgcacgtgcacggcctgcccgtgacccgctaccgcgtgcagtacagccgccgcccggcctcgccctgacccgccctcatgggcaccgggcaggcgcctcacagagcacagacgtgccctcggccttggtcgtgtcggggccgttttcttgaacgacgtgagaggcatctcccagcccctctgctgccggacagcgcactccagggcaggacgccgcccccgtggctcccggtctcctgtgggcctgctgtgtgccaaacctgagctacctgcacccgagccctggggctcagccccaccacaggggcgggtggacgtgctggccgaggaacaagcaatcatgtttgcgtccccgtccgtcacatgtgccaaatccctggcaggcagatggctcctgccccatattcttgccgtgtcttggaaaagtcacaggtgacagccctcctgaggcccacactttggagggggtccatgtccaagagaccctgacaaggaaggagttgagccctgggtaggcttgcttgaaaagtgagtccttccagaatattctcagagctgccagaaacatcatctgagggtttgggcatcagctctgcctggctggtgttcaggccctcagtcactttggaagtgagaagaacccttcagccaaacctttgggatcccattttgaagtccagagctggagcaggcgggcagtgccctgggagaccccgctctggataagacacccaaccccaactccagcagctggactctgggcccacaaggggagggaccccagccagtattccctcagagccggcacgaccctgctgtggggcggcgggcccagtcgtgttcctgcagtgggcaccctaggcgtatgtgtatacacgcacagatatttattcctttcgcttttagtggttgttatttctgtagcagccaagtcctgcggctccctggggctgagatctccctttgtggaactccgagagccgccctgacagtcccagccgccacccaaggagccccatccgcccacccaccctgggacccacgcggccactccagggatcattgttgtccttttgtgaggggctgaggcgactgtcccatggaggcatccaaggctttctgtgccaagaatcccaagtgactggggctggggaccacttctccaggcctctctccccgaccatgagagcccctggccctggcccctgcacaccagtaggcccagaataaccgccacccttgccatcctgcaacagctggactcaagtttccaggaagtggagatgtgtttctagaagtttcctgtggaacctggaggctcctgatgcctttgactccaggctgggcgattccgatgctgacccgtcctcctgggctccccacccccgctccccaagtgtcacacaggcactttgtacacatcctggttttctaagaagggaacttgccatcaagattcctgtaccaggcccacggccgtctcgggcagagccacctgggccccgggtgcagccggagaccccgccgagcccctcctcccagtattcccatccccgcatgcttctagggagcgcctcttttccgttcttgaggaatttctgttctggggcttgtccttcctttgcagctgttttgaatgtagttttccttttctatttatttgcacattaaagttaataattgaatattgac

SEQ ID NO: 181729 - DNA, 5129 bp, Homo sapiens
  Payload ID: 15790
  Gene Symbol: SIN3B
  Gene Name: SIN3 transcription regulator family member B
  Uniprot ID: O75182
  ENST ID: ENST00000379803
  CDS Start-End: 15-3503
ctccgacttcggacatggcgcacgctggcggtggcagcggtggcagcggtgccggcggccccgcgggccgggggctgagcggcgcccgctggggtcgctcgggctccgcaggccacgagaagctgccggtgcacgtagaagacgccctcacctatctggaccaggtgaagatccgctttggcagcgaccctgccacctacaacggcttcctggagatcatgaaggagttcaaaagccagagcatcgatactcctggagtcatcagacgtgtctcgcagctcttccacgagcaccctgacctcattgttggattcaacgcttttcttcccctcggatatagaatagacattcccaagaatggcaagttaaacatacagtcgcctctgacaagccaggagaattcgcacaaccacggggacggtgcagaggacttcaagcagcaggtgccgtataaagaggacaaaccccaggtgcccctggagtccgattccgtggaattcaacaacgccatcagctatgtgaataagattaaaacccgcttcctagaccacccagaaatctacaggtcattcctggagatcctgcacacgtaccagaaggagcagctgaacacgaggggccggccattccgaggcatgtctgaagaggaggtgttcaccgaggtggccaacctcttccggggccaggaggacctgctctcagagtttggacagttcctgcccgaagccaagcggtctctgttcacaggaaacgggccgtgcgagatgcacagcgtgcagaagaacgagcacgacaagaccccggagcacagcaggaagcgctcccggccctcgctcctccgccccgtgtctgcacccgccaagaaaaaaatgaaacttcgtggtaccaaagacctgtccatcgctgcagtggggaagtacgggactctgcaggaattttctttctttgacaaggtccgccgggtgctgaagagccaggaggtgtatgaaaacttcctccgctgcatcgcactcttcaaccaggagctggtgtctggctctgagctcctgcagctcgtcagcccatttctggggaaatttccagaactctttgcacagttcaagtccttcctgggggtaaaagagctgtccttcgcgccacccatgagcgacagatccggggacgggataagccgggaaattgattatgcatcctgcaagcgcataggatccagctaccgggcactccccaaaacctaccagcagcccaagtgcagtgggaggacagccatctgcaaggagcttgaccattggacacttctccagggttcgtggacagacgattactgcatgtccaagttcaagaatacctgctggattccaggatatagtgcaggggtactgaacgacacctgggtctccttcccttcctggtctgaggactccacgttcgtcagctccaagaagacaccgtacgaggagcagcttcaccgctgtgaggacgagcgcttcgagttagacgttgtcctggagacgaacctggccacaatccgtgtgttggaaagtgtgcagaagaagctgtctcggatggcgccggaagaccaggagaagttccggctggacgactccctgggaggcacgtcggaggtgatccagcgccgtgccatttatcgcatctatggcgacaaggccccggagatcatcgagagcctcaagaagaaccctgtcaccgctgtccccgttgtcctgaaaagactgaaggccaaggaagaggagtggcgggaggcccagcagggcttcaacaagatctggcgggagcagtatgagaaggcgtacctcaagtcccttgaccaccaggctgtgaacttcaagcagaacgacaccaaggccctgcgctccaagagcttgctcaacgagatcgagagcgtctacgacgagcaccaggagcagcactcggagggccgcagtgccccctctagcgagccgcacctcatctttgtgtacgaggaccggcagatcctggaggacgcagcagcgctcatcagctactacgtgaagcggcagccggccatccagaaggaggaccagggcaccatccaccagctgctgcaccagttcgtgcccagcctcttcttctctcagcagctggacctgggcgcctccgaggagtcagctgatgaggaccgggacagcccccaggggcagaccacagaccccagtgagcggaagaagccggcgccaggaccccacagtagccccccagaggagaagggggccttcggggatgccccggccactgagcagccacccctgccgcccccagccccgcacaagcccctggacgatgtctacagcctattttttgccaacaacaactggtacttcttcctgcgcctgcaccagaccctgtgctccaggctgctgaagatctaccgccaggcgcagaagcagcttctggagtatcggaccgagaaggagcgggagaagctgctgtgtgagggccgcagggagaagggcagcgaccccgccatggagctgcggctgaagcagcccagtgaagtggagctggaggagtactacccggccttcctggacatggtgcggagcctgctggagggcagcatcgaccccacgcagtacgaggacaccctacgcgagatgttcaccatccatgcctacgtgggcttcaccatggacaagctggtgcagaacattgcgcggcagctgcaccacctcgtgagcgatgacgtctgcctgaaggtggtggagctctacctgaacgagaagaagcggggtgccgctggtgggaacctgtcctcccgctgcgtccgcgctgctagggagaccagctaccagtggaaggctgagcgctgcatggccgacgagaactgcttcaaggtgatgttcctgcagcgcaaagggcaggtgatcatgaccatcgagctcctggacaccgaggaggcccagacggaggaccctgtggaggtccagcacctggctcggtacgtggagcagtatgtggggaccgagggcgcgtccagctcgcccactgagggcttcctcctgaaacctgtgttcctgcagaggaacctcaagaagttccgccgccggtggcagagcgagcaggcgcgggccctgcgcggtgaggccaggagctcctggaagcggctggtgggcgtggagagcgcctgcgacgtggactgccgcttcaagctcagcactcacaagatggtgttcatcgtgaactccgaggactacatgtaccgtcgcgggaccctctgccgggccaagcaggtgcagcccctggtcctgctccgccaccaccagcactttgaggagtggcacagccgctggctggaggacaatgtgacggtggaggcggctagcctggtgcaggactggctgatgggtgaggaggacgaggacatggtaccctgcaagacgctgtgtgagacagtgcacgtgcacggcctgcccgtgacccgctaccgcgtgcagtacagccgccgcccggcctcgccctgacccgccctcatgggcaccgggcaggcgcctcacagagcacagacgtgccctcggccttggtcgtgtcggggccgttttcttgaacgacgtgagaggcatctcccagcccctctgctgccggacagcgcactccagggcaggacgccgcccccgtggctcccggtctcctgtgggcctgctgtgtgccaaacctgagctacctgcacccgagccctggggctcagccccaccacaggggcgggtggacgtgctggccgaggaacaagcaatcatgtttgcgtccccgtccgtcacatgtgccaaatccctggcaggcagatggctcctgccccatattcttgccgtgtcttggaaaagtcacaggtgacagccctcctgaggcccacactttggagggggtccatgtccaagagaccctgacaaggaaggagttgagccctgggtaggcttgcttgaaaagtgagtccttccagaatattctcagagctgccagaaacatcatctgagggtttgggcatcagctctgcctggctggtgttcaggccctcagtcactttggaagtgagaagaacccttcagccaaacctttgggatcccattttgaagtccagagctggagcaggcgggcagtgccctgggagaccccgctctggataagacacccaaccccaactccagcagctggactctgggcccacaaggggagggaccccagccagtattccctcagagccggcacgaccctgctgtggggcggcgggcccagtcgtgttcctgcagtgggcaccctaggcgtatgtgtatacacgcacagatatttattcctttcgcttttagtggttgttatttctgtagcagccaagtcctgcggctccctggggctgagatctccctttgtggaactccgagagccgccctgacagtcccagccgccacccaaggagccccatccgcccacccaccctgggacccacgcggccactccagggatcattgttgtccttttgtgaggggctgaggcgactgtcccatggaggcatccaaggctttctgtgccaagaatcccaagtgactggggctggggaccacttctccaggcctctctccccgaccatgagagcccctggccctggcccctgcacaccagtaggcccagaataaccgccacccttgccatcctgcaacagctggactcaagtttccaggaagtggagatgtgtttctagaagtttcctgtggaacctggaggctcctgatgcctttgactccaggctgggcgattccgatgctgacccgtcctcctgggctccccacccccgctccccaagtgtcacacaggcactttgtacacatcctggttttctaagaagggaacttgccatcaagattcctgtaccaggcccacggccgtctcgggcagagccacctgggccccgggtgcagccggagaccccgccgagcccctcctcccagtattcccatccccgcatgcttctagggagcgcctcttttccgttcttgaggaatttctgttctggggcttgtccttcctttgcagctgttttgaatgtagttttccttttctatttatttgcacattaaagttaataattgaatattgacatc

SEQ ID NO: 181730 - DNA, 2767 bp, Homo sapiens
  Payload ID: 15790
  Gene Symbol: SIN3B
  Gene Name: SIN3 transcription regulator family member B
  ENST ID: ENST00000595541
  CDS Start-End: 371-2533
ccaaaaaatgacaatacagcaataaagcgtaatccacattttaagaatgcagtgtaacaatgatctacacagcatttacattgcattaggtataagtattctagagatgattttgcataggatatatgcaaataggattccattggacatcagggacttgagtatctgtggatttgggtcttcaggggtggttctggaaccaatctcccaggataccaagggagtgtccacttgaccaaagtcatgtttttccttaaaaactttatgcaccttcccatttgtataaggcagttggtattatgtatcaggatggtattatgtatcttggtactttctacactggctaacagtaaatcttggctcctggggcatgcagcgtcattcacggcatttcctcttggtgcaggtactgaacgacacctgggtctccttcccttcctggtctgaggactccacgttcgtcagctccaagaagacaccgtacgaggagcagcttcaccgctgtgaggacgagcgcttcgagttagacgttgtcctggagacgaacctggccacaatccgtgtgttggaaagtgtgcagaagaagctgtctcggatggcgccggaagaccaggagaagttccggctggacgactccctgggaggcacgtcggaggtgatccagcgccgtgccatttatcgcatctatggcgacaaggccccggagatcatcgagagcctcaagaagaaccctgtcaccgctgtccccgttgtcctgaaaagactgaaggccaaggaagaggagtggcgggaggcccagcagggcttcaacaagatctggcgggagcagtatgagaaggcgtacctcaagtcccttgaccaccaggctgtgaacttcaagcagaacgacaccaaggccctgcgctccaagagcttgctcaacgagatcgagagcgtctacgacgagcaccaggagcagcactcggagggccgcagtgccccctctagcgagccgcacctcatctttgtgtacgaggaccggcagatcctggaggacgcagcagcgctcatcagctactacgtgaagcggcagccggccatccagaaggaggaccagggcaccatccaccagctgctgcaccagttcgtgcccagcctcttcttctctcagcagctggacctgggcgcctccgaggagtcagctgatgaggaccgggacagcccccaggggcagaccacagaccccagtgagcggaagaagccggcgccaggaccccacagtagccccccagaggagaagggggccttcggggatgccccggccactgagcagccacccctgccgcccccagccccgcacaagcccctggacgatgtctacagcctattttttgccaacaacaactggtacttcttcctgcgcctgcaccagaccctgtgctccaggctgctgaagatctaccgccaggcgcagaagcagcttctggagtatcggaccgagaaggagcgggagaagctgctgtgtgagggccgcagggagaagggcagcgaccccgccatggagctgcggctgaagcagcccagtgaagtggagctggaggagtactacccggccttcctggacatggtgcggagcctgctggagggcagcatcgaccccacgcagtacgaggacaccctacgcgagatgttcaccatccatgcctacgtgggcttcaccatggacaagctggtgcagaacattgcgcggcagctgcaccacctcgtgagcgatgacgtctgcctgaaggtggtggagctctacctgaacgagaagaagcggggtgccgctggtgggaacctgtcctcccgctgcgtccgcgctgctagggagaccagctaccagtggaaggctgagcgctgcatggccgacgagaactgcttcaaggtgatgttcctgcagcgcaaagggcaggtgatcatgaccatcgagctcctggacaccgaggaggcccagacggaggaccctgtggaggtccagcacctggctcggtacgtggagcagtatgtggggaccgagggcgcgtccagctcgcccactgagggcttcctcctgaaacctgtgttcctgcagaggaacctcaagaagttccgccgccggtggcagagcgagcaggcgcgggccctgcgcggtgaggccaggagctcctggaagcggctggtgggcgtggagagcgcctgcgacgtggactgccgcttcaagctcagcactcacaagatggtgttcatcgtgaactccgaggactacatgtaccgtcgcgggaccctctgccgggccaagcaggtgcagcccctggtcctgctccgccaccaccagcactttgaggagtggcacagccgctggctggaggacaatgtgacggtggaggcggctagcctggtgcaggactggctgatgggtgaggaggacgaggacatggtaccctgcaagacgctgtgtgagacagtgcacgtgcacggcctgcccgtgacccgctaccgcgtgcagtacagccgccgcccggcctcgccctgacccgccctcatgggcaccgggcaggcgcctcacagagcacagacgtgccctcggccttggtcgtgtcggggccgttttcttgaacgacgtgagaggcatctcccagcccctctgctgccggacagcgcactccagggcaggacgccgcccccgtggctcccggtctcctgtgggcctgctgtgtgccaaacctgagctacctgcacccgagccctggggctcagccccaccaca

SEQ ID NO: 181731 - DNA, 1104 bp, Homo sapiens
  Payload ID: 15790
  Gene Symbol: SIN3B
  Gene Name: SIN3 transcription regulator family member B
  ENST ID: ENST00000596638
  CDS Start-End: 1-929
tcctgcacacgtaccagaaggagcagctgaacacgaggggccggccattccgaggcatgtctgaagaggaggtgttcaccgaggtggccaacctcttccggggccaggaggacctgctctcagagtttggacagttcctgcccgaagccaagcggtctctgttcacaggaaacgggccgtgcgagatgcacagcgtgcagaagaacgagcacgacaagaccccggagcacagcaggaagcgctcccggccctcgctcctccgccccgtgtctgcacccgccaagaaaaaaatgaaacttcgtggtaccaaagacctgtccatcgctgcagtggggaagtacgggactctgcaggaattttctttctttgacaaggtccgccgggtgctgaagagccaggaggtgtatgaaaacttcctccgctgcatcgcactcttcaaccaggagctggtgtctggctctgagctcctgcagctcgtcagcccatttctggggaaatttccagaactctttgcacagttcaagtccttcctgggggtaaaagagctgtccttcgcgccacccatgagcgacagatccggggacgggataagccgggaaattgattatgcatcctgcaagcgcataggatccagctaccgggcactccccaaaacctaccagcagcccaagtgcagtgggaggacagccatctgcaaggagcttgaccattggacacttctccagggttcgtggacagacgattactgcatgtccaagttcaagaatacctgctggattccaggatatagtgcaggggtcagcaaactctggcccacgggccctggcccgctgcccgtgtttgtaaataaagttttactgtcacacagacacaaccattcctttacatattgcctgtggctgcttttctcaccacaaaggcagagttgagtattcatctgggatggcctgcaaaatctgagatggttgctgtctgaccctttgcagagagaatttaccaatgtctgaaatgaaatcggccctccggatctgcaagttcctcatctgtggtttcaactaaccatggattgaaaatacgtggggaaagagaaaccaaaaaatgaca

SEQ ID NO: 181732 - DNA, 2556 bp, Homo sapiens
  Payload ID: 15790
  Gene Symbol: SIN3B
  Gene Name: SIN3 transcription regulator family member B
  Uniprot ID: O75182
  ENST ID: ENST00000596802
  CDS Start-End: 15-1076
ctccgacttcggacatggcgcacgctggcggtggcagcggtggcagcggtgccggcggccccgcgggccgggggctgagcggcgcccgctggggtcgctcgggctccgcaggccacgagaagctgccggtgcacgtagaagacgccctcacctatctggaccaggtgaagatccgctttggcagcgaccctgccacctacaacggcttcctggagatcatgaaggagttcaaaagccagagcatcgatactcctggagtcatcagacgtgtctcgcagctcttccacgagcaccctgacctcattgttggattcaacgcttttcttcccctcggatatagaatagacattcccaagaatggcaagttaaacatacagtcgcctctgacaagccaggagaattcgcacaaccacggggacggtgcagaggacttcaagcagcaggtgccgtataaagaggacaaaccccaggtgcccctggagtccgattccgtggaattcaacaacgccatcagctatgtgaataagattaaaacccgcttcctagaccacccagaaatctacaggtcattcctggagatcctgcacacgtaccagaaggagcagctgaacacgaggggccggccattccgaggcatgtctgaagaggaggtgttcaccgaggtggccaacctcttccggggccaggaggacctgctctcagagtttggacagttcctgcccgaagccaagcggtctctgttcacaggaaacgggccgtgcgagatgcacagcgtgcagaagaacgagcacgacaagaccccggagcacagcaggaagcgctcccggccctcgctcctccgccccgtgtctgcacccgccaagaaaaaaatgaaacttcgtggtaccaaagacctgtccatcgctgcagtggggaagtacgggactctgcaggaattttctttctttgacaaggtccgccgggtgctgaagagccaggaggtgtatgaaaacttcctccgctgcatcgcactcttcaaccaggagctggtgtctggctctgagctcctgcagctcgtcagcccatttctggggtgagcagctgacttcccagggctccctaggggggttctgttcctgtcaactccatctacttggtttttagttactgtttttgagcaatgattgtgcttttctaaaatcctgtttattaattgacgtgattgatataattattgattcccatgcatttgtaaggagcaatacaccacctgggtaccctccagctggttcctttaccagtaacatctgtagtcagtatcctcaccagaatacagtgggtcctcgagtaatgccttttcatttaacactgttttaacaccgatgagaaaagaagacattcatttctggtctgagtggagtttgcacgttctccccatgtctgcgtggattttctcccacatcccaaagatgtgcatgttaggttaagtctaggttaagcggtgagtctccgtggtcccagcctgagtgagtgtggcggggtgagcgccctgcagtggggtggcgtcctgtccagggtgggtgccccactggtgctctgagctgctgggatagggtccggccacccaagatcctgaactggaataattgggtaaattgttattttacttgtttttactcatctttcttatctgtatgtgtggcttgcatttatttcagtgtttaatattagaagtgttttggtctctctttagaaatttggtgattgttttgtgaccaaaaatacgccgtaggaacgtcattcttgtttatgtgtcaattagcttgtggcaaaattggttttgttacacatcttttcaacttaaagacacagctttctaacacctgttgatgatgttgagtgaggacttactgtactgactctcacacaacccccgttctttccagactctccgtgttcctcatacacgtctggtgtgtgtgtttttatacagctttctcactgtggagggttgtgcgtccgccacagtgaagatactgaacggctccaggactgtcaagttctggccttgaccttttatctccatcccaaaaccctgcctcagccggagtctgttccaaacccctggcaactacttatctgttctctagacaatgttacagtaatggaactgtacaggaggaaccctctgggagaaaccttcccccccccccccccagcaaaattccctggagattcacctgataaatacttttaaaaattctaacacttgggccgggtgcggtggctcgtgtgtaatcccagcactttgggaggccgaggtgagcagattgcctgaggtcaggagttggagacaagcctggccaacatggtggaactccatctctactaaaaatacaaaaattagccgggcgtggtggcaggcgcctgtaatcccagctacttgggaggctgaggcaggagaatcgcttgaacccaggaggcggaggttgcagtgagctgagatcacgccattgtactccagcctgggtggcgacaagagcaagactttgtctcaaaaacaaaacaaaacaaaaa

SEQ ID NO: 181733 - DNA, 4140 bp, Homo sapiens
  Payload ID: 15791
  Gene Symbol: SAP130
  Gene Name: Sin3A-associated protein, 130kDa
  ENST ID: ENST00000259234
  CDS Start-End: 188-3358
aatagacgggaggctcgttacggcggcggaagcagcggcgctggagtgaggggtggggggcagagtgctagctccccggcggtggctgcgggtccggagcctggggacgtcggccccacagacggagagcgcgcgggagcgagctcaaggcggcgcggcggccactgggcgcagcacccaggtggaaatgagttctcaacagtttcctcggttaggagccccttctaccgggctgagccaggccccttctcagattgcaaacagtggttctgctggattgataaacccagctgctacagtcaatgatgaatctggtcgagattctgaagtcagtgccagggagcacatgagttccagcagctccctccagtcccgggaggagaagcaagagcctgttgtggtaaggccctatccacaggtgcagatgttgtcgacacaccatgctgtcgcatcagccacacctgttgcagtgacagccccgccagcacacctgacgccagcagtgccactttcattttcggagggacttatgaagccgcccccgaagcccaccatgcctagccgtcccattgctcctgctccaccttctaccctgtcacttccccccaaggttccagggcaggttaccgttaccatggagagtagcatccctcaagcttcagccattcctgtggcaacaatcagtggacaacagggccatcccagtaacctgcatcacatcatgactacaaatgtgcaaatgtctatcatccgcagcaatgctcctgggccccctcttcacattggagcttctcatttacctcgaggtgcagctgctgctgctgtgatgtccagttctaaagtaaccacagtcctgaggccgacctcacagctgccaaatgctgctactgctcagccagcagtacagcacatcattcaccaaccaatccagtctcggccacctgtgaccacctccaatgccatccctcctgctgtggtagcaactgtctcagccaccagagctcagtctccagtcatcactacgacagcggcgcatgctactgattcagcacttagtaggccaaccttgtctatccagcatcctccatctgcagcaatcagtattcagcgtcctgcccagtcacgagatgtcacaacaagaatcacactaccatctcaccctgcattagggacgccaaaacagcagcttcatacaatggctcagaaaacaatcttcagtactggcacgccagtggctgcagccacagtagcacctattttggcaaccaacaccattccttcagcgaccacagctggatctgtgtcacacacgcaagctcccacaagtaccattgttaccatgacagtaccctcccattcctcccatgctactgctgtgaccacctcaaacatcccagtcgccaaggtggtgccccagcagatcacgcacacttctcctcggatccagccagactaccctgccgagaggagtagcctgattcccatctccggacatcgggcctctcccaatcctgtggccatggaaacccgaagtgacaacagaccgtctgttcccgttcagttccaatattttttgccaacttaccccccttctgcatacccactggcggcacatacctacaccccaatcaccagttccgtgtccactatccgacagtatccagtttcagctcaggctccaaactctgccatcacagctcagactggtgttggggtagcgtctaccgtccacctaaaccccatgcagttgatgacagtggatgcatcgcatgctcgacatattcaagggatccagccagcacccatcagtacccagggtatccagccggcccccattgggaccccagggatacagcctgcaccacttggcacacagggaattcactcagcaaccccaatcaacacacaagggcttcagcctgcacctatgggtactcagcagcctcagcctgaaggaaagacttcagtggtgttggcagatggagccacaattgtggccaaccctattagcaatccattcagtgctgctccagcagcaacaaccgtggtgcagacccacagccagagtgctagcaccaacgctcccgcccagggctcatcgccacggccaagcatactccggaagaaacctgccacagatggaatggcagttcggaaaaccctcattcctcctcagcctcctgatgttgctagtcctcgagtggaaagctctatgcggagtacgtctgggtcacctaggcctgcaggtgccaaacccaagtctgaaatccacgtgtctatggccactccggtcactgtgtccatggagactgtatccaatcaaaataatgatcagcctaccattgccgtccctccaactgcccagcagcccccaccgaccattccaactatgattgcagcagccagtcccccgtcacaaccagccgttgccctttcaaccattcctggagcggtccccatcactccacccatcaccaccattgcagctgcaccacctccatcagtcactgtgggtggcagtctttcctccgtcttgggccctcccgttcctgaaattaaagtgaaagaagaagtagaaccaatggatatcatgaggccagtttctgcagttcctccactggctaccaacactgtgtctccatctcttgcattgctggcaaacaacttgtccatgcctacaagtgacctaccacctggtgcctccccaaggaaaaagcctcgaaagcaacagcatgtgatctcaacagaagaaggtgacatgatggagacaaacagcactgatgatgagaagtccactgccaagagtcttctggtgaaggctgagaagcgcaagtctcctcccaaggagtatattgatgaggaaggtgtgagatatgtcccagtgcgtccaagaccccccattactttgcttcgtcactatcggaacccctggaaagctgcttaccaccactttcagaggtacagtgacgtccgggtcaaagaggagaagaaagctatgctgcaggaaatagctaatcagaaaggagtatcctgtcgtgctcaaggctggaaagtccacctctgtgctgcccagttactacagctgacgaatctagaacatgatgtctatgaaagacttactaacctgcaggaagggattatcccaaagaaaaaagcagcaacagatgatgatctccaccgaataaacgaactgatacagggaaatatgcagaggtgtaaacttgtgatggatcaaatcagtgaagccagagactccatgcttaaggttttagatcataaagaccgtgtcctgaagctgcttaacaagaacgggactgtcaaaaaagtgtccaaattgaagcgaaaggaaaaagtctagacccagaacaatcaggagattggaagcaaatttatgaagaatgatggtgggggtggggggagggttttggttttttccaaagtggaacattgaaataaaggaagtgttccttagttcccgtgtgaaagcagaggaacccatgacatccaagggcgtgaaaggatcagagctgactggacatagtgagctgccttcttgcgttcgggtgcacccctgttaaacctgatctgtgtcataagtgactccggatgcatcagtgtccaccagttggaagcaatgacaaggatggctggctggtgtttttcagccttccggtttatagactgtatttatctagtggattcctgcaggccccatactgagcctggactgaaagtatccactcggaccatctgttatctctctacactgaaaataaaacctcttccacccaccccattcggttcttctgcctgaccttcaaatgcccatgttggccttttacagcagtgccacggcaccaagcgagctgccacatctcacactctaaagggtttgaactattagttcttgtcattttttaaaaaaaaccattcccaagtgaaattgttatatcgtctgtcttgcgtgtgtcagaactgggtttttgtggaggttcagagcaggcaacaccataagttgctctcagatccttgttctgaagtacattcttggttatctgtacttctgtagctggtgtgatgctgttaattgtatgtaccacacatctccagacgttaataaaggactcaaagaggtttttg

SEQ ID NO: 181734 - DNA, 4065 bp, Homo sapiens
  Payload ID: 15791
  Gene Symbol: SAP130
  Gene Name: Sin3A-associated protein, 130kDa
  Uniprot ID: Q9H0E3
  ENST ID: ENST00000259235
  CDS Start-End: 131-3277
gaggactgcgagcacagcggcggccgggtggcgggggtgagtggggccagcggggctggacagcagcgggccccgggcgccgccgccgcgatccctccccgcgcccgccgagcacatcgccgccgccgagatgggccctccgcggcacccccaggccggcgagatagaagcgggcggtgcgggcggcgggcggcggctacaggtggaaatgagttctcaacagtttcctcggttaggagccccttctaccgggctgagccaggccccttctcagattgcaaacagtggttctgctggattgataaacccagctgctacagtcaatgatgaatctggtcgagattctgaagtcagtgccagggagcacatgagttccagcagctccctccagtcccgggaggagaagcaagagcctgttgtggtaaggccctatccacaggtgcagatgttgtcgacacaccatgctgtcgcatcagccacacctgttgcagtgacagccccgccagcacacctgacgccagcagtgccactttcattttcggagggacttatgaagccgcccccgaagcccaccatgcctagccgtcccattgctcctgctccaccttctaccctgtcacttccccccaaggttccagggcaggttaccgttaccatggagagtagcatccctcaagcttcagccattcctgtggcaacaatcagtggacaacagggccatcccagtaacctgcatcacatcatgactacaaatgtgcaaatgtctatcatccgcagcaatgctcctgggccccctcttcacattggagcttctcatttacctcgaggtgcagctgctgctgctgtgatgtccagttctaaagtaaccacagtcctgaggccgacctcacagctgccaaatgctgctactgctcagccagcagtacagcacatcattcaccaaccaatccagtctcggccacctgtgaccacctccaatgccatccctcctgctgtggtagcaactgtctcagccaccagagctcagtctccagtcatcactacgacagcggcgcatgctactgattcagcacttagtaggccaaccttgtctatccagcatcctccatctgcagcaatcagtattcagcgtcctgcccagtcacgagatgtcacaacaagaatcacactaccatctcaccctgcattagggacgccaaaacagcagcttcatacaatggctcagaaaacaatcttcagtactggcacgccagtggctgcagccacagtagcacctattttggcaaccaacaccattccttcagcgaccacagctggatctgtgtcacacacgcaagctcccacaagtaccattgttaccatgacagtaccctcccattcctcccatgctactgctgtgaccacctcaaacatcccagtcgccaaggtggtgccccagcagatcacgcacacttctcctcggatccagccagactaccctgccgagaggagtagcctgattcccatctccggacatcgggcctctcccaatcctgtggccatggaaacccgaagtgacaacagaccgtctgttcccgttcagttccaatattttttgccaacttaccccccttctgcatacccactggcggcacatacctacaccccaatcaccagttccgtgtccactatccgacagtatccagtttcagctcaggctccaaactctgccatcacagctcagactggtgttggggtagcgtctaccgtccacctaaaccccatgcagttgatgacagtggatgcatcgcatgctcgacatattcaagggatccagccagcacccatcagtacccagggtatccagccggcccccattgggaccccagggatacagcctgcaccacttggcacacagggaattcactcagcaaccccaatcaacacacaagggcttcagcctgcacctatgggtactcagcagcctcagcctgaaggaaagacttcagcagtggtgttggcagatggagccacaattgtggccaaccctattagcaatccattcagtgctgctccagcagcaacaaccgtggtgcagacccacagccagagtgctagcaccaacgctcccgcccagggctcatcgccacggccaagcatactccggaagaaacctgccacagatggtgccaaacccaagtctgaaatccacgtgtctatggccactccggtcactgtgtccatggagactgtatccaatcaaaataatgatcagcctaccattgccgtccctccaactgcccagcagcccccaccgaccattccaactatgattgcagcagccagtcccccgtcacaaccagccgttgccctttcaaccattcctggagcggtccccatcactccacccatcaccaccattgcagctgcaccacctccatcagtcactgtgggtggcagtctttcctccgtcttgggccctcccgttcctgaaattaaagtgaaagaagaagtagaaccaatggatatcatgaggccagtttctgcagttcctccactggctaccaacactgtgtctccatctcttgcattgctggcaaacaacttgtccatgcctacaagtgacctaccacctggtgcctccccaaggaaaaagcctcgaaagcaacagcatgtgatctcaacagaagaaggtgacatgatggagacaaacagcactgatgatgagaagtccactgccaagagtcttctggtgaaggctgagaagcgcaagtctcctcccaaggagtatattgatgaggaaggtgtgagatatgtcccagtgcgtccaagaccccccattactttgcttcgtcactatcggaacccctggaaagctgcttaccaccactttcagaggtacagtgacgtccgggtcaaagaggagaagaaagctatgctgcaggaaatagctaatcagaaaggagtatcctgtcgtgctcaaggctggaaagtccacctctgtgctgcccagttactacagctgacgaatctagaacatgatgtctatgaaagacttactaacctgcaggaagggattatcccaaagaaaaaagcagcaacagatgatgatctccaccgaataaacgaactgatacagggaaatatgcagaggtgtaaacttgtgatggatcaaatcagtgaagccagagactccatgcttaaggttttagatcataaagaccgtgtcctgaagctgcttaacaagaacgggactgtcaaaaaagtgtccaaattgaagcgaaaggaaaaagtctagacccagaacaatcaggagattggaagcaaatttatgaagaatgatggtgggggtggggggagggttttggttttttccaaagtggaacattgaaataaaggaagtgttccttagttcccgtgtgaaagcagaggaacccatgacatccaagggcgtgaaaggatcagagctgactggacatagtgagctgccttcttgcgttcgggtgcacccctgttaaacctgatctgtgtcataagtgactccggatgcatcagtgtccaccagttggaagcaatgacaaggatggctggctggtgtttttcagccttccggtttatagactgtatttatctagtggattcctgcaggccccatactgagcctggactgaaagtatccactcggaccatctgttatctctctacactgaaaataaaacctcttccacccaccccattcggttcttctgcctgaccttcaaatgcccatgttggccttttacagcagtgccacggcaccaagcgagctgccacatctcacactctaaagggtttgaactattagttcttgtcattttttaaaaaaaaccattcccaagtgaaattgttatatcgtctgtcttgcgtgtgtcagaactgggtttttgtggaggttcagagcaggcaacaccataagttgctctcagatccttgttctgaagtacattcttggttatctgtacttctgtagctggtgtgatgctgttaattgtatgtaccacacatctccagacgttaataaaggactcaaagaggtttttgtacttg

SEQ ID NO: 181735 - DNA, 4173 bp, Homo sapiens
  Payload ID: 15791
  Gene Symbol: SAP130
  Gene Name: Sin3A-associated protein, 130kDa
  Uniprot ID: Q9H0E3
  ENST ID: ENST00000357702
  CDS Start-End: 133-3384
aagaggactgcgagcacagcggcggccgggtggcgggggtgagtggggccagcggggctggacagcagcgggccccgggcgccgccgccgcgatccctccccgcgcccgccgagcacatcgccgccgccgagatgggccctccgcggcacccccaggccggcgagatagaagcgggcggtgcgggcggcgggcggcggctacaggtggaaatgagttctcaacagtttcctcggttaggagccccttctaccgggctgagccaggccccttctcagattgcaaacagtggttctgctggattgataaacccagctgctacagtcaatgatgaatctggtcgagattctgaagtcagtgccagggagcacatgagttccagcagctccctccagtcccgggaggagaagcaagagcctgttgtggtaaggccctatccacaggtgcagatgttgtcgacacaccatgctgtcgcatcagccacacctgttgcagtgacagccccgccagcacacctgacgccagcagtgccactttcattttcggagggacttatgaagccgcccccgaagcccaccatgcctagccgtcccattgctcctgctccaccttctaccctgtcacttccccccaaggttccagggcaggttaccgttaccatggagagtagcatccctcaagcttcagccattcctgtggcaacaatcagtggacaacagggccatcccagtaacctgcatcacatcatgactacaaatgtgcaaatgtctatcatccgcagcaatgctcctgggccccctcttcacattggagcttctcatttacctcgaggtgcagctgctgctgctgtgatgtccagttctaaagtaaccacagtcctgaggccgacctcacagctgccaaatgctgctactgctcagccagcagtacagcacatcattcaccaaccaatccagtctcggccacctgtgaccacctccaatgccatccctcctgctgtggtagcaactgtctcagccaccagagctcagtctccagtcatcactacgacagcggcgcatgctactgattcagcacttagtaggccaaccttgtctatccagcatcctccatctgcagcaatcagtattcagcgtcctgcccagtcacgagatgtcacaacaagaatcacactaccatctcaccctgcattagggacgccaaaacagcagcttcatacaatggctcagaaaacaatcttcagtactggcacgccagtggctgcagccacagtagcacctattttggcaaccaacaccattccttcagcgaccacagctggatctgtgtcacacacgcaagctcccacaagtaccattgttaccatgacagtaccctcccattcctcccatgctactgctgtgaccacctcaaacatcccagtcgccaaggtggtgccccagcagatcacgcacacttctcctcggatccagccagactaccctgccgagaggagtagcctgattcccatctccggacatcgggcctctcccaatcctgtggccatggaaacccgaagtgacaacagaccgtctgttcccgttcagttccaatattttttgccaacttaccccccttctgcatacccactggcggcacatacctacaccccaatcaccagttccgtgtccactatccgacagtatccagtttcagctcaggctccaaactctgccatcacagctcagactggtgttggggtagcgtctaccgtccacctaaaccccatgcagttgatgacagtggatgcatcgcatgctcgacatattcaagggatccagccagcacccatcagtacccagggtatccagccggcccccattgggaccccagggatacagcctgcaccacttggcacacagggaattcactcagcaaccccaatcaacacacaagggcttcagcctgcacctatgggtactcagcagcctcagcctgaaggaaagacttcagcagtggtgttggcagatggagccacaattgtggccaaccctattagcaatccattcagtgctgctccagcagcaacaaccgtggtgcagacccacagccagagtgctagcaccaacgctcccgcccagggctcatcgccacggccaagcatactccggaagaaacctgccacagatggaatggcagttcggaaaaccctcattcctcctcagcctcctgatgttgctagtcctcgagtggaaagctctatgcggagtacgtctgggtcacctaggcctgcaggtgccaaacccaagtctgaaatccacgtgtctatggccactccggtcactgtgtccatggagactgtatccaatcaaaataatgatcagcctaccattgccgtccctccaactgcccagcagcccccaccgaccattccaactatgattgcagcagccagtcccccgtcacaaccagccgttgccctttcaaccattcctggagcggtccccatcactccacccatcaccaccattgcagctgcaccacctccatcagtcactgtgggtggcagtctttcctccgtcttgggccctcccgttcctgaaattaaagtgaaagaagaagtagaaccaatggatatcatgaggccagtttctgcagttcctccactggctaccaacactgtgtctccatctcttgcattgctggcaaacaacttgtccatgcctacaagtgacctaccacctggtgcctccccaaggaaaaagcctcgaaagcaacagcatgtgatctcaacagaagaaggtgacatgatggagacaaacagcactgatgatgagaagtccactgccaagagtcttctggtgaaggctgagaagcgcaagtctcctcccaaggagtatattgatgaggaaggtgtgagatatgtcccagtgcgtccaagaccccccattactttgcttcgtcactatcggaacccctggaaagctgcttaccaccactttcagaggtacagtgacgtccgggtcaaagaggagaagaaagctatgctgcaggaaatagctaatcagaaaggagtatcctgtcgtgctcaaggctggaaagtccacctctgtgctgcccagttactacagctgacgaatctagaacatgatgtctatgaaagacttactaacctgcaggaagggattatcccaaagaaaaaagcagcaacagatgatgatctccaccgaataaacgaactgatacagggaaatatgcagaggtgtaaacttgtgatggatcaaatcagtgaagccagagactccatgcttaaggttttagatcataaagaccgtgtcctgaagctgcttaacaagaacgggactgtcaaaaaagtgtccaaattgaagcgaaaggaaaaagtctagacccagaacaatcaggagattggaagcaaatttatgaagaatgatggtgggggtggggggagggttttggttttttccaaagtggaacattgaaataaaggaagtgttccttagttcccgtgtgaaagcagaggaacccatgacatccaagggcgtgaaaggatcagagctgactggacatagtgagctgccttcttgcgttcgggtgcacccctgttaaacctgatctgtgtcataagtgactccggatgcatcagtgtccaccagttggaagcaatgacaaggatggctggctggtgtttttcagccttccggtttatagactgtatttatctagtggattcctgcaggccccatactgagcctggactgaaagtatccactcggaccatctgttatctctctacactgaaaataaaacctcttccacccaccccattcggttcttctgcctgaccttcaaatgcccatgttggccttttacagcagtgccacggcaccaagcgagctgccacatctcacactctaaagggtttgaactattagttcttgtcattttttaaaaaaaaccattcccaagtgaaattgttatatcgtctgtcttgcgtgtgtcagaactgggtttttgtggaggttcagagcaggcaacaccataagttgctctcagatccttgttctgaagtacattcttggttatctgtacttctgtagctggtgtgatgctgttaattgtatgtaccacacatctccagacgttaataaaggactcaaagaggtttttgtacttgc

SEQ ID NO: 181736 - DNA, 849 bp, Homo sapiens
  Payload ID: 15791
  Gene Symbol: SAP130
  Gene Name: Sin3A-associated protein, 130kDa
  ENST ID: ENST00000424298
  CDS Start-End: 63-849
caggggcaggttcgggggaagaggactgcgagcacagcggcggccgggtggcgggggtggaaatgagttctcaacagtttcctcggttaggagccccttctaccgggctgagccaggccccttctcagattgcaaacagtggttctgctggattgataaacccagctgctacagtcaatgatgaatctggtcgagattctgaagtcagtgccagggagcacatgagttccagcagctccctccagtcccgggaggagaagcaagagcctgttgtggtaaggccctatccacaggtgcagatgttgtcgacacaccatgctgtcgcatcagccacacctgttgcagtgacagccccgccagcacacctgacgccagcagtgccactttcattttcggagggacttatgaagccgcccccgaagcccaccatgcctagccgtcccattgctcctgctccaccttctaccctgtcacttccccccaaggttccagggcaggttaccgttaccatggagagtagcatccctcaagcttcagccattcctgtggcaacaatcagtggacaacagggccatcccagtaacctgcatcacatcatgactacaaatgtgcaaatgtctatcatccgcagcaatgctcctgggccccctcttcacattggagcttctcatttacctcgaggtgcagctgctgctgctgtgatgtccagttctaaagtaaccacagtcctgaggccgacctcacagctgccaaatgctgctactgctcagccagcagtacagcacatcattcaccaaccaatccagtctcggccacctgtgaccacctccaatgccatccctcctgctg

SEQ ID NO: 181737 - DNA, 559 bp, Homo sapiens
  Payload ID: 15791
  Gene Symbol: SAP130
  Gene Name: Sin3A-associated protein, 130kDa
  ENST ID: ENST00000450957
  CDS Start-End: 127-559
agagtgctagctccccggcggtggctgcgggtccggagcctggggacgtcggccccacagacggagagcgcgcgggagcgagctcaaggcggcgcggcggccactgggcgcagcacccaggtggaaatgagttctcaacagtttcctcggttaggagccccttctaccgggctgagccaggccccttctcagattgcaaacagtggttctgctggattgataaacccagctgctacagtcaatgatgaatctggtcgagattctgaagtcagtgccagggagcacatgagttccagcagctccctccagtcccgggaggagaagcaagagcctgttgtggtaaggccctatccacaggtgcagatgttgtcgacacaccatgctgtcgcatcagccacacctgttgcagtgacagccccgccagcacacctgacgccagcagtgccactttcattttcggagggacttatgaaggttccagggcaggttaccgttaccatggagagtagcatccctcaagcttcagccattcctgtggcaacaatcagtggacaacagg

SEQ ID NO: 181738 - DNA, 2298 bp, Homo sapiens
  Payload ID: 15792
  Gene Symbol: SAP18
  Gene Name: Sin3A-associated protein, 18kDa
  ENST ID: ENST00000382533
  CDS Start-End: 40-558
taaagtgtcgagcttctcctcgcgagagacttagtgctcatgctcgctgcaggggtcggaggtcagggcgagcgtctcgcaggccgtaggaggaagatggcggtggagtcgcgcgttacccaggaggaaattaagaaggagccagagaaaccgatcgaccgcgagaagacatgcccactgttgctacgggtcttcaccaccaataacggccgccaccaccgaatggacgagttctcccggggaaatgtaccgtccagcgagttgcagatctacacttggatggatgcaaccttgaaagaactgacaagcttagtaaaagaagtctacccagaagctagaaagaagggcactcacttcaattttgcaatcgtttttacagatgttaaaagacctggctatcgagttaaggagattggcagcaccatgtctggcagaaaggggactgatgattccatgaccctgcagtcgcagaagttccagataggagattacttggacatagcaattacccctccaaatcgggcaccacctccttcagggcgcatgagaccatattaaattctatttactatttgttgaatttatttttccgtcagttatgtaaaataaacatactcttcttcctcccctgattattgccattaagcctttaaattctaaacaaattataatgcatcatctatttaggagttagatttggatgtgctattgtatgattacgaatagtctgtatgtttcaagcccttctgtaaaatatgaagaaaagtgctcttagcattctgtgtaaaactgtactgttaaatatatgtgtgtaatcagcctgagtgtgaaagttaatggaggcctgggaacagggtttatactaagtagtggaggagcgtatggttaagcccaaaggggcagaacaagaaagccacgggattgtatgaaatcaaacatgagtttgtggtgtagactgctgtatgcagttggaaaggacacgtgagagtgagctcaagtggcagcagaggcagtttggaataagctgcggcaagttgaagaagctgtgttggacgagattgccccgccttgatcagggtaccatgacataaaaggttaaagaacaggcaacacaatgagcacttaagtttttaacatgtggggaatagggcattttaaaggctggaaccagttcagaggaaacaagggtttgggtagaggtagaaaggtttaattaaccctggagatctgcaaatggagggaggggtgaaggaggaatcttaagaccgagggagaagagccaaggacaaggtcaggttgaatgagtaggaggtgttcacacatcctcttgtgtgctaggtagtggcgtgcatctgatctgagaggcagtaaagcagtgatgaagacagtgcagcagaacattgaagtcctgattgcagcagtgactctgcaaccttggataaattatttcaatctttattttgtaaaacggagataacggcctataggattgttaagactgaatattttaaaagagcttagaatggtgcctgacaaatgagaaacaataaatactgattattggccataaagtggtattaaaactggatctcttttcttccatggcactactctcattttgaagtttatgaacagtacgacagtgtattgtaaattccctttagtttgttacagtagccaattgaaaatgtatatcccaaaatttaaaaaaaaaagtaccagcagcaataaaattgcactagttttatctggtacatacaaaaacagccatttaaaatctgatgattctgtggaattggtgtccctgttagcaatggcagagaccagcctggagcctagatctggtgcttcttctgtgctgtggtttaccccaaacctttaggttgtttattcattcagattagatagactggagccataaagttaatttgcacctagctttttggagaatagccatgattaactgctattcgtggtgggggtgggggggaaccctatgatttactatgcagatgaagagggtaggaactaaataaaggactttgtaagccaaagtggttgggctgctttgtcaaattccaccctttgcttggttccaacatggaatttctcctttaaagatttcaatatcccatcaaaagtacagttagagaatacctagtgaatttattgaatataatgctaagaatcaaaagacttgtactagtttacctctggctttggtaagtgtggctttgagtaataactgagctgtttccccgcatataaaatagaaataaataagtagtcatcatgaca

SEQ ID NO: 181739 - DNA, 479 bp, Homo sapiens
  Payload ID: 15792
  Gene Symbol: SAP18
  Gene Name: Sin3A-associated protein, 18kDa
  ENST ID: ENST00000450573
  CDS Start-End: 50-479
gtttttggtctcggggaggctcggaggccgcaacgcctcgggaagagagatgagctccgggttcgcagctggtgtttttaacttctgcccttccgttttctctctccctcagacatgcccactgttgctacgggtcttcaccaccaataacggccgccaccaccgaatggacgagttctcccggggaaatgtaccgtccagcgagttgcagatctacacttggatggatgcaaccttgaaagaactgacaagcttagtaaaagaagtctacccagaagctagaaagaagggcactcacttcaattttgcaatcgtttttacagatgttaaaagacctggctatcgagttaaggagattggcagcaccatgtctggcagaaaggggactgatgattccatgaccctgcagtcgcagaagttccagataggagattacttggacatagcaattacccctccaaatcgggcaccacctcctt

SEQ ID NO: 181740 - DNA, 670 bp, Homo sapiens
  Payload ID: 15792
  Gene Symbol: SAP18
  Gene Name: Sin3A-associated protein, 18kDa
  ENST ID: ENST00000467636
  CDS Start-End: 1-237
acatgcccactgttgctacgggtcttcaccaccaataacggccgccaccaccgaatggacgagttctcccggggaaatgtaccgtccagcgagttgcagatctacacttggatggatgcaaccttgaaagaactgacaagcttagtaaaagaagtctacccagaagctagaaagaagggcactcacttcaattttgcaatcgtttttacagatgttaaaagacctggctatcgttgattttctttcttacagagttaaggagattggcagcaccatgtctggcagaaaggggactgatgattccatgaccctgcagtcgcagaagttccagataggagattacttggacatagcaattacccctccaaatcgggcaccacctccttcagggcgcatgagaccatattaaattctatttactatttgttgaatttatttttccgtcagttatgtaaaataaacatactcttcttcctcccctgattattgccattaagcctttaaattctaaacaaattataatgcatcatctatttaggagttagatttggatgtgctattgtatgattacgaatagtctgtatgtttcaagcccttctgtaaaatatgaagaaaagtgctcttagcattctgtgtaaaactgtactgttaaatatatgtgtgtaatcag

SEQ ID NO: 181741 - DNA, 405 bp, Homo sapiens
  Payload ID: 15792
  Gene Symbol: SAP18
  Gene Name: Sin3A-associated protein, 18kDa
  ENST ID: ENST00000492245
  CDS Start-End: 1-178
ggtggagtcgcgcgttacccaggaggaaattaagaaggagccagagaaaccgatcgaccgcgagaagacatgcccactgttgctacgggtcttcaccaccaataacggccgccaccaccgaatggacgagttctcccggggaaatgtaccgtccagcgagttgcagatctacacttgagttaaggagattggcagcaccatgtctggcagaaaggggactgatgattccatgaccctgcagtcgcagaagttccagataggagattacttggacatagcaattacccctccaaatcgggcaccacctccttcagggcgcatgagaccatattaaattctatttactatttgttgaatttatttttccgtcagttatgtaaaataaacatactcttcttcctcccc

SEQ ID NO: 181742 - DNA, 2234 bp, Homo sapiens
  Payload ID: 15792
  Gene Symbol: SAP18
  Gene Name: Sin3A-associated protein, 18kDa
  Uniprot ID: O00422
  ENST ID: ENST00000607003
  CDS Start-End: 33-494
agggcgagcgtctcgcaggccgtaggaggaagatggcggtggagtcgcgcgttacccaggaggaaattaagaaggagccagagaaaccgatcgaccgcgagaagacatgcccactgttgctacgggtcttcaccaccaataacggccgccaccaccgaatggacgagttctcccggggaaatgtaccgtccagcgagttgcagatctacacttggatggatgcaaccttgaaagaactgacaagcttagtaaaagaagtctacccagaagctagaaagaagggcactcacttcaattttgcaatcgtttttacagatgttaaaagacctggctatcgagttaaggagattggcagcaccatgtctggcagaaaggggactgatgattccatgaccctgcagtcgcagaagttccagataggagattacttggacatagcaattacccctccaaatcgggcaccacctccttcagggcgcatgagaccatattaaattctatttactatttgttgaatttatttttccgtcagttatgtaaaataaacatactcttcttcctcccctgattattgccattaagcctttaaattctaaacaaattataatgcatcatctatttaggagttagatttggatgtgctattgtatgattacgaatagtctgtatgtttcaagcccttctgtaaaatatgaagaaaagtgctcttagcattctgtgtaaaactgtactgttaaatatatgtgtgtaatcagcctgagtgtgaaagttaatggaggcctgggaacagggtttatactaagtagtggaggagcgtatggttaagcccaaaggggcagaacaagaaagccacgggattgtatgaaatcaaacatgagtttgtggtgtagactgctgtatgcagttggaaaggacacgtgagagtgagctcaagtggcagcagaggcagtttggaataagctgcggcaagttgaagaagctgtgttggacgagattgccccgccttgatcagggtaccatgacataaaaggttaaagaacaggcaacacaatgagcacttaagtttttaacatgtggggaatagggcattttaaaggctggaaccagttcagaggaaacaagggtttgggtagaggtagaaaggtttaattaaccctggagatctgcaaatggagggaggggtgaaggaggaatcttaagaccgagggagaagagccaaggacaaggtcaggttgaatgagtaggaggtgttcacacatcctcttgtgtgctaggtagtggcgtgcatctgatctgagaggcagtaaagcagtgatgaagacagtgcagcagaacattgaagtcctgattgcagcagtgactctgcaaccttggataaattatttcaatctttattttgtaaaacggagataacggcctataggattgttaagactgaatattttaaaagagcttagaatggtgcctgacaaatgagaaacaataaatactgattattggccataaagtggtattaaaactggatctcttttcttccatggcactactctcattttgaagtttatgaacagtacgacagtgtattgtaaattccctttagtttgttacagtagccaattgaaaatgtatatcccaaaatttaaaaaaaaaagtaccagcagcaataaaattgcactagttttatctggtacatacaaaaacagccatttaaaatctgatgattctgtggaattggtgtccctgttagcaatggcagagaccagcctggagcctagatctggtgcttcttctgtgctgtggtttaccccaaacctttaggttgtttattcattcagattagatagactggagccataaagttaatttgcacctagctttttggagaatagccatgattaactgctattcgtggtgggggtgggggggaaccctatgatttactatgcagatgaagagggtaggaactaaataaaggactttgtaagccaaagtggttgggctgctttgtcaaattccaccctttgcttggttccaacatggaatttctcctttaaagatttcaatatcccatcaaaagtacagttagagaatacctagtgaatttattgaatataatgctaagaatcaaaagacttgtactagtttacctctggctttggtaagtgtggctttgagtaataactgagctgtttccccgcatataaaatagaaataaataagtagtcatcatgaca

SEQ ID NO: 181743 - DNA, 2300 bp, Homo sapiens
  Payload ID: 15792
  Gene Symbol: SAP18
  Gene Name: Sin3A-associated protein, 18kDa
  ENST ID: ENST00000621421
  CDS Start-End: 40-558
taaagtgtcgagcttctcctcgcgagagacttagtgctcatgctcgctgcaggggtcggaggtcagggcgagcgtctcgcaggccgtaggaggaagatggcggtggagtcgcgcgttacccaggaggaaattaagaaggagccagagaaaccgatcgaccgcgagaagacatgcccactgttgctacgggtcttcaccaccaataacggccgccaccaccgaatggacgagttctcccggggaaatgtaccgtccagcgagttgcagatctacacttggatggatgcaaccttgaaagaactgacaagcttagtaaaagaagtctacccagaagctagaaagaagggcactcacttcaattttgcaatcgtttttacagatgttaaaagacctggctatcgagttaaggagattggcagcaccatgtctggcagaaaggggactgatgattccatgaccctgcagtcgcagaagttccagataggagattacttggacatagcaattacccctccaaatcgggcaccacctccttcagggcgcatgagaccatattaaattctatttactatttgttgaatttatttttccgtcagttatgtaaaataaacatactcttcttcctcccctgattattgccattaagcctttaaattctaaacaaattataatgcatcatctatttaggagttagatttggatgtgctattgtatgattacgaatagtctgtatgtttcaagcccttctgtaaaatatgaagaaaagtgctcttagcattctgtgtaaaactgtactgttaaatatatgtgtgtaatcagcctgagtgtgaaagttaatggaggcctgggaacagggtttatactaagtagtggaggagcgtatggttaagcccaaaggggcagaacaagaaagccacgggattgtatgaaatcaaacatgagtttgtggtgtagactgctgtatgcagttggaaaggacacgtgagagtgagctcaagtggcagcagaggcagtttggaataagctgcggcaagttgaagaagctgtgttggacgagattgccccgccttgatcagggtaccatgacataaaaggttaaagaacaggcaacacaatgagcacttaagtttttaacatgtggggaatagggcattttaaaggctggaaccagttcagaggaaacaagggtttgggtagaggtagaaaggtttaattaaccctggagatctgcaaatggagggaggggtgaaggaggaatcttaagaccgagggagaagagccaaggacaaggtcaggttgaatgagtaggaggtgttcacacatcctcttgtgtgctaggtagtggcgtgcatctgatctgagaggcagtaaagcagtgatgaagacagtgcagcagaacattgaagtcctgattgcagcagtgactctgcaaccttggataaattatttcaatctttattttgtaaaacggagataacggcctataggattgttaagactgaatattttaaaagagcttagaatggtgcctgacaaatgagaaacaataaatactgattattggccataaagtggtattaaaactggatctcttttcttccatggcactactctcattttgaagtttatgaacagtacgacagtgtattgtaaattccctttagtttgttacagtagccaattgaaaatgtatatcccaaaatttaaaaaaaaaagtaccagcagcaataaaattgcactagttttatctggtacatacaaaaacagccatttaaaatctgatgattctgtggaattggtgtccctgttagcaatggcagagaccagcctggagcctagatctggtgcttcttctgtgctgtggtttaccccaaacctttaggttgtttattcattcagattagatagactggagccataaagttaatttgcacctagctttttggagaatagccatgattaactgctattcgtggtgggggtgggggggaaccctatgatttactatgcagatgaagagggtaggaactaaataaaggactttgtaagccaaagtggttgggctgctttgtcaaattccaccctttgcttggttccaacatggaatttctcctttaaagatttcaatatcccatcaaaagtacagttagagaatacctagtgaatttattgaatataatgctaagaatcaaaagacttgtactagtttacctctggctttggtaagtgtggctttgagtaataactgagctgtttccccgcatataaaatagaaataaataagtagtcatcatgacagc

SEQ ID NO: 181744 - DNA, 837 bp, Homo sapiens
  Payload ID: 15793
  Gene Symbol: SAP25
  Gene Name: Sin3A-associated protein, 25kDa
  Uniprot ID: Q8TEE9
  ENST ID: ENST00000538735
  CDS Start-End: 179-778
gagcgccggagcggacgcccccagggagctggggacacccccatgggacagcccttcctggatctggagagagcagctgctgctgccccaccacctgccaggcccggccactgagcagccccccggagccccagatccccgttccccccaggtggcctgggaggtggccccctcgaggatgactccactagcgccctgggaccccaagtatgaagccaaagcaggacctcggccggtgtggggggccaactgtagctcaggagcctcgttctcaggccggacgctgtgtcacccctcattctggccgctgtatgaagcagcctcgggcaggggtctcaggcccgtggcccctgccacagggcactggaatggacagcaggcgcccccagatgcagggttcccggtggtgtgctgtgaagatgtcttcctctcggaccctctgctgccccgggggcagcgtgttcccctgtacctgtccaaggccccccagcagatgatgggctccctgaaactgctgccgccgccccccatcatgtctgccagggtgctcccccgcccatcaccctcccggggcccctccactgcctggctcagcgggccggagctgatcgctctcactggcctgctgcagatgagccagggggagcctaggcccagctcctccgcggttggccccccagaccatacctctgacccacccagcccctgtggtagccccagcagttctcagggtgctgacctctctctcccacagaccccagacacccattgtccatagccttctcagggcagagtgggctggttgtgttgacaataaaacagtgttggtttgcaaaa

SEQ ID NO: 181745 - DNA, 987 bp, Homo sapiens
  Payload ID: 15793
  Gene Symbol: SAP25
  Gene Name: Sin3A-associated protein, 25kDa
  Uniprot ID: Q8TEE9
  ENST ID: ENST00000614631
  CDS Start-End: 357-956
cccatgggacaggtgaggggctcggacggagccgtggggggacagcgactgggggcctccatgccttcaccacgcgctctacggaggcttctccattgtccctgctggagattgggtccctcggtctcccttgcaccaggcacccttgggctccaggggagggtgcgtgggggcggtgtggctgcagcctcagtccctgcccctccagcccacagcccccatcccgtagcccttcctggatctggagagagcagctgctgctgccccaccacctgccaggcccggccactgagcagccccccggagccccagatccccgttccccccaggtggcctgggaggtggccccctcgaggatgactccactagcgccctgggaccccaagtatgaagccaaagcaggacctcggccggtgtggggggccaactgtagctcaggagcctcgttctcaggccggacgctgtgtcacccctcattctggccgctgtatgaagcagcctcgggcaggggtctcaggcccgtggcccctgccacagggcactggaatggacagcaggcgcccccagatgcagggttcccggtggtgtgctgtgaagatgtcttcctctcggaccctctgctgccccgggggcagcgtgttcccctgtacctgtccaaggccccccagcagatgatgggctccctgaaactgctgccgccgccccccatcatgtctgccagggtgctcccccgcccatcaccctcccggggcccctccactgcctggctcagcgggccggagctgatcgctctcactggcctgctgcagatgagccagggggagcctaggcccagctcctccgcggttggccccccagaccatacctctgacccacccagcccctgtggtagccccagcagttctcagggtgctgacctctctctcccacagaccccagacacccattgtccatagccttctcagggcagagtgggctggttgtgtt

SEQ ID NO: 181746 - DNA, 1031 bp, Homo sapiens
  Payload ID: 15793
  Gene Symbol: SAP25
  Gene Name: Sin3A-associated protein, 25kDa
  ENST ID: ENST00000622764
  CDS Start-End: 79-972
gcgccgcggagggaggctgagagggccgggccgggcggcggggacacggcggtaccgtcctgcgctcgggaacgcggaatgttgccctggtcgccgccgcggtggggcgcgggcccggaggaggcgcccgagggaccaggccttccggcgggcaaggaccagggcgagccctggagcgccggagcggacgcccccagggagctggggacacccccatgggacagcccacagcccccatcccgtagcccttcctggatctggagagagcagctgctgctgccccaccacctgccaggcccggccactgagcagccccccggagccccagatccccgttccccccaggtggcctgggaggtggccccctcgaggatgactccactagcgccctgggaccccaagtatgaagccaaagcaggacctcggccggtgtggggggccaactgtagctcaggagcctcgttctcaggccggacgctgtgtcacccctcattctggccgctgtatgaagcagcctcgggcaggggtctcaggcccgtggcccctgccacagggcactggaatggacagcaggcgcccccagatgcagggttcccggtggtgtgctgtgaagatgtcttcctctcggaccctctgctgccccgggggcagcgtgttcccctgtacctgtccaaggccccccagcagatgatgggctccctgaaactgctgccgccgccccccatcatgtctgccagggtgctcccccgcccatcaccctcccggggcccctccactgcctggctcagcgggccggagctgatcgctctcactggcctgctgcagatgagccagggggagcctaggcccagctcctccgcggttggccccccagaccatacctctgacccacccagcccctgtggtagccccagcagttctcagggtgctgacctctctctcccacagaccccagacacccattgtccatagccttctcagggcagagtgggctggttgtgttgacaataaaacagtgttggtttgcaaaa

SEQ ID NO: 181747 - DNA, 1108 bp, Homo sapiens
  Payload ID: 15794
  Gene Symbol: SAP30
  Gene Name: Sin3A-associated protein, 30kDa
  Uniprot ID: O75446
  ENST ID: ENST00000296504
  CDS Start-End: 241-903
ccccatgtgacagtgagcggggtccccgctccaggagacgctcgagtctgcgtcccggccctcagcactgtccactgtttcggtgccagcagagaccagcaggcccgggacagttggtgtttggccgtgccgctgtctaacttggtgtgcagagtgaattgccgctgccggagcggagagaggcggagcggccaggagagaggggatttctgtcagcgccggcctcgggagctcggagacatgaacggcttcacgcctgacgagatgagccgcggcggggatgcggccgccgcagtggccgcagtggtcgctgccgcggccgccgccgcctcggcggggaacgggaccggcgcgggcaccggggctgaggtgccgggcgcgggggcggtctcagcggctgggcccccgggggcggccgggccgggccccgggcaactgtgctgcctgcgggaggatggtgagcggtgcggccgggcggcaggcaacgccagcttcagcaagaggatccagaagagcatctcccagaagaaggtgaagatcgagctggataagagcgcaaggcatctttacatatgtgattatcataaaaacttaattcagagtgttcgaaacagaagaaagagaaaagggagtgatgatgatggaggtgattcacctgttcaagatattgataccccagaggttgatttataccaattacaagtaaatacacttaggagatacaaaagacacttcaagctaccaaccagaccaggacttaataaagcacaacttgttgagatagttggttgccactttaggtctattccagtgaatgaaaaagacaccttaacatatttcatctactcagtgaagaatgacaagaacaaatcagatctcaaggttgatagtggtgttcactaggagacgtggaattgagactaataacttggatgttaacactgtttactgttttttcacatgtagaaatgttctttgtgtattttttctacagaggattttctctgattttattttctttgtttctgactctaataattagttggaaactcatataaaatgagctttcctaaattaaatctattttaaataaaggttattactatta

SEQ ID NO: 181748 - DNA, 5245 bp, Homo sapiens
  Payload ID: 15795
  Gene Symbol: SOBP
  Gene Name: sine oculis binding protein homolog
  Uniprot ID: A7XYQ1
  ENST ID: ENST00000317357
  CDS Start-End: 660-3281
agccacgcccgctcgagagccggggggctgtcctcgccccccccacctttcccctccctccgaccccctcccggccgcgctccctcccctcctcccgcgccggcccccggcccgcccccggctcggctcgcgggaggcgctgggcgccggggctggcgcgctctcccgggctcacacacagccgcgcacgcacgcccggggccgctctccgcgccggcccttgctccccgcgcccatgcggacggaccgagcgacggaagatggctgacgactccacggggccccgaggatgcggcccggcggcggcggcggcgggagcggcagcggcagcgagggcggcaggggcagcggcagcagcggcggcgttggctgcggcggcggcggcggcggcagcaggagccggagcgacggcggcggcatccccgagactctccgcactatccttacccgtgacagccactgacgtcctccgccgctagaagagaccccgcttctcggcgcctgccctccccctcgcggctcggtccggccccgccagcaccgctacctccgccagcctcgccaccatcagcaccacctccaccgccgccgccgccgccaccaccaccgccggcggcggcagcagccatttcatctccacagaaaccagacacaaaaacatggcagaaatggagaaagaagggagacctcccgaaaataaacggagcaggaagccggctcacccagtgaaaagggagatcaatgaggagatgaagaactttgcagaaaacaccatgaatgaactccttggctggtatggctatgataaggttgaattaaaagatggtgaggatattgaattcaggagctaccctacagatggggagagccggcagcacatttctgttctcaaagaaaattctttgccaaaaccaaaattacccgaggacagtgttatttcaccatacaatataagcacaggctattcagggcttgccactggaaatggactcagtgactcacctgcagggtcaaaggatcatggcagtgtgcccattattgtacctttaattccaccacctttcataaagccaccagcagaagatgatgtgtcaaatgtacaaataatgtgtgcctggtgccagaaagtgggaatcaagcgctattccctgagtatgggaagtgaggtgaaaagcttctgcagcgagaagtgctttgcggcctgccgacgagcctacttcaagagaaataaggctagagatgaagatggacatgctgaaaattttccccagcagcactatgctaaggaaactccaaggcttgccttcaagaataactgcgaactacttgtatgtgactggtgtaagcacataagacacacaaaagaatacctggattttggggacggggaaagaaggcttcagttctgcagtgcaaaatgtctcaatcaatacaaaatggacattttctacaaagagacccaggccaatcttccagctgggctgtgcagcacattacaccctcccatggaaaataaagcagaaggcaccggggtgcagctgctcactccagactcttggaatatcccgctaacagatgctcggaggaaggccccctccccggtggctacagctggccaaagccagggccctggcccgtcggcgtccaccaccgtctctccatctgacactgccaactgctctgtcactaaaatccccacgccagtgcccaagtccatccccatcagcgagactccaaatatccctcctgtctccgtccagccacctgctagcatcgggcctccccttggcgtcccgcctcggagccctcccatggtgatgaccaaccgcggcccggtgccgctgcccatcttcatggagcagcagatcatgcagcagatccgcccgcccttcatccgcgggcctccgcaccatgcctccaaccccaacagccccctgtccaaccccatgcttcccggcatcgggcccccgcccggtggccccagaaacctgggccccacttccagccccatgcaccggcccatgctatcgccccacatccaccccccgagcacccccaccatgcccgggaaccccccaggcctgctgcccccgccgcctccgggcgccccgctgccgagtcttcccttcccgccagtgagcatgatgccaaatggcccgatgccggtgccccagatgatgaatttcgggctgccgtcgcttgccccgctggtgccgcccccgaccctgctcgtgccgtaccccgtgatcgtgcccctaccggtgcccatccccatccccatccctatccctcacgtcagcgactccaagccccccaacgggttctccagcaacggggagaacttcattccgaacgcccctggcgactccgcggcggcgggcggcaagccaagcggacactccctgtccccccgggactccaagcagggctcgtccaagtccgcggactcgccccccggctgctcgggccaggccctgagcctggcgcccacgcccgccgagcatggccggagcgaggtggtggacctgacgcggcgcgccggcagccccccgggccccccgggcgcgggcggccagctcggcttcccaggcgtgctgcagggcccgcaggacggcgtcatcgacctgaccgtgggccaccgagcccggctgcacaacgtgatccaccgcgcgctgcacgcgcacgtcaaggcggagcgcgagccgagcgccgcggagcgcaggacctgcggcggctgcagggacggccactgcagcccgcccgccgccggcgacccaggcccgggcgccccggcgggccccgaggcggccgcggcctgcaacgtcatcgtgaacggcacgcgcggcgccgccgccgagggcgctaagagcgcggagccgcctcccgagcagccgccgccgccgccgccgcccgcgccccccaagaagctgctgtcgcctgaggaaccggcggtgagcgagctagagtcggtcaaggagaataactgtgcttccaactgccacctggacggggaggcggccaaaaagctgatgggcgaggaggccctggcggggggcgacaagtcagacccgaaccttaataaccccgcggacgaggaccatgcctatgctctgcggatgctgcccaagaccggctgcgtgatccagcctgtgccaaaacccgcggagaaggctgccatggcaccgtgcatcatctcctcgcccatgctcagcgccgggcctgaggacctggagccgccgctcaaaaggaggtgcctccgaattagaaatcagaataagtaaaaggaacgttcactcacagggtacgctcatggagagagggcgcagagcaaaccatgtcacgccatccaatgacaccagctggtcagctcaccaccccctctggctaaaactcaagcaaataaagccgcttcctgtcattaagcatctcagaggaagcagccctccctcgatggcctctagcccagagaagcccgcgcatcttggacccaccaagcaggcccagccttcctgctgccaccatctctgcttctccccagaggaacttagggatttcacccctggcttttaaaaaaaacgaaataccgacaagccacaaggaccaatgtaggtattctccccgccccatcttcaaggctcagcgactgaggctggaagatgatatggattggaacacaaaaaatctttttttaatctttttaaaaactgctgtggttttgctgctacactaagaattgtgatttgcattgtacggttttggacctatattgttcacgttttgatggcggagaggggtggtcctggaggcccaatgcttcagagtcatctctgtcctgcccgggatgcacttttaaatgaagagttagaatattttattggctaatatacttttcttgttatttttacaaaggccacctttatcctttttgatgccatattttcagtgttacacttttatggcttttaattttcgatttgacagatgtaagaagcagcatgaatagtttatactgtggtttttcagagactgaatgccaagagaactcggtaaatgtttattcttctcagctttctctttaaattcccctaaatagcgccccatttgggaacagagcaagagtgttgaactgaagaccaaaatgccctcaaggtgtaaaataatccgagggggaatatttgctgggcgtcaggaaagactcagatgaaatttcaaccctgatggttttcggtgatccaggaagtcagtgagacaatctctctatatgcagagccctttcatgataattagaatggtatggacaaaccaatgaaaacaagagggaaagtgagaaagatcacccatgattctgtttcactgtttgctttctcctgtcatggttaagagaaatgtgcaattcgatcctcaatcagtgggtggaggataacagggtagattcacttgtgtgcacttgtacagttgtagctgcgagtccagaagtcctctagagcatgtgtactggcactgagttggtgagacagttgtggagtatcccattctgatgagtacagaaaaaaaaagaaaaagaaaagaagagaaaaaattaagaaaaaaatcaaaaaaggaagaaaactaaaaaaaaaaaaaatcaaatcaccttgtgattcagtgtatctgtttactaactcaaataaagcaattgttccctctggaggggtccaggtgcccccgccccacaaggccgcggagcctcagcaggaggggtggcgagttgcgggtgggcagggccaggacggtgtggcgccagccttgaagcaccacggcccaaggatgcggtgtacatactgtatttctagattctcctttgtacagagtcacttcacaagtcaagctactgttttacaggtgctccttatttattagagctgtgagagcttgggggacacacctggcgagcaagctcgctttttaaaaatgaaatttgggggcaggggaaggggaggcgggagggaggggaagctcgcaagcccggggagagatttataaaagtaaacaaaagaaaaccttccagcaacaaattaaaaaataataacaaatcaaccccagcaccaaacccacccaggcaggaagaagccgcccctcctctggggccatatttttctgctgggtcacaacattctcctctccctgactggtgtcagattcatcaaacaaaaaataaatctcgaagaaaaaaaatgcacttacatgtgcttatttggcttttctc

SEQ ID NO: 181749 - DNA, 1550 bp, Homo sapiens
  Payload ID: 15795
  Gene Symbol: SOBP
  Gene Name: sine oculis binding protein homolog
  ENST ID: ENST00000618129
  CDS Start-End: 14-463
cagacacaaaaacatggcagaaatggagaaagaagggagacctcccgaaaataaacggagcaggaagccggctcacccagtgaaaagggagatcaatgaggagatgaagaactttgcagaaaacaccatgaatgaactccttggctggtatggctatgataaggttgaattaaaagatggtgaggatattgaattcaggagctaccctacagatggggagagccggcagcacatttctgttctcaaagaaaattctttgccaaaaccaaaattacccgaggacagtgttatttcaccatacaatataagcacaggctattcagggcttgccactggaaatggactcagtgactcacctgcagggtcaaaggatcatggcagtgtgcccattattgtacctttaattccaccacctttcataaagccaccagcagatgagaaaactgaggcccagaaaagttgagcaacttgcctgaggttacacagatactgagtggcagagctgatatttgaacctatacattatgtctccttagcctatatccttaaccactggattatccaaaacactatggcagtatttcagtcagttaagtatttactgaatgttccttacattgtgctagacaatacagatgtatgtcatcatccttgactaccaagaacttaatagtactgttggcatatgatcaaaacatcattctagttttaccttggaatgtatgatataattttagttgcatatggaaggtgcatggtaggactacaagggcaattaaagtggagtagcaaaaagtctataggcagataatcaagaactgttatatttatacagttgaggggaaatggcacctgaaacttaatataggctagaagatagcaattgaaaactcaaattcaaagtgataaaaaaagatccaaaatgaaacctgaaaatgttagatactatgatatgggtcctgctttattgttctctttacaattaagggttcttaaaaatgtgtaaggcacattttagtgtgttctatcatttttaatgccagatgaaatgtataatttgaatggtagcatgaggtggtgaagactgccagagcaagaaccaggagacctgggttgctaatgccagctctgccatttattggccatgtaatcttgaataaggtagtttctctaagccttagtttccttgtctgcaaaatgatgtggttagcttacatgatctgttatttccctatatttataaaatccttattttgtgacttgtatggttagttgctctcctgattttatgatttgagagggtatgttttaatgtgctttaacaggtacttgttaattgaacagatataaagcaaactgcatatatgtatagttataacagccagaagtctgatgaaagatttatactgcttgggacaagttttaatgattgttaatttttactttgaacaaatagtgaatgaaataatagatttgacattttttaagataacaagtgctaggaaatatgaaatgtgagtaaataaaaaggttcatatgttattagaact

SEQ ID NO: 181750 - DNA, 1639 bp, Homo sapiens
  Payload ID: 15796
  Gene Symbol: SIGIRR
  Gene Name: single immunoglobulin and toll-interleukin 1 receptor (TIR) domain
  Uniprot ID: Q6IA17
  ENST ID: ENST00000332725
  CDS Start-End: 227-1459
gttgccgctgcgcacctggctcaggtgagctgccccgcccccgcccggcgcgagccccaggtcctggcagcagcctctgacctgtccaggtgccctgtccagctgactgcaaggacagagaggagtcctgcccagctcttggatcagtctgctggccgaggagcccggtggagccaggggtgaccctggagcccagcctgccccgaggaggccccggctcagagccatgccaggtgtctgtgatagggcccctgacttcctctccccgtctgaagaccaggtgctgaggcctgccttgggcagctcagtggctctgaactgcacggcttgggtagtctctgggccccactgctccctgccttcagtccagtggctgaaagacgggcttccattgggaattgggggccactacagcctccacgagtactcctgggtcaaggccaacctgtcagaggtgcttgtgtccagtgtcctgggggtcaacgtgaccagcactgaagtctatggggccttcacctgctccatccagaacatcagcttctcctccttcactcttcagagagctggccctacaagccacgtggctgcggtgctggcctccctcctggtcctgctggccctgctgctggccgccctgctctatgtcaagtgccgtctcaacgtgctgctctggtaccaggacgcgtatggggaggtggagataaacgacgggaagctctacgacgcctacgtctcctacagcgactgccccgaggaccgcaagttcgtgaacttcatcctaaagccgcagctggagcggcgtcggggctacaagctcttcctggacgaccgcgacctcctgccgcgcgctgagccctccgccgacctcttggtgaacctgagccgctgccgacgcctcatcgtggtgctttcggacgccttcctgagccgggcctggtgcagccacagcttccgggagggcctgtgccggctgctggagctcacccgcagacccatcttcatcaccttcgagggccagaggcgcgaccccgcgcacccggcgctccgcctgctgcgccagcaccgccacctggtgaccttgctgctctggaggcccggctccgtgactccttcctccgatttttggaaagaagtgcagctggcgctgccgcggaaggtgcagtacaggcctgtggaaggagacccccagacgcagctgcaggacgacaaggaccccatgctgattcttcgaggccgagtccctgagggccgggccctggactcagaggtggacccggaccctgagggcgacctgggtgtccgggggcctgtctttggagagccatcagctccaccgcacaccagtggggtctcgctgggagagagccggagcagcgaagtggacgtctcggatctcggctcgcgaaactacagtgcccgcacagacttctactgcctggtgtccaaggatgatatgtagctcccaccccagagtgcaggatcatagggacagcgggggccagggcagcggcgtcgctcctctgctcaacaggaccacaacccctgccagcagccctgggaccctgccagcagccctgggaaaaggctgtggcctcagggcgcctcccagtgccagaaaataaagtccttttggattctg

SEQ ID NO: 181751 - DNA, 1598 bp, Homo sapiens
  Payload ID: 15796
  Gene Symbol: SIGIRR
  Gene Name: single immunoglobulin and toll-interleukin 1 receptor (TIR) domain
  Uniprot ID: Q6IA17
  ENST ID: ENST00000397632
  CDS Start-End: 186-1418
ggtgagtggcggtcgccatcagacccgcgaagcctctgacctgtccaggtgccctgtccagctgactgcaaggacagagaggagtcctgcccagctcttggatcagtctgctggccgaggagcccggtggagccaggggtgaccctggagcccagcctgccccgaggaggccccggctcagagccatgccaggtgtctgtgatagggcccctgacttcctctccccgtctgaagaccaggtgctgaggcctgccttgggcagctcagtggctctgaactgcacggcttgggtagtctctgggccccactgctccctgccttcagtccagtggctgaaagacgggcttccattgggaattgggggccactacagcctccacgagtactcctgggtcaaggccaacctgtcagaggtgcttgtgtccagtgtcctgggggtcaacgtgaccagcactgaagtctatggggccttcacctgctccatccagaacatcagcttctcctccttcactcttcagagagctggccctacaagccacgtggctgcggtgctggcctccctcctggtcctgctggccctgctgctggccgccctgctctatgtcaagtgccgtctcaacgtgctgctctggtaccaggacgcgtatggggaggtggagataaacgacgggaagctctacgacgcctacgtctcctacagcgactgccccgaggaccgcaagttcgtgaacttcatcctaaagccgcagctggagcggcgtcggggctacaagctcttcctggacgaccgcgacctcctgccgcgcgctgagccctccgccgacctcttggtgaacctgagccgctgccgacgcctcatcgtggtgctttcggacgccttcctgagccgggcctggtgcagccacagcttccgggagggcctgtgccggctgctggagctcacccgcagacccatcttcatcaccttcgagggccagaggcgcgaccccgcgcacccggcgctccgcctgctgcgccagcaccgccacctggtgaccttgctgctctggaggcccggctccgtgactccttcctccgatttttggaaagaagtgcagctggcgctgccgcggaaggtgcagtacaggcctgtggaaggagacccccagacgcagctgcaggacgacaaggaccccatgctgattcttcgaggccgagtccctgagggccgggccctggactcagaggtggacccggaccctgagggcgacctgggtgtccgggggcctgtctttggagagccatcagctccaccgcacaccagtggggtctcgctgggagagagccggagcagcgaagtggacgtctcggatctcggctcgcgaaactacagtgcccgcacagacttctactgcctggtgtccaaggatgatatgtagctcccaccccagagtgcaggatcatagggacagcgggggccagggcagcggcgtcgctcctctgctcaacaggaccacaacccctgccagcagccctgggaccctgccagcagccctgggaaaaggctgtggcctcagggcgcctcccagtgccagaaaataaagtccttttggattctg

SEQ ID NO: 181752 - DNA, 1720 bp, Homo sapiens
  Payload ID: 15796
  Gene Symbol: SIGIRR
  Gene Name: single immunoglobulin and toll-interleukin 1 receptor (TIR) domain
  Uniprot ID: Q6IA17
  ENST ID: ENST00000431843
  CDS Start-End: 308-1540
aagacacaagccaggtccccaccgcgcttggcgatgcatccatagcagccttggtgctgtggacactccctggggcccagcgaaggggagagtttgctcccaaaggcgcaccaatgaccaacatttgccccccggaggaaagaactggaaccagcctctgacctgtccaggtgccctgtccagctgactgcaaggacagagaggagtcctgcccagctcttggatcagtctgctggccgaggagcccggtggagccaggggtgaccctggagcccagcctgccccgaggaggccccggctcagagccatgccaggtgtctgtgatagggcccctgacttcctctccccgtctgaagaccaggtgctgaggcctgccttgggcagctcagtggctctgaactgcacggcttgggtagtctctgggccccactgctccctgccttcagtccagtggctgaaagacgggcttccattgggaattgggggccactacagcctccacgagtactcctgggtcaaggccaacctgtcagaggtgcttgtgtccagtgtcctgggggtcaacgtgaccagcactgaagtctatggggccttcacctgctccatccagaacatcagcttctcctccttcactcttcagagagctggccctacaagccacgtggctgcggtgctggcctccctcctggtcctgctggccctgctgctggccgccctgctctatgtcaagtgccgtctcaacgtgctgctctggtaccaggacgcgtatggggaggtggagataaacgacgggaagctctacgacgcctacgtctcctacagcgactgccccgaggaccgcaagttcgtgaacttcatcctaaagccgcagctggagcggcgtcggggctacaagctcttcctggacgaccgcgacctcctgccgcgcgctgagccctccgccgacctcttggtgaacctgagccgctgccgacgcctcatcgtggtgctttcggacgccttcctgagccgggcctggtgcagccacagcttccgggagggcctgtgccggctgctggagctcacccgcagacccatcttcatcaccttcgagggccagaggcgcgaccccgcgcacccggcgctccgcctgctgcgccagcaccgccacctggtgaccttgctgctctggaggcccggctccgtgactccttcctccgatttttggaaagaagtgcagctggcgctgccgcggaaggtgcagtacaggcctgtggaaggagacccccagacgcagctgcaggacgacaaggaccccatgctgattcttcgaggccgagtccctgagggccgggccctggactcagaggtggacccggaccctgagggcgacctgggtgtccgggggcctgtctttggagagccatcagctccaccgcacaccagtggggtctcgctgggagagagccggagcagcgaagtggacgtctcggatctcggctcgcgaaactacagtgcccgcacagacttctactgcctggtgtccaaggatgatatgtagctcccaccccagagtgcaggatcatagggacagcgggggccagggcagcggcgtcgctcctctgctcaacaggaccacaacccctgccagcagccctgggaccctgccagcagccctgggaaaaggctgtggcctcagggcgcctcccagtgccagaaaataaagtccttttggattctg

SEQ ID NO: 181753 - DNA, 557 bp, Homo sapiens
  Payload ID: 15796
  Gene Symbol: SIGIRR
  Gene Name: single immunoglobulin and toll-interleukin 1 receptor (TIR) domain
  ENST ID: ENST00000528058
  CDS Start-End: 387-557
agttctgatcaaaatacacaaagacacaagccaggtccccaccgcgcttggcgatgcatccatagcagccttggtgctgtggacactccctggggcccagcgaaggggagagtttgctcccaaaggcgcaccaatgaccaacatttgccccccggaggaaagaactggaaccagcctctgacctgtccaggtgccctgtccagctgactgcaaggacagagaggagtcctgcccagctcttggatcagtctgctggccgaggagcccggtggagccaggggtgaccctggagcccagcctgccccgaggaggccccggctcagagccatgccagattccccagcagaggcaggccaggctgaggggtgcagtgcccggcccctcctatgagacaggcatcatggtgtcaccaggggtgggcaacaggtgtctgtgatagggcccctgacttcctctccccgtctgaagaccaggtgctgaggcctgccttgggcagctcagtggctctgaactgcacggcttgggtagtctctgggccccactgctccctgccttca

SEQ ID NO: 181754 - DNA, 1649 bp, Homo sapiens
  Payload ID: 15796
  Gene Symbol: SIGIRR
  Gene Name: single immunoglobulin and toll-interleukin 1 receptor (TIR) domain
  ENST ID: ENST00000531205
  CDS Start-End: 104-1618
agtcctgcccagctcttggatcagtctgctggccgaggagcccggtggagccaggggtgaccctggagcccagcctgccccgaggaggccccggctcagagccatgccaggtgtctgtgatagggcccctgacttcctctccccgtctgaagaccaggtgctgaggcctgccttgggcagctcagtggctctgaactgcacggcttgggtagtctctgggccccactgctccctgccttcagtccagtggctgaaagacgggcttccattgggaattgggggccactacagcctccacgagtactcctgggtcaaggccaacctgtcagaggtgcttgtgtccagtgtcctgggggtcaacgtgaccagcactgaagtctatggggccttcacctgctccatccagaacatcagcttctcctccttcactcttcagagagctggccctacaagccacgtggctgcggtgctggcctccctcctggtcctgctggccctgctgctggccgccctgctctatgtcaagtgccgtctcaacgtgctgctctggtaccaggacgcgtatggggaggtggagataaacgacgggaagctctacgacgcctacgtctcctacagcgactgccccgaggaccgcaagttcgtgaacttcatcctaaagccgcagctggagcggcgtcggggctacaagctcttcctggacgaccgcgacctcctgccgcgcgctgagccctccgccgacctcttggtgaacctgagccgctgccgacgcctcatcgtggtgctttcggacgccttcctgagccgggcctggtgcagccacagcttccgggagggcctgtgccggctgctggagctcacccgcagacccatcttcatcaccttcgagggccagaggcgcgaccccgcgcacccggcgctccgcctgctgcgccagcaccgccacctggtgaccttgctgctctggaggcccggctccgtgactccttcctccgatttttggaaagaagtgcagctggcgctgccgcggaaggtgcagtacaggcctgtggaaggagacccccagacgcagctgcaggacgacaaggaccccatgctgattcttcgaggccgagtccctgagggccgggccctggactcagaggtggacccggaccctgagggcgacctgggtatgcccgcccagccccactccccaactggagaagctcagcacagggcggagtgggggcaggcacagggcacagggcctggaggggctccaggtgttgaggactcttcccggcaccgggagcccctgcacggcctctgccctggaggtgctcggccctcggtctgcctgggaacttcctgggcctcacaggccatcacagcagggggtgagcaggggcagcccctggcagtgggtctgggccaaggctgtgggtggccacctcaggcgtctcggtctccccaccccaggtgtccgggggcctgtctttggagagccatcagctccaccgcacaccagtggggtctcgctgggagagagccggagcagcgaagtggacgtctcggatctcggctcgcgaaactacagtgcccgcacagacttctactgcctggtgtccaaggatgatatgtagctcccaccccagagtgcaggatca

SEQ ID NO: 181755 - DNA, 608 bp, Homo sapiens
  Payload ID: 15796
  Gene Symbol: SIGIRR
  Gene Name: single immunoglobulin and toll-interleukin 1 receptor (TIR) domain
  ENST ID: ENST00000526395
  CDS Start-End: 1-428
agccgctgccgacgcctcatcgtggtgctttcggacgccttcctgagccgggcctggtgcagccacagcttccgactccttcctccgatttttggaaagaagtgcagctggcgctgccgcggaaggtgcagtacaggcctgtggaaggagacccccagacgcagctgcaggacgacaaggaccccatgctgattcttcgaggccgagtccctgagggccgggccctggactcagaggtggacccggaccctgagggcgacctgggtgtccgggggcctgtctttggagagccatcagctccaccgcacaccagtggggtctcgctgggagagagccggagcagcgaagtggacgtctcggatctcggctcgcgaaactacagtgcccgcacagacttctactgcctggtgtccaaggatgatatgtagctcccaccccagagtgcaggatcatagggacagcgggggccagggcagcggcgtcgctcctctgctcaacaggaccacaacccctgccagcagccctgggaccctgccagcagccctgggaaaaggctgtggcctcagggcgcctcccagtgccagaaaataaagtccttttggattctg

SEQ ID NO: 181756 - DNA, 709 bp, Homo sapiens
  Payload ID: 15796
  Gene Symbol: SIGIRR
  Gene Name: single immunoglobulin and toll-interleukin 1 receptor (TIR) domain
  ENST ID: ENST00000530494
  CDS Start-End: 280-709
tggcgatgcatccatagcagccttggtgctgtggacactccctggggcccagcgaaggggagagtttgctcccaaaggcgcaccaatgaccaacatttgccccccggaggaaagaactggaaccagcctctgacctgtccaggtgccctgtccagctgactgcaaggacagagaggagtcctgcccagctcttggatcagtctgctggccgaggagcccggtggagccaggggtgaccctggagcccagcctgccccgaggaggccccggctcagagccatgccaggtgtctgtgatagggcccctgacttcctctccccgtctgaagaccaggtgctgaggcctgccttgggcagctcagtggctctgaactgcacggcttgggtagtctctgggccccactgctccctgccttcagtccagtggctgaaagacgggcttccattgggaattgggggccactacagcctccacgagtactcctggccctacaagccacgtggctgcggtgctggcctccctcctggtcctgctggccctgctgctggccgccctgctctatgtcaagtgccgtctcaacgtgctgctctggtaccaggacgcgtatggggaggtggagataaacgcgactgccccgaggaccgcaagttcgtgaacttcatcctaaagccgcagctggagcggcgtcggggctacaagctcttcctgg

SEQ ID NO: 181757 - DNA, 573 bp, Homo sapiens
  Payload ID: 15796
  Gene Symbol: SIGIRR
  Gene Name: single immunoglobulin and toll-interleukin 1 receptor (TIR) domain
  ENST ID: ENST00000528845
  CDS Start-End: 1-393
ccggaccctgagggcgacctgggtatgcccgcccagccccactccccaactggagaagctcagcacagggcggagtgggggcaggcacagggcacagggcctggaggggctccaggtgttgaggactcttcccggcaccgggagcccctgcacggcctctgccctggaggtgctcggccctcggtctgcctgggaacttcctgggcctcacaggccatcacagcagggggtgtccgggggcctgtctttggagagccatcagctccaccgcacaccagtggggtctcgctgggagagagccggagcagcgaagtggacgtctcggatctcggctcgcgaaactacagtgcccgcacagacttctactgcctggtgtccaaggatgatatgtagctcccaccccagagtgcaggatcatagggacagcgggggccagggcagcggcgtcgctcctctgctcaacaggaccacaacccctgccagcagccctgggaccctgccagcagccctgggaaaaggctgtggcctcagggcgcctcccagtgccagaaaataaagtccttttggattctg

SEQ ID NO: 181758 - DNA, 933 bp, Homo sapiens
  Payload ID: 15796
  Gene Symbol: SIGIRR
  Gene Name: single immunoglobulin and toll-interleukin 1 receptor (TIR) domain
  ENST ID: ENST00000528209
  CDS Start-End: 367-933
caccgcgcttggcgatgcatccatagcagccttggtgctgtggacactccctggggcccagcgaaggggagagtttgctcccaaaggcgcaccaatgaccaacatttgccccccggaggaaagaactggaaccagcctctgacctgtccaggtgccctgtccagctgactgcaaggacagagaggagtcctgcccagctcttggatcagtctgctggccgaggagcccggtggagccaggggtgaccctggagcccagcctgccccgaggaggccccggctcagagccatgccagggtcaaggccaacctgtcagaggtgcttgtgtccagtgtcctgggggtcaacgtgaccagcactgaagtctatggggccttcacctgctccatccagaacatcagcttctcctccttcactcttcagagagctggccctacaagccacgtggctgcggtgctggcctccctcctggtcctgctggccctgctgctggccgccctgctctatgtcaagtgccgtctcaacgtgctgctctgacgggaagctctacgacgcctacgtctcctacagcgactgccccgaggaccgcaagttcgtgaacttcatcctaaagccgcagctggagcggcgtcggggctacaagctcttcctggacgaccgcgacctcctgccgcgcgctgagccctccgccgacctcttggtgaacctgagccgctgccgacgcctcatcgtggtgctttcggacgccttcctgagccgggcctggtgcagccacagcttccgggagggcctgtgccggctgctggagctcacccgcagacccatcttcatcaccttcgagggccagaggcgcgaccccgcgcacccggcgctccgcctgctgcgccagcaccgccacctggtgaccttgctgctctggaggcccggctccgtg

SEQ ID NO: 181759 - DNA, 1533 bp, Homo sapiens
  Payload ID: 15797
  Gene Symbol: SSBP3
  Gene Name: single stranded DNA binding protein 3
  Uniprot ID: Q9BWW4
  ENST ID: ENST00000357475
  CDS Start-End: 216-1322
ccgcggccggggctgacgctttgacagctggaaagagcgcggagccagcgcctgggggggagggaggggagcgcggcgaggagagcgccagcgagcgagagagcgagcgagcgccggggagggggccgggagcgaggggcagctcgggagagccggagcggtagcggcggcggcggcggcggcggcgaggctcggcgccctcttccctgcaaaccatgtttgccaaaggcaaaggctcggcggtgccctcggatgggcaggctcgggaaaagttagctttatacgtctacgaatatttactgcacgtaggagcacagaaatctgcacagaccttcttatcggagattcgatgggaaaaaaacatcacgttgggagaaccgcctgggtttttgcactcgtggtggtgtgtattttgggacctttactgtgcagctcctgaaaggagagacacttgtgaacattcaagtgaagcaaaagcctttcatgattatagtgcagcagctgccccgagccccgtgcttggcaacattccccccaacgatgggatgccgggaggccccatcccgccaggtttctttcagggtcctccggggtcacagccctcgccgcacgcacagcctccacctcacaatcctagcagcatgatgggaccccacagtcagcctccgggaggagttcctgggacacagccattgctgcccaattctatggatcccacacgacaacaaggccaccccaacatgggaggatcaatgcagagaatgaaccctccccgaggcatggggcccatgggtcccggcccacagaattacggcagcggcatgagaccaccacccaactccctcggccccgccatgcccgggattaacatgggcccgggagctggcagaccctggcccaatcctaacagtgctaactcaattccatactcctcctcatcacctggtacctatgtgggaccccctggtggtggcggtcctccaggaacacccattatgcccagtcccgcagattcaacaaattccagtgacaacatctacacaatgattaatccagtgccgcctggaggcagccggtccaacttcccgatgggtcccggctcggacggtccgatgggcggcatgggtggcatggagccacaccacatgaatggatcattagggtcaggcgacatagacggacttccaaaaaattctcctaacaacataagtggcattagcaatcctccaggcacccctcgagatgacggcgagctaggagggaacttcctccactcctttcagaacgacaattattctccaagcatgacgatgagtgtgtgatccccccttctccgagacgctgagagagcaggcattgcaggcgggaagatgccagaaattatgcaagaagtgaggtgtcattatccaggagctggtggggagggcatctccctgctcccctcaaccccctcccaccccatccacgccccctacctttcccaattttagtttcatgcaataaaaaggccaaactttttattccataaaacaa

SEQ ID NO: 181760 - DNA, 1578 bp, Homo sapiens
  Payload ID: 15797
  Gene Symbol: SSBP3
  Gene Name: single stranded DNA binding protein 3
  Uniprot ID: Q9BWW4
  ENST ID: ENST00000371319
  CDS Start-End: 1-1086
atgtttgccaaaggcaaaggctcggcggtgccctcggatgggcaggctcgggaaaagttagctttatacgtctacgaatatttactgcacgtaggagcacagaaatctgcacagaccttcttatcggagattcgatgggaaaaaaacatcacgttgggagaaccgcctgggtttttgcactcgtggtggtgtgtattttgggacctttactgtgcagctcctgaaaggagagacacttgtgaacattcaagtgaagcaaaagcctttcatgattatagtgcagcagctgccccgagccccgtgcttggcaacattccccccaacgatgggatgccgggaggccccatcccgccaggtttctttcagccttttatgtcaccgcgatacgcaggcggccccaggcccccgatcagaatgggaaaccagcctccgggaggagttcctgggacacagccattgctgcccaattctatggatcccacacgacaacaaggccaccccaacatgggaggatcaatgcagagaatgaaccctccccgaggcatggggcccatgggtcccggcccacagaattacggcagcggcatgagaccaccacccaactccctcggccccgccatgcccgggattaacatgggcccgggagctggcagaccctggcccaatcctaacagtgctaactcaattccatactcctcctcatcacctggtacctatgtgggaccccctggtggtggcggtcctccaggaacacccattatgcccagtcccgcagattcaacaaattccagtgacaacatctacacaatgattaatccagtgccgcctggaggcagccggtccaacttcccgatgggtcccggctcggacggtccgatgggcggcatgggtggcatggagccacaccacatgaatggatcattagggtcaggcgacatagacggacttccaaaaaattctcctaacaacataagtggcattagcaatcctccaggcacccctcgagatgacggcgagctaggagggaacttcctccactcctttcagaacgacaattattctccaagcatgacgatgagtgtgtgatccccccttctccgagacgctgagagagcaggcattgcaggcgggaagatgccagaaattatgcaagaagtgaggtgtcattatccaggagctggtggggagggcatctccctgctcccctcaaccccctcccaccccatccacgccccctacctttcccaattttagtttcatgcaataaaaaggccaaactttttattccataaaacaagaaggacaaaactctcaaaaatgtatttcaagtcagtgaccagaaaaatcccaccccttgccctttccccaaaggaccttttctgtacatgacacttttttgttgttttttgtttggggttttaccattgttgggatttttttatttgttttcaggggggttttttgggggaaaatttttttaaatggaagcttctagcaagccccccaccccaatcaacctctatgctttcttcttaaaaaaaaaaaaaaaggaaaaaggaaaaaaaaaaaaggaaaacc

SEQ ID NO: 181761 - DNA, 2077 bp, Homo sapiens
  Payload ID: 15797
  Gene Symbol: SSBP3
  Gene Name: single stranded DNA binding protein 3
  Uniprot ID: Q9BWW4
  ENST ID: ENST00000371320
  CDS Start-End: 412-1578
agccacgttcggttgagctccaagtagaccagcggcggcggcggcggcggcggcggcagcggtgctggaggcgcagagggcggcgcaggcggagccgggcgggcgcgcgagcgagcggagagcgggcggccgtgcgggcggcggcggcggcacccccaggccgagccggcgcggaaggagttccagggcgatggggccgcggccggggctgacgctttgacagctggaaagagcgcggagccagcgcctgggggggagggaggggagcgcggcgaggagagcgccagcgagcgagagagcgagcgagcgccggggagggggccgggagcgaggggcagctcgggagagccggagcggtagcggcggcggcggcggcggcggcgaggctcggcgccctcttccctgcaaaccatgtttgccaaaggcaaaggctcggcggtgccctcggatgggcaggctcgggaaaagttagctttatacgtctacgaatatttactgcacgtaggagcacagaaatctgcacagaccttcttatcggagattcgatgggaaaaaaacatcacgttgggagaaccgcctgggtttttgcactcgtggtggtgtgtattttgggacctttactgtgcagctcctgaaaggagagacacttgtgaacattcaagtgaagcaaaagcctttcatgattatagtgcagcagctgccccgagccccgtgcttggcaacattccccccaacgatgggatgccgggaggccccatcccgccaggtttctttcagggtcctccggggtcacagccctcgccgcacgcacagcctccacctcacaatcctagcagcatgatgggaccccacagtcagccttttatgtcaccgcgatacgcaggcggccccaggcccccgatcagaatgggaaaccagcctccgggaggagttcctgggacacagccattgctgcccaattctatggatcccacacgacaacaaggccaccccaacatgggaggatcaatgcagagaatgaaccctccccgaggcatggggcccatgggtcccggcccacagaattacggcagcggcatgagaccaccacccaactccctcggccccgccatgcccgggattaacatgggcccgggagctggcagaccctggcccaatcctaacagtgctaactcaattccatactcctcctcatcacctggtacctatgtgggaccccctggtggtggcggtcctccaggaacacccattatgcccagtcccgcagattcaacaaattccagtgacaacatctacacaatgattaatccagtgccgcctggaggcagccggtccaacttcccgatgggtcccggctcggacggtccgatgggcggcatgggtggcatggagccacaccacatgaatggatcattagggtcaggcgacatagacggacttccaaaaaattctcctaacaacataagtggcattagcaatcctccaggcacccctcgagatgacggcgagctaggagggaacttcctccactcctttcagaacgacaattattctccaagcatgacgatgagtgtgtgatccccccttctccgagacgctgagagagcaggcattgcaggcgggaagatgccagaaattatgcaagaagtgaggtgtcattatccaggagctggtggggagggcatctccctgctcccctcaaccccctcccaccccatccacgccccctacctttcccaattttagtttcatgcaataaaaaggccaaactttttattccataaaacaagaaggacaaaactctcaaaaatgtatttcaagtcagtgaccagaaaaatcccaccccttgccctttccccaaaggaccttttctgtacatgacacttttttgttgttttttgtttggggttttaccattgttgggatttttttatttgttttcaggggggttttttgggggaaaatttttttaaatggaagcttctagcaagccccccaccccaatcaacctctatgctttcttcttaaaaaaaaaaaaaaaggaaaaaggaaaaaaaaaaaaggaaaaccagaagcc

SEQ ID NO: 181762 - DNA, 560 bp, Homo sapiens
  Payload ID: 15797
  Gene Symbol: SSBP3
  Gene Name: single stranded DNA binding protein 3
  ENST ID: ENST00000444533
  CDS Start-End: 1-471
cctccgggaggagttcctgggacacagccattgctgcccaattctatggatcccacacgacaacaaggccaccccaacatgggaggatcaatgcagagaatgaaccctccccgaggcatggggcccatgggtcccggcccacagaattacggcagcggcatgagaccaccacccaactccctcggccccgccatgcccgggattaacatgggcccgggagctggcagaccctggcccaatcctaacagtgctaactcaattccatactcctcctcatcacctggtacctatgtgggaccccctggtggtggcggtcctccaggaacacccattatgcccagtcccgcagattcaacaaattccagtgacaacatctacacaatgattaatccagtgccgcctggaggcagccggtccaacgtaagtctgctttctaataatttacatatcagacaccataacaaatcataattaacttcatcagctgaggggaaagcaagtttaattgatttcagccatttgttaccaaagatgaataaaataaaccgtcagaaaagtga

SEQ ID NO: 181763 - DNA, 1666 bp, Homo sapiens
  Payload ID: 15797
  Gene Symbol: SSBP3
  Gene Name: single stranded DNA binding protein 3
  ENST ID: ENST00000417664
  CDS Start-End: 331-1167
gggggctttgttcggccgggagcgctctcccttccctgtcctcggcttcgtcaccggttagctttatacgtctacgaatatttactgcacgtaggagcacagaaatctgcacagaccttcttatcggagattcgatgggaaaaaaacatcacgttgggagaaccgcctgggtttttgcactcgtggtggtgtgtattttgggacctttactgtgcagctcctgaaaggagagacacttgtgaacattcaagtgaagcaaaagcctttcatgattatagtgcagcagctgccccgagccccgtgcttggcaacattccccccaacgatgggatgccgggaggccccatcccgccaggtttctttcagggtcctccggggtcacagccctcgccgcacgcacagcctccacctcacaatcctagcagcatgatgggaccccacagtcagccttttatgtcaccgcgatacgcaggcggccccaggcccccgatcagaatgggaaaccagcctccgggaggagttcctgggacacagccattgctgcccaattctatggatcccacacgacaacaaggccaccccaacatgggaggatcaatgcagagaatgaaccctccccgaggcatggggcccatgggtcccggcccacagaattacggcagcggcatgagaccaccacccaactccctcggccccgccatgcccgggattaacatgggcccgggagctggcagaccctggcccaatcctaacagtgctaactcaattccatactcctcctcatcacctggtacctatgtgggaccccctggtggtggcggtcctccaggaacacccattatgcccagtcccgcagattcaacaaattccagtgacaacatctacacaatgattaatccagtgccgcctggaggcagccggtccaacttcccgatgggtcccggctcggacggtccgatgggcggcatgggtggcatggagccacaccacatgaatggatcattagggtcaggcgacatagacggacttccaaaaaattctcctaacaacataagtggcattagcaatcctccaggcacccctcgagatgacggcgagctaggagggaacttcctccactcctttcagaacgacaattattctccaagcatgacgatgagtgtgtgatccccccttctccgagacgctgagagagcaggcattgcaggcgggaagatgccagaaattatgcaagaagtgaggtgtcattatccaggagctggtggggagggcatctccctgctcccctcaaccccctcccaccccatccacgccccctacctttcccaattttagtttcatgcaataaaaaggccaaactttttattccataaaacaagaaggacaaaactctcaaaaatgtatttcaagtcagtgaccagaaaaatcccaccccttgccctttccccaaaggaccttttctgtacatgacacttttttgttgttttttgtttggggttttaccattgttgggatttttttatttgttttcaggggggttttttgggggaaaatttttttaaatggaagcttctagcaagccccccaccccaatcaacctctatgctttcttcttaaaaaaaaaaaaaaaggaaaaaggaaaaaaaaaaaaggaaaaccagaagcc

SEQ ID NO: 181764 - DNA, 701 bp, Homo sapiens
  Payload ID: 15797
  Gene Symbol: SSBP3
  Gene Name: single stranded DNA binding protein 3
  ENST ID: ENST00000525990
  CDS Start-End: 399-701
cttttactctggaaagaacatgacagacatcctctgcccttcagcctgtgccccagaatgagagacccatgggacagactcaagctgtaccctgaagcagagctgcccagttgactgcagacctgttagctttatacgtctacgaatatttactgcacgtaggagcacagaaatctgcacagaccttcttatcggagattcgatgggaaaaaaacatcacgttgggagaaccgcctgggtttttgcactcgtggtggtgtgtattttgggacctttactgtgcagctcctgaaaggagagacacttgtgaacattcaagtgaagcaaaagcctttcatgattatagtgcagcagctgccccgagccccgtgcttggcaacattccccccaacgatgggatgccgggaggccccatcccgccaggtttctttcagccttttatgtcaccgcgatacgcaggcggccccaggcccccgatcagaatgggaaaccagcctccgggaggagttcctgggacacagccattgctgcccaattctatggatcccacacgacaacaaggccaccccaacatgggaggatcaatgcagagaatgaaccctccccgaggcatggggcccatgggtcccggcccacagaattacggcagcggcatgagaccaccacccaactccctcggccccgccatgcccgggattaac

SEQ ID NO: 181765 - DNA, 3168 bp, Homo sapiens
  Payload ID: 15797
  Gene Symbol: SSBP3
  Gene Name: single stranded DNA binding protein 3
  ENST ID: ENST00000610401
  CDS Start-End: 412-1494
tagaccagcggcggcggcggcggcggcggcggcagcggtgctggaggcgcagagggcggcgcaggcggagccgggcgggcgcgcgagcgagcggagagcgggcggccgtgcgggcggcggcggcggcacccccaggccgagccggcgcggaaggagttccagggcgatggggccgcggccggggctgacgctttgacagctggaaagagcgcggagccagcgcctgggggggagggaggggagcgcggcgaggagagcgccagcgagcgagagagcgagcgagcgccggggagggggccgggagcgaggggcagctcgggagagccggagcggtagcggcggcggcggcggcggcggcgaggctcggcgccctcttccctgcaaaccatgtttgccaaaggcaaaggctcggcggtgccctcggatgggcaggctcgggaaaagttagctttatacgtctacgaatatttactgcacgtaggagcacagaaatctgcacagaccttcttatcggagattcgatgggaaaaaaacatcacgttgggagaaccgcctgggtttttgcactcgtggtggtgtgtattttgggacctttactgtgcagctcctgaaaggagagacacttgtgaacattcaagtgaagcaaaagcctttcatgattatagtgcagcagctgccccgagccccgtgcttggcaacattccccccaacgatgggatgccgggaggccccatcccgccaggtttctttcagccttttatgtcaccgcgatacgcaggcggccccaggcccccgatcagaatgggaaaccagcctccgggaggagttcctgggacacagccattgctgcccaattctatggatcccacacgacaacaaggccaccccaacatgggaggatcaatgcagagaatgaaccctccccgaggcatggggcccatgggtcccggcccacagaattacggcagcggcatgagaccaccacccaactccctcggccccgccatgcccgggattaacatgggcccgggagctggcagaccctggcccaatcctaacagtgctaactcaattccatactcctcctcatcacctggtacctatgtgggaccccctggtggtggcggtcctccaggaacacccattatgcccagtcccgcagattcaacaaattccagtgacaacatctacacaatgattaatccagtgccgcctggaggcagccggtccaacttcccgatgggtcccggctcggacggtccgatgggcggcatgggtggcatggagccacaccacatgaatggatcattagggtcaggcgacatagacggacttccaaaaaattctcctaacaacataagtggcattagcaatcctccaggcacccctcgagatgacggcgagctaggagggaacttcctccactcctttcagaacgacaattattctccaagcatgacgatgagtgtgtccccccttctccgagacgctgagagagcaggcattgcaggcgggaagatgccagaaattatgcaagaagtgaggtgtcattatccaggagctggtggggagggcatctccctgctcccctcaaccccctcccaccccatccacgccccctacctttcccaattttagtttcatgcaataaaaaggccaaactttttattccataaaacaagaaggacaaaactctcaaaaatgtatttcaagtcagtgaccagaaaaatcccaccccttgccctttccccaaaggaccttttctgtacatgacacttttttgttgttttttgtttggggttttaccattgttgggatttttttatttgttttcaggggggttttttgggggaaaatttttttaaatggaagcttctagcaagccccccaccccaatcaacctctatgctttcttcttaaaaaaaaaaaaaaaggaaaaaggaaaaaaaaaaaaggaaaaccagaagccctgctgtctgtctgtgcccaagcccttccaccagaaaagctagtctaggtgtgagagcccacattgtctgtagccatcaaaaataataataataaactggacagtttacaatcgttggtttctttcaaaaggccttttttggaaagaagaaaaggcagtcaccgttttccacttggggttttggtttgtgcaacaggcaggggaggagtggggacgcgtttgttctagcttgatttccatggcaacagcagcggcacgcttggaccccagaacccagcaccctcatcctgtggccagaggggccggaccactgacccctttcaggattccaccacagcccagaccgtcaccgtgacccggtggcatgcactgttcccaggacaccctcctcctctcctggacctcccttccgtcctggcctccctgcctctccagcccctcctctgcccccaccccagtcttcccagtgagaatcctgccagctgggtggtggcctggcgcagagtgggagaggctgccactgacaggatggctatgacctgggacatggaaacagtgacctccgcgttctggtcccgagatcctcgcatcagcgtcatcgtgtgcaccggcttggggggctggagttccggttttctttgttttttctctttattcgtcctttctcaaagatgggatactgatcagaattgctctgtatatgcttgggactggatggaaagactttggagcagctgtggggggtggggggacaccgacaaccaaacagacgtgctggctccagtcctgtttttactttcaaaaaccaacaagcccgacagtggagcctgtcccctcccgggagggtgctcatggccccactcacctcatcaccccacggaaacctttgtgtcttgccctggaagacacccgaattctttgtacattgacatgcccttctccttcctccctcccctgtagctggtctttgttttactccctccctttctgatccatgtatatcatattatgtgagatatcatctgcctgaaaaaagactttgtgcggattattgggaacattgtagctgtttctgtgttttttcttaccttgtagtctggttctgaattaagagaggaaaaaaaagtaattatgatacattgtagtttgtgtacgatatatgttgataacgttttattaaagggacatcttttttccgc

SEQ ID NO: 181766 - DNA, 1721 bp, Homo sapiens
  Payload ID: 15798
  Gene Symbol: SSBP4
  Gene Name: single stranded DNA binding protein 4
  Uniprot ID: Q9BWG4
  ENST ID: ENST00000348495
  CDS Start-End: 314-1405
cgcccgcgggcggcgtagaggcagcgggcgggggcgcgcgcggcgggaggaggggagcgcgcgtttcccggaacagcccgcgcggaggaaagggaggaaaaaaagccaccctgcggccggggccggagctggagccgccgctgccgccgccgccgcggccgtctggagctcccccgcgcggacgatgcctgccgtgcccgcctggggctcggggcggtgaggcccggggcgcggggtagctatggcgacggcaagcgcggcccgcggcgccgcctgacaggtgtgggccccggcggcggcggcgtggagcagcatgtacgccaaggggggcaagggttcggccgtgccctccgacagccaggcccgcgagaagttggcgctgtacgtttatgagtacctgctgcacatcggtgcccagaagtcagcccagaccttcctgtctgagatccgatgggagaagaacatcacgctgggggagccccctgggttcctgcactcctggtggtgcgtcttctgggacctgtactgcgcggcgcctgacagaagagaggcctgcgagcactccggcgaggccaaggccttccaggactatagtgctgcagccgcccccagccccgttatggggagtatggccccaggtgacacaatggccgcaggctccatggcggctggcttcttccagcccttcatgtcaccgcgcttcccagggggcccccggcccaccctgcggatgccgagtcagcctcccgcaggcctccctggctcccagcccctcctccctggcgccatggagccctccccacgagcccaggggcatccgagcatgggcggcccaatgcagagggtgacgcctcctcgtggcatggccagcgtggggccccagagctatggaggtggcatgcgacccccacccaactccctcgccggcccaggcctgcctgccatgaacatgggcccaggagttcgtggcccgtgggccagccccagtggaaactcgatcccctactcctcctcatcccccggcagctacaccggacccccaggaggaggtgggccccctggaacacccatcatgcctagccctggagattccaccaactccagcgaaaacatgtacactatcatgaaccccatcgggcagggcgccggcagggctaatttcccgctcggccctggcccggagggccccatggccgccatgagcgcgatggagcctcaccacgtgaacggatccctgggctcgggcgacatggacgggttgccgaagagttcccccggcgccgtggccggcctgagcaacgccccgggcaccccgcgggacgacggcgagatggcggccgccgggaccttcctgcacccgttcccgagcgaaagctactcgccagggatgaccatgagcgtgtgatggggcggcagccccgggcctctctgcgggcctaggcttctgcccagcgcccctgctcagggcgaggggctgaggtcacacctcgggcacctggactcctggccaatcaaggcttgcccagctgggaggccccacacgaaagactcttaccattttattaaaaacgcaaggacctcagagacgttcttttctgtatggacccttcctgccatttgtattttgtcccagagagaaaggctctttggggggcccctctccccaggacgtcagggggtggggcccataaataaatggaagctggttttggtttttggta

SEQ ID NO: 181767 - DNA, 1768 bp, Homo sapiens
  Payload ID: 15798
  Gene Symbol: SSBP4
  Gene Name: single stranded DNA binding protein 4
  Uniprot ID: Q9BWG4
  ENST ID: ENST00000270061
  CDS Start-End: 295-1452
ggcagcgggcgggggcgcgcgcggcgggaggaggggagcgcgcgtttcccggaacagcccgcgcggaggaaagggaggaaaaaaagccaccctgcggccggggccggagctggagccgccgctgccgccgccgccgcggccgtctggagctcccccgcgcggacgatgcctgccgtgcccgcctggggctcggggcggtgaggcccggggcgcggggtagctatggcgacggcaagcgcggcccgcggcgccgcctgacaggtgtgggccccggcggcggcggcgtggagcagcatgtacgccaaggggggcaagggttcggccgtgccctccgacagccaggcccgcgagaagttggcgctgtacgtttatgagtacctgctgcacatcggtgcccagaagtcagcccagaccttcctgtctgagatccgatgggagaagaacatcacgctgggggagccccctgggttcctgcactcctggtggtgcgtcttctgggacctgtactgcgcggcgcctgacagaagagaggcctgcgagcactccggcgaggccaaggccttccaggactatagtgctgcagccgcccccagccccgttatggggagtatggccccaggtgacacaatggccgcaggctccatggcggctggcttcttccagggcccccccggctcccagccgtccccccacaaccccaacgcccccatgatggggcctcacggtcagcccttcatgtcaccgcgcttcccagggggcccccggcccaccctgcggatgccgagtcagcctcccgcaggcctccctggctcccagcccctcctccctggcgccatggagccctccccacgagcccaggggcatccgagcatgggcggcccaatgcagagggtgacgcctcctcgtggcatggccagcgtggggccccagagctatggaggtggcatgcgacccccacccaactccctcgccggcccaggcctgcctgccatgaacatgggcccaggagttcgtggcccgtgggccagccccagtggaaactcgatcccctactcctcctcatcccccggcagctacaccggacccccaggaggaggtgggccccctggaacacccatcatgcctagccctggagattccaccaactccagcgaaaacatgtacactatcatgaaccccatcgggcagggcgccggcagggctaatttcccgctcggccctggcccggagggccccatggccgccatgagcgcgatggagcctcaccacgtgaacggatccctgggctcgggcgacatggacgggttgccgaagagttcccccggcgccgtggccggcctgagcaacgccccgggcaccccgcgggacgacggcgagatggcggccgccgggaccttcctgcacccgttcccgagcgaaagctactcgccagggatgaccatgagcgtgtgatggggcggcagccccgggcctctctgcgggcctaggcttctgcccagcgcccctgctcagggcgaggggctgaggtcacacctcgggcacctggactcctggccaatcaaggcttgcccagctgggaggccccacacgaaagactcttaccattttattaaaaacgcaaggacctcagagacgttcttttctgtatggacccttcctgccatttgtattttgtcccagagagaaaggctctttggggggcccctctccccaggacgtcagggggtggggcccataaataaatggaagctggttttggtttttggta

SEQ ID NO: 181768 - DNA, 628 bp, Homo sapiens
  Payload ID: 15798
  Gene Symbol: SSBP4
  Gene Name: single stranded DNA binding protein 4
  ENST ID: ENST00000601614
  CDS Start-End: 26-187
cccggcggcggcggcgtggagcagcatgtacgccaaggggggcaagggttcggccgtgccctccgacagccaggcccgcgagaagtattgcctgtctctgtctctcccctcaagaacatggcctccaggacaggggccgggtgtgtgcactgcgcaaaaggcacttcatggatgctggaggaactaatgaagaagtgaatgaacgaaggaggggaggcaggatgagatttggggcaagggcagtgcccatgaggaccaggttggcgctgtacgtttatgagtacctgctgcacatcggtgcccagaagtcagcccagaccttcctgtctgagatccgatgggagaagaacatcacgctgggggagccccctgggttcctgcactcctggtggtgcgtcttctgggacctgtactgcgcggcgcctgacagaagagaggcctgcgagcactccggcgaggccaaggccttccaggactatagtgctgcagccgcccccagccccgttatggggagtatggccccaggtgacacaatggccgcaggctccatggcggctggcttcttccagcccttcatgtcaccgcgcttcccagggggcccccggcccaccctgcggatgccgagtca

SEQ ID NO: 181769 - DNA, 900 bp, Homo sapiens
  Payload ID: 15798
  Gene Symbol: SSBP4
  Gene Name: single stranded DNA binding protein 4
  ENST ID: ENST00000593641
  CDS Start-End: 1-619
gcctgccatgaacatgggcccaggagttcgtggcccgtgggccagccccagtggaaactcgatcccctactcctcctcatcccccggcagctacaccggacccccaggaggaggtgggccccctggaacacccatcatgcctagccctggagattccaccaactccagcgaaaacatgtacactatcatgaaccccatcgggcagggcgccggcagggctaatttcccgctcggccctggcccggagggccccatggccgccatgagcgcgatggagcctcaccacgtgaacggatccctgggctcgggcgacatggacgggttgccgaagagttcccccggcgccgtggccggcctgagcaacgccccgggcaccccgcgggacgacggcgagatggcggccgccgggaccttcctgcacccgttcccgagcgaaagcgtaagcgactgcgtcgactccccccccgcggcggcgtcgggccggaggggctggcgggcaggccccggcggggcggccggggggccagagcaagaccgtgaccgcggcgggccagtactcgccagggatgaccatgagcgtgtgatggggcggcagccccgggcctctctgcgggcctaggcttctgcccagcgcccctgctcagggcgaggggctgaggtcacacctcgggcacctggactcctggccaatcaaggcttgcccagctgggaggccccacacgaaagactcttaccattttattaaaaacgcaaggacctcagagacgttcttttctgtatggacccttcctgccatttgtattttgtcccagagagaaaggctctttggggggcccctctccccaggacgtcagggggtggggcccataaataaatggaagctggttttggtttttggta

SEQ ID NO: 181770 - DNA, 865 bp, Homo sapiens
  Payload ID: 15798
  Gene Symbol: SSBP4
  Gene Name: single stranded DNA binding protein 4
  ENST ID: ENST00000597724
  CDS Start-End: 162-865
gcggtggcctgtgtttagttgttccaggacggccactgtgagctgggtgtgtggcagtgtatgtgtgtcgctgggcgggctgtatgtgcggtggttcccacccttgctgagtgtgggtagctctgcggggtgagacacccaatgtcactgcctgaggctttatggggctatccgcagtcgttccagcagcggggtacacttttgctgtgtggagcgctatgttgagtgtcgctgcgaatgtgtgtggctgggtgtacaacaatgtgggtggccggctccatttgaggttggcgctgtacgtttatgagtacctgctgcacatcggtgcccagaagtcagcccagaccttcctgtctgagatccgatgggagaagaacatcacgctgggggagccccctgggttcctgcactcctggtggtgcgtcttctgggacctgtactgcgcggcgcctgacagaagagaggcctgcgagcactccggcgaggccaaggccttccaggactatagtgctgcagccgcccccagccccgttatggggagtatggccccaggtgacacaatggccgcaggctccatggcggctggcttcttccagcccttcatgtcaccgcgcttcccagggggcccccggcccaccctgcggatgccgagtcagcctcccgcaggcctccctggctcccagcccctcctccctggcgccatggagccctccccacgagcccaggggcatccgagcatgggcggcccaatgcagagggtgacgcctcctcgtggcatggccagcgtggggccccagagctatggaggtggcatgcgacccccacccaactccctcgccggcccaggcctgcctgccatgaacat

SEQ ID NO: 181771 - DNA, 606 bp, Homo sapiens
  Payload ID: 15798
  Gene Symbol: SSBP4
  Gene Name: single stranded DNA binding protein 4
  ENST ID: ENST00000601357
  CDS Start-End: 438-606
agggaggaaaaaaagccaccctgcggccggggccggagctggagccgccgctgccgccgccgccgcggccgtctggagctcccccgcgcggacgatgcctgccgtgcccgcctggggctcggggcggtgaggcccggggcgcggggtagctatggcgacggcaagcgcggcccgcggcgccgcctgacaggttggcgctgtacgtttatgagtacctgctgcacatcggtgcccagaagtcagcccagaccttcctgtctgagatccgatgggagaagaacatcacgctgggggagccccctgggttcctgcactcctggtggtgcgtcttctgggacctgtactgcgcggcgcctgacagaagagaggcctgcgagcactccggcgaggccaaggccttccaggactatagtgctgcagccgcccccagccccgttatggggagtatggccccaggtgacacaatggccgcaggctccatggcggctggcttcttccagcccttcatgtcaccgcgcttcccagggggcccccggcccaccctgcggatgccgagtcagcctcccgcaggcctccctggctcccagcccctcctccctggcgcca

SEQ ID NO: 181772 - DNA, 622 bp, Homo sapiens
  Payload ID: 15798
  Gene Symbol: SSBP4
  Gene Name: single stranded DNA binding protein 4
  ENST ID: ENST00000602088
  CDS Start-End: 270-622
ctgcggacgcatggggatcgaggttggcgctgtacgtttatgagtacctgctgcacatcggtgcccagaagtcagcccagaccttcctgtctgagatccgatgggagaagaacatcacgctgggggagccccctgggttcctgcactcctggtggtgcgtcttctgggacctgtactgcgcggcgcctgacagaagagaggcctgcgagcactccggcgaggccaaggccttccaggactatagtgctgcagccgcccccagccccgttatggggagtatggccccaggtgacacaatggccgcaggctccatggcggctggcttcttccagcccttcatgtcaccgcgcttcccagggggcccccggcccaccctgcggatgccgagtcagcctcccgcaggcctccctggctcccagcccctcctccctggcgccatggagccctccccacgagcccaggggcatccgagcatgggcggcccaatgcagagggtgacgcctcctcgtggcatggccagcgtggggccccagagctatggaggtggcatgcgacccccacccaactccctcgccggcccaggcctgcctgccatgaacatgggcccaggagttcgtggccc

SEQ ID NO: 181773 - DNA, 504 bp, Homo sapiens
  Payload ID: 15798
  Gene Symbol: SSBP4
  Gene Name: single stranded DNA binding protein 4
  ENST ID: ENST00000607020
  CDS Start-End: 44-208
cgcctgacaggtgtgggccccggcggcggcggcgtggagcagcatgtacgccaaggggggcaagggttcggccgtgccctccgacagccaggcccgcgagaagttggcgctgtacgtttatgagtacctgctgcacatcggtgcccagaagtcagcccagaccttcctgtctgagcgtcttctgggacctgtactgcgcggcgcctgacagaagagaggcctgcgagcactccggcgaggccaaggccttccaggactatagtgctgcagccgcccccagccccgttatggggagtatggccccaggtgacacaatggccgcaggctccatggcggctggcttcttccagcccttcatgtcaccgcgcttcccagggggcccccggcccaccctgcggatgccgagtcagcctcccgcaggcctccctggctcccagcccctcctccctggcgccatggagccctccccacgagcccaggggcatccgagcatgggcggcccaa

SEQ ID NO: 181774 - DNA, 793 bp, Homo sapiens
  Payload ID: 15798
  Gene Symbol: SSBP4
  Gene Name: single stranded DNA binding protein 4
  ENST ID: ENST00000599699
  CDS Start-End: 262-477
ttccccctgccgtcagcccgcctgccgggtggaggcgtctagtggcgtcctgagccccccgggggccgctcagtgacaggggctgccccgagctggagggggatccagcgaccaaaccagaggatgcactgaccgcccctcccccccaggcccaaccctccacctggcctcagtcccggggttcctggcgggctgtgcggggcgggggcgcgtcggcgggggcagcttgcgagggtcgttggcccctggaggccgaggggcatggcgccagcacgtctgagccggtgcccgtgtctgtccgtgtctgtaggctcgggcgacatggacgggttgccgaagagttcccccggcgccgtggccggcctgagcaacgccccgggcaccccgcgggacgacggcgagatggcggccgccgggaccttcctgcacccgttcccgagcgaaagctactcgccagggatgaccatgagcgtgtgatggggcggcagccccgggcctctctgcgggcctaggcttctgcccagcgcccctgctcagggcgaggggctgaggtcacacctcgggcacctggactcctggccaatcaaggcttgcccagctgggaggccccacacgaaagactcttaccattttattaaaaacgcaaggacctcagagacgttcttttctgtatggacccttcctgccatttgtattttgtcccagagagaaaggctctttggggggcccctctccccaggacgtcagggggtggggcccataaataaatggaagctggttttggtttttggta

SEQ ID NO: 181775 - DNA, 162 bp, Homo sapiens
  Payload ID: 15798
  Gene Symbol: SSBP4
  Gene Name: single stranded DNA binding protein 4
  ENST ID: ENST00000625926
  CDS Start-End: 1-162
atgtacgccaaggggggcaagggttcggccgtgccctccgacagccaggcccgcgagaagtattgcctgtctctgtctctcccctcaagaacatggcctccaggacaggggccgggtgtgtgcactgcgcaaaaggcacttcatggatgctggaggaactaa

SEQ ID NO: 181776 - DNA, 3999 bp, Homo sapiens
  Payload ID: 15799
  Gene Symbol: SIM1
  Gene Name: single-minded family bHLH transcription factor 1
  Uniprot ID: P81133
  ENST ID: ENST00000262901
  CDS Start-End: 210-2510
cccgaattttcaaagaacatattttccgttcacccccgctggtcttttactgccatcaatacactgttcttggtgcaaatacttcagcctctttattcaaagtatgttttatgtttttgccaaatatgatctctaattgaaagtttatttttggttttggatgaatctgcggagcttaagttgtgagaagaaagggggaacaagacacaatgaaagaaaagtccaaaaatgctgcgcggactaggagggagaaggaaaacagtgaattttatgaactggctaaattactgcctttgccctcggctatcacctcgcagctggacaaagcatccataatcagactcacgaccagctatctcaaaatgagagtggtgttcccagaagggctcggcgaggcgtggggccactcaagtcggaccagccccctggacaacgttggccgagaactgggctcccatctgctccagaccctggatggcttcatcttcgtggtagccccagatgggaagatcatgtacatctcagagacagcctcagtccacttgggtctttctcaggtagagctgaccggaaacagcatttatgaatacattcacccggcagaccacgacgagatgacggcggtgctcaccgcccatcaaccctaccactctcacttcgtgcaggagtatgagatcgagcgctccttcttcctgaggatgaagtgcgtcttggccaagcgtaacgccggcctcacctgtggcggctacaaggtcatccactgcagcggctacttgaagatccgccagtacagcctggacatgtcccccttcgacggctgctaccaaaacgtgggcctggtggccgtgggccactcgctgcctcccagcgccgtcacggagatcaagctacacagcaatatgtttatgttccgcgccagcctggacatgaagctcatctttctggactccagggtggcggagctgacggggtacgaacctcaggacctgattgagaagactctgtaccaccatgtgcacggctgcgacaccttccacctgcgctgcgcgcaccatttgctgctggtgaagggacaggtgaccaccaagtactacaggttcctggcgaaacacggcggctgggtatgggtgcagagctacgcgaccatcgtgcacaacagtcgctcctccaggccacactgtatcgtcagcgtcaactatgtcctcacagacacagaatacaaagggctgcagctctccctggatcagatctcagcctccaaaccagccttctcctataccagcagctccacccccaccatgactgacaacagaaagggggccaaatcccggctctccagctcaaagtcaaaatccaggacttccccataccctcagtattcgggatttcacacagaaagatcggaatctgatcatgacagccagtggggcggaagtcccttgaccgacacggcctctccgcagcttctggaccccgccgataggcctggctcccagcacgacgcatcgtgcgcctacagacagttttcggaccgcagctctctctgctatggctttgcgcttgaccactcgaggctggtggaagagaggcatttccatacccaggcctgtgaaggaggccgatgtgaggcaggcaggtacttcctgggaacgccgcaggccgggagggagccctggtggggctctcgcgcagccttgcccctgacaaaggcctccccagaaagcagagaagcctatgaaaacagcatgcctcacatcgcttcagtccacaggatccatgggcgaggtcattgggatgaagatagtgtggtcagttctccagaccctgggtcggccagtgaatcaggtgaccgatatcgtactgagcagtatcaaagtagcccacatgaacccagcaaaattgaaactcttataagagccactcagcaaatgattaaagaagaagagaacagattacagctaaggaaagccccctcagaccaactggcttccattaatggggctgggaaaaaacactccctgtgttttgcaaactaccaacagcccccaccaacaggtgaagtctgccatggctctgctcttgccaacacttcaccatgtgaccatatccagcagagagagggaaaaatgttgagcccccatgaaaatgactatgacaacagtcccaccgcactatctcggataagtagtcccaattcggatcgcatttcaaaatccagtttgatcctagctaaagactatctgcattcggatatatctcctcatcagacagcaggagaccaccctactgtctctccaaactgctttggctctcaccggcagtattttgacaagcatgcttacacattaactggatatgccctggagcacttatatgacagcgaaaccattagaaactattccttgggctgtaatggctcacactttgatgtaacttcccatctgaggatgcaaccagacccagcacaaggacacaagggaacatctgttataataaccaacggaagctgatgttttgctgaaatattttgttctttaaggatctctgaaacatatttatagtttaataccccattaccagcatttactatgccacagattgttagagagtataacttaagttactgggtatttgatacgtgttcctataaaatcaaagaaaacatagcactagcattcagggttatacacagaaaagggagctaaattgaatacacaaatttcccctctaattatatgggaaccagaatagataaattttgacttgaaaaatattcatgtagatcaagtgtgcatatatactacatgagaggactgatgaatgacaacattgcattgtgactatccagtgatcctcaaacacacaaactattacttacaaactgcggtatacattttacatatggaaatataggctatgtaatgtaaatacatcaaaaatgggtaattttctttgactctgtcacactaaacttcttaacgaaatttccattcccaaaataactgagaaagagagagatacatcttataaactgacttctttgtggtttcaaatcagccagctcatttggttcaggcataaattagagaaatggttctggatatggtgcaaaaatgagttttcacctggtatccattataaacaatcaggaagaggtaatttttcaccttgcttttcagttagacaaggaccaggattgcactgacatggcgctgagggtttttctaagtaagaacactgagatattgggacacacatcaaaaacctggagtgctcaattggaagtagttctatgaatatggaaaggccagaggcagagtgaaataaaatgctatctcaaagtttaacacaatttaagggctcagcataagtaaacaacatatttggggtttgcttgtaaaaccaactaaataaaaaattcaaaccaattcacccagaaaaaagaccaataggtgcaaaaataaaaggaaaaccagtgaagtgccacatgacagcagtgttaagtgtttgaaaacgtttcaaagcacatatgtgccaatgtgacaacatgtggaaagcctcaggagagagtctaagataaaagcttaggctgatagacaagtagttaagagctaagagcagtactctgaaggaataggcaaaatgtttattttccttattgtttgtaaacaacaaacttggtcttacatctgtgtggtatagtagaaaggccagctgactagatctctggattctaattttggccctacctgtaacttaattttgtgaccacagttgtaccattcaccgtgcctgggctctagtttcctggtttgtaaggcagccccagcgttcatgttctgtgatagagcagaactgaacttattacctaattaactctctgctatgagttgtcaagactgatcattctgttttttctgtacacagaagtttagatgctttgtgacttaagcaggtgtgtgggctcctttaggcaggttacagttaactttctagatt

SEQ ID NO: 181777 - DNA, 8430 bp, Homo sapiens
  Payload ID: 15799
  Gene Symbol: SIM1
  Gene Name: single-minded family bHLH transcription factor 1
  Uniprot ID: P81133
  ENST ID: ENST00000369208
  CDS Start-End: 784-3084
aaacccttaagctataaagaagttacggggggcagttttcggcttccaattaggaataatagtgaactggcttcgtagcaactacggaggaccaggattctaaaatcacctcactcgtcccaaagcttgcatcctcctctttctgccacgcacccctcctccaattcatgatccagaaaagggagccgggaatgctctgctcctctctgccggtgggaagcggagaggccggcggtgtcgctgggttggacggtaggcatgagaacagttaagagatgggcgcccccgaaacctctgccgcttgtggggactgaagggccttgaaagagttgtctggggttcctgctcttcccaaaggggctcggagataccttaaatgccgcgagactgaagagcaaacgtcagggattattatgtcgattttccgaggaccagggttcgcagctggcagtagaagaaaaggctggctcctcaggggtcccactggcatttgataccctgaacgaccctcaggattgcccaaattcggtggatcgcccaaattcggtggatcagcaactttcctatactgcatcccgaattttcaaagaacatattttccgttcacccccgctggtcttttactgccatcaatacactgttcttggtgcaaatacttcagcctctttattcaaagtatgttttatgtttttgccaaatatgatctctaattgaaagtttatttttggttttggatgaatctgcggagcttaagttgtgagaagaaagggggaacaagacacaatgaaagaaaagtccaaaaatgctgcgcggactaggagggagaaggaaaacagtgaattttatgaactggctaaattactgcctttgccctcggctatcacctcgcagctggacaaagcatccataatcagactcacgaccagctatctcaaaatgagagtggtgttcccagaagggctcggcgaggcgtggggccactcaagtcggaccagccccctggacaacgttggccgagaactgggctcccatctgctccagaccctggatggcttcatcttcgtggtagccccagatgggaagatcatgtacatctcagagacagcctcagtccacttgggtctttctcaggtagagctgaccggaaacagcatttatgaatacattcacccggcagaccacgacgagatgacggcggtgctcaccgcccatcaaccctaccactctcacttcgtgcaggagtatgagatcgagcgctccttcttcctgaggatgaagtgcgtcttggccaagcgtaacgccggcctcacctgtggcggctacaaggtcatccactgcagcggctacttgaagatccgccagtacagcctggacatgtcccccttcgacggctgctaccaaaacgtgggcctggtggccgtgggccactcgctgcctcccagcgccgtcacggagatcaagctacacagcaatatgtttatgttccgcgccagcctggacatgaagctcatctttctggactccagggtggcggagctgacggggtacgaacctcaggacctgattgagaagactctgtaccaccatgtgcacggctgcgacaccttccacctgcgctgcgcgcaccatttgctgctggtgaagggacaggtgaccaccaagtactacaggttcctggcgaaacacggcggctgggtatgggtgcagagctacgcgaccatcgtgcacaacagtcgctcctccaggccacactgtatcgtcagcgtcaactatgtcctcacagacacagaatacaaagggctgcagctctccctggatcagatctcagcctccaaaccagccttctcctataccagcagctccacccccaccatgactgacaacagaaagggggccaaatcccggctctccagctcaaagtcaaaatccaggacttccccataccctcagtattcgggatttcacacagaaagatcggaatctgatcatgacagccagtggggcggaagtcccttgaccgacacggcctctccgcagcttctggaccccgccgataggcctggctcccagcacgacgcatcgtgcgcctacagacagttttcggaccgcagctctctctgctatggctttgcgcttgaccactcgaggctggtggaagagaggcatttccatacccaggcctgtgaaggaggccgatgtgaggcaggcaggtacttcctgggaacgccgcaggccgggagggagccctggtggggctctcgcgcagccttgcccctgacaaaggcctccccagaaagcagagaagcctatgaaaacagcatgcctcacatcgcttcagtccacaggatccatgggcgaggtcattgggatgaagatagtgtggtcagttctccagaccctgggtcggccagtgaatcaggtgaccgatatcgtactgagcagtatcaaagtagcccacatgaacccagcaaaattgaaactcttataagagccactcagcaaatgattaaagaagaagagaacagattacagctaaggaaagccccctcagaccaactggcttccattaatggggctgggaaaaaacactccctgtgttttgcaaactaccaacagcccccaccaacaggtgaagtctgccatggctctgctcttgccaacacttcaccatgtgaccatatccagcagagagagggaaaaatgttgagcccccatgaaaatgactatgacaacagtcccaccgcactatctcggataagtagtcccaattcggatcgcatttcaaaatccagtttgatcctagctaaagactatctgcattcggatatatctcctcatcagacagcaggagaccaccctactgtctctccaaactgctttggctctcaccggcagtattttgacaagcatgcttacacattaactggatatgccctggagcacttatatgacagcgaaaccattagaaactattccttgggctgtaatggctcacactttgatgtaacttcccatctgaggatgcaaccagacccagcacaaggacacaagggaacatctgttataataaccaacggaagctgatgttttgctgaaatattttgttctttaaggatctctgaaacatatttatagtttaataccccattaccagcatttactatgccacagattgttagagagtataacttaagttactgggtatttgatacgtgttcctataaaatcaaagaaaacatagcactagcattcagggttatacacagaaaagggagctaaattgaatacacaaatttcccctctaattatatgggaaccagaatagataaattttgacttgaaaaatattcatgtagatcaagtgtgcatatatactacatgagaggactgatgaatgacaacattgcattgtgactatccagtgatcctcaaacacacaaactattacttacaaactgcggtatacattttacatatggaaatataggctatgtaatgtaaatacatcaaaaatgggtaattttctttgactctgtcacactaaacttcttaacgaaatttccattcccaaaataactgagaaagagagagatacatcttataaactgacttctttgtggtttcaaatcagccagctcatttggttcaggcataaattagagaaatggttctggatatggtgcaaaaatgagttttcacctggtatccattataaacaatcaggaagaggtaatttttcaccttgcttttcagttagacaaggaccaggattgcactgacatggcgctgagggtttttctaagtaagaacactgagatattgggacacacatcaaaaacctggagtgctcaattggaagtagttctatgaatatggaaaggccagaggcagagtgaaataaaatgctatctcaaagtttaacacaatttaagggctcagcataagtaaacaacatatttggggtttgcttgtaaaaccaactaaataaaaaattcaaaccaattcacccagaaaaaagaccaataggtgcaaaaataaaaggaaaaccagtgaagtgccacatgacagcagtgttaagtgtttgaaaacgtttcaaagcacatatgtgccaatgtgacaacatgtggaaagcctcaggagagagtctaagataaaagcttaggctgatagacaagtagttaagagctaagagcagtactctgaaggaataggcaaaatgtttattttccttattgtttgtaaacaacaaacttggtcttacatctgtgtggtatagtagaaaggccagctgactagatctctggattctaattttggccctacctgtaacttaattttgtgaccacagttgtaccattcaccgtgcctgggctctagtttcctggtttgtaaggcagccccagcgttcatgttctgtgatagagcagaactgaacttattacctaattaactctctgctatgagttgtcaagactgatcattctgttttttctgtacacagaagtttagatgctttgtgacttaagcaggtgtgtgggctcctttaggcaggttacagttaactttctagatttagccaaaatgtagttggtagaaatttatgacagagaagaaaaatagcaagatttatttaatgctctattctctagtaattaaagcaaaatgatataagtgattagagagatttcatagataatatttcctaggagtcccgtgcccaaaactcttgccatatttaaggaagggaatgtactggcagaacttgacttacaattttggaaacagaacatgaaattgaatactcagggattagtagtatattttcatcatttaacacagttatttcacagtccataggtaggtgacaatctgaacgataatatgaaagatgagtactgggttgtttgtatatgaaaggagaggctacataaaattaaataatgttaacatttgtgctgtaaatgcaaaaaagtgcaagtaagtgagaaagttagtggttatatatattttcaaaaaattcaaagtgcagttgacccttgaataacatgggtttgaactgtgcagattcacttatgtgtggttttttttccaatcaaatgcagataaaaaacccagtatttggagaaatgtgaaacctgagtatacagagggcgatgttttgtataagtgagcgccacagggccaacaggcaggacttgagtatgtgagaatttgattatatgggggtaatcctggaaccaactccctgtttataccaaggggtgaccatacaataaaaactaagttttgaattatacaaaaaagagtatttagtaattttgagaaaattatttatgagaaatcctggaatacataaaatggagttttgatcaatttgcaacatgaagtaatgtcttaagaatgctaaaggttttgtagaattctgtagattgatagatgtttggaagaaaaaatatttgatgaatatggtgtattttggaaaggtaattttcacagatgggtatttctggtggctatatattctaccaaatgtgccagggacagaagctaaaagaaatggaaacttaagaaccagggaaaatgaactgatattaaagaaaaggctgtcactaaaggaatttcagtggaatttttatatggaagatagttaactggtgagaagaagaaattatgaatttcacagatgagagtaatcagaaggaataatgctctttaaaatgacatgaccaatatttttaagagaatacagaattaactaaattatatattgattcaaaattttggtagattgacccagttttaagtacataaccattttaaaatttactgaatgtcaataattttatagtagcagttttattacattacataaaatgtcatattgactcactatattgtatagcttacattttttgcaatatggcatgattatcacaaaatgacccaaggtaagttaagacatttgatgacaatgtactttcttaatatacatgtgaatgtgttaaaatgtgtttataatctacattattttgttctgtgcagcaacatatttcctcataatgaagatgtcatctgtgtcttttaaaaatagtatataaaataactacgttcccgataatttaatcagttaaacttaatatggctttagttttaattcttgatttccataactttgccaaatgttgagaaacatgaaacttgattgaaatagatacagaagtatgattttcatatcaccttggggatacataaaaatgtgctctatccaattactggtataatatgtatcaattcattagatgatacatagctcatggttttgtagaattctggtttctagtgataataagtatctttattgcccatttcacctgccatacctactttaaaaatttggatgaccaaagaagtgaatgaagtttccccaatctttcttgggaaaattctgtttaaattgttattgggaatatatagatttgatgtgttattttgggatgtgtaatattaatgtcacaatcactacaggtcagatatttaggtgtgcttcggtccacaagtcttttgtcatattgtgctcgcttacctaaactgtaattgcctgataaaagataatatgacagtgctgaggtgacattcaaaatgagacgggatgcaataaatgattgccttcagtatttacacagaaaaaccacttgctctttcttggttatatttcatagggctagattgtttccatcgggcactattcttaattcactctataccgtgttgtcacatgctgcctctgggcagagaatcccacttaaaataagctttaggggatcttctagaaaagggtagtgtgctccaatttttatttctccttcttatgggggatgaggatcaattatagtacaagaccatttggaaaatatgcatatatattttaaaatgaaatacaagatttccgccctcaagatctaaaccaagtaagtttgatggatggcagcacagataaagaaatcttctgaatacacatttgatttttatagctctctctttcaagagtaggatattactaagatattcagtgcaatctatcagtcctagtagtatttagaagtgacagagtgaatgctgatatttggaaaattgagcatttgaccattttggggtcactcacctggcctagtggaatagcttacactttaatacaatcaaacacagtctttctgatataaaatgtttgaatgcccagatttggttccctagttcactcaaatcatagatgttgacatacatcctgttttcataatgattttaaaaagaatgtaaatcctatggtcctccaaataaatgattcaacgtttatgtaaatgtcaagtttttgtgaatagggatttatgtctaagacagaaaaatctactgaactagttcttactgtggaactaattgtggataaaacattcgttatcatctaaattttaaatgaatgacaacagttatggacacatgcaaaaggtatcagacatagaaaatattgttgggggaaatttctgtgtggtgctaatttcttgtaagggttgtacagatagtgcttaactcaaaaagtgagagtgtggtcattgccaaataggggtttgctcagagttccttctctaggactgtatgcagaaagcatacacacacacatacgcacacagaaaaatatgatttttatatcatattcatgaaaatgtgccatatccaattataacacacacacacacacacacacacacacacacacacacacataaataaataaatgatggttcacataagaaatcctaattgctaattttaaaccaaacatttgtagttttgtttattgcaactttgctgcatgggactttgctttcataaatctatatggggttggggttaatttgccctaatttgctgacctgggacacatgtaatcactgttaaacttacacccggtaaccctgatgtgtttacatttcaaaagaaatgaaattggcctggaaaaaaattttggaagtactgtaagtcttttttctttttttttccgaagggaaatatttcaaaaaaggaaacattatgagtagacacttcaaaaaagataaaatattttacatttgttttttgactaatgtgctataaaaaggattatatttgtgagaaaagatactgatcgccaatatttcaaataccgtcttgcaatgtatagtttttagtgacattgtagtataaagctgtaatttgaaattttactttggaatgtaaagtagaaaatattagctatgtcaatgatatcttgcaaagtgttcccatttataattatttatattgtaaatagctttctgaagtaaattcgaagttaatgtgcataaaatgtatttattatgtgaggaattttttggtttaaaatatagttaccaatatgca

SEQ ID NO: 181778 - DNA, 4442 bp, Homo sapiens
  Payload ID: 15800
  Gene Symbol: SIM2
  Gene Name: single-minded family bHLH transcription factor 2
  Uniprot ID: Q14190
  ENST ID: ENST00000290399
  CDS Start-End: 614-2617
ccgcacgtggacagcggaggtgctgcgcctagccacacatcgcgggctccggcgctgcgtctccaggcacagggagccgccaggaagggcaggagagcgcgcccgggccagggcccggccccagccgcctgcgactcgctcccctccgctgggctcccgctccatggctccgcggccaccgccgcccctgtcgccctccggtccggaggggccttgccgcagccggttcgagcactcgacgaaggagtaagcagcgcctccgcctccgcgccggccgcccccaccccccaggaaggccgaggcaggagaggcaggagggaggaaacaggagcgagcaggaacggggctccggttgctgcaggacggtccagcccggaggaggctgcgctccgggcagcggcgggcggcgccgccgggttgctcggagctcaggcccggcggctgcggggaggcgtctcggaaccccgggaggccccccgcacctgcccgcggcccactccgcggactcacctggctcccggctcccccttccccatccccgccgccgcagcccgagcggggctccgcgggcctggagcacggccgggtctaatatgcccggagccgaggcgcgatgaaggagaagtccaagaatgcggccaagaccaggagggagaaggaaaatggcgagttttacgagcttgccaagctgctcccgctgccgtcggccatcacttcgcagctggacaaagcgtccatcatccgcctcaccacgagctacctgaagatgcgcgccgtcttccccgaaggtttaggagacgcgtggggacagccgagccgcgccgggcccctggacggcgtcgccaaggagctgggatcgcacttgctgcagactttggatggatttgtttttgtggtagcatctgatggcaaaatcatgtatatatccgagaccgcttctgtccatttaggcttatcccaggtggagctcacgggcaacagtatttatgaatacatccatccttctgaccacgatgagatgaccgctgtcctcacggcccaccagccgctgcaccaccacctgctccaagagtatgagatagagaggtcgttctttcttcgaatgaaatgtgtcttggcgaaaaggaacgcgggcctgacctgcagcggatacaaggtcatccactgcagtggctacttgaagatcaggcagtatatgctggacatgtccctgtacgactcctgctaccagattgtggggctggtggccgtgggccagtcgctgccacccagtgccatcaccgagatcaagctgtacagtaacatgttcatgttcagggccagccttgacctgaagctgatattcctggattccagggtgaccgaggtgacggggtacgagccgcaggacctgatcgagaagaccctataccatcacgtgcacggctgcgacgtgttccacctccgctacgcacaccacctcctgttggtgaagggccaggtcaccaccaagtactaccggctgctgtccaagcggggcggctgggtgtgggtgcagagctacgccaccgtggtgcacaacagccgctcgtcccggccccactgcatcgtgagtgtcaattatgtactcacggagattgaatacaaggaacttcagctgtccctggagcaggtgtccactgccaagtcccaggactcctggaggaccgccttgtctacctcacaagaaactaggaaattagtgaaacccaaaaataccaagatgaagacaaagctgagaacaaacccttaccccccacagcaatacagctcgttccaaatggacaaactggaatgcggccagctcggaaactggagagccagtccccctgcaagcgctgctgctcctccagaactgcagccccactcagaaagcagtgaccttctgtacacgccatcctacagcctgcccttctcctaccattacggacacttccctctggactctcacgtcttcagcagcaaaaagccaatgttgccggccaagttcgggcagccccaaggatccccttgtgaggtggcacgctttttcctgagcacactgccagccagcggtgaatgccagtggcattatgccaaccccctagtgcctagcagctcgtctccagctaaaaatcctccagagccaccggcgaacactgctaggcacagcctggtgccaagctacgaagcgcccgccgccgccgtgcgcaggttcggcgaggacaccgcgcccccgagcttcccgagctgcggccactaccgcgaggagcccgcgctgggcccggccaaagccgcccgccaggccgcccgggacggggcgcggctggcgctggcccgcgcggcacccgagtgctgcgcgcccccgacccccgaggccccgggcgcgccggcgcagctgcccttcgtgctgctcaactaccaccgcgtgctggcccggcgcggaccgctggggggcgccgcacccgccgcctccggcctggcctgcgctcccggcggccccgaggcggcgaccggcgcgctgcggctccggcacccgagccccgccgccacctccccgcccggcgcgcccctgccgcactacctgggcgcctcggtcatcatcaccaacgggaggtgacccgctggccgcccgcgccaggagcctggacccggcctcccggggctgcggcgccaccgagcccggcaaatgcgcacgacctacattaatttatgcagagacagctgtttgaattggaccccgccgccgacttgcggatttccaccgcggaggccccgcgcgccggtgccgagggccgaggagcgcccgggtccgggcaggtgaccgcccgcctctgtcctgcgagggccggtgcgacccagttgctgggggcttggtttcctcaccttgaaatcgggcttcacgcgtcttgccttgtccccaacgttccacaacagtcccgctgggggattgaagcggtttcactccgcaaatatcctccactttcaggagggaaaacccaccctaccacagtccgctcttccaagtggacggcagacctgggaggggacgcctgtgtcacgagcccttttagatgcttaggtgaaggcagaagtgatgattgtaagtcccatgaatacacaactccactgtctttaaaagtcattcaagagtctcattatttttgtttttatttaaccctttcttcaatacaaaaagccaacaaaccaagactaagggggtgaccatgcaattccattttgtgtctgtgaacataggtgtgcttcccaaatacattaacaagctcttacttccccctaacccctatgaactcttgataacaccaagagtagcaccttcagaatatattgaataggcattaaatgcaaaaatatatatgtagccagacagtttatgagaatgaccctgtcaagcttcattattacgtggcaaaatccctctggcccacacagatctgtaattcactaggctcgtgtttgctacaaatagtgctaataaagttaaattgcacgtgcaatacggaacactgtcaatggactgcaccttgtgaaggaaaaacatgcttaagggggtgtaatgaaaatgatgtagacattttaagcattttctacacagcgagaaaacttcgtaagaacatgttacgtgtgcaacaggtaaacagaaatcctttcataaagcaccagcagtgtttaaaaaatgagcttccattaatttttactttttatgggttttgcttaaagatctcaacatggaaaaatcctgtcatggctctgaactgcacaatgcattgaaccgccgtccttcaattttcttcacactatcaacactgcagcattttgctgctttatcaaaatggtttattttaggaaactttttccacctttctgaatggaaagaggttttcacaaatgttttaaactcatcgttctaaaatcaagtgcacctacaccaactgctctcaaaatgtgaactgacttttttttttttttttttgccaaccctgtgtcacttagtgaggacctgacacaatccctacagggtgtctgtcagtgggcctcatggtaagagtcacaatttgcaaatttaggaccgtgggtcatgcagcgaaggggctggatggtaggaagggatgtgcccgcctctccacgcactcagctatacctcattcacagctccttgtgagtgtgtgcacaggaaataagccgagggtattatttttttatgttcatgagtcttgtaattaaaccgtgattcttgaaaggtgtaggtttgattactaggagataccaccgacatttttcaataaagtactgcaaaatgcttttgtgtctaccttgttattaacttttggggctgtatttagtaaaaataaatcaaggctatcggagcagttcaataacaaaggttactgttgagaaaaaagaccctatcatagatttacaag

SEQ ID NO: 181779 - DNA, 1465 bp, Homo sapiens
  Payload ID: 15800
  Gene Symbol: SIM2
  Gene Name: single-minded family bHLH transcription factor 2
  ENST ID: ENST00000431229
  CDS Start-End: 1-1441
gtggggacagccgagccgcgccgggcccctggacggcgtcgccaaggagctgggatcgcacttgctgcagactttggatggatttgtttttgtggtagcatctgatggcaaaatcatgtatatatccgagaccgcttctgtccatttaggcttatcccaggtggagctcacgggcaacagtatttatgaatacatccatccttctgaccacgatgagatgaccgctgtcctcacggcccaccagccgctgcaccaccacctgctccaagagtatgagatagagaggtcgttctttcttcgaatgaaatgtgtcttggcgaaaaggaacgcgggcctgacctgcagcggatacaaggtcatccactgcagtggctacttgaagatcaggcagtatatgctggacatgtccctgtacgactcctgctaccagattgtggggctggtggccgtgggccagtcgctgccacccagtgccatcaccgagatcaagctgtacagtaacatgttcatgttcagggccagccttgacctgaagctgatattcctggattccagggtgaccgaggtgacggggtacgagccgcaggacctgatcgagaagaccctataccatcacgtgcacggctgcgacgtgttccacctccgctacgcacaccacctcctgttggtgaagggccaggtcaccaccaagtactaccggctgctgtccaagcggggcggctgggtgtgggtgcagagctacgccaccgtggtgcacaacagccgctcgtcccggccccactgcatcgtgagtgtcaattatgtactcacggagattgaatacaaggaacttcagctgtccctggagcaggtgtccactgccaagtcccaggactcctggaggaccgccttgtctacctcacaagaaactaggaaattagtgaaacccaaaaataccaagatgaagacaaagctgagaacaaacccttaccccccacagcaatacagctcgttccaaatggacaaactggaatgcggccagctcggaaactggagagccagtccccctgcaagcgctgctgctcctccagaactgcagccccactcagaaagcagtgaccttctgtacacgccatcctacagcctgcccttctcctaccattacggacacttccctctggactctcacgtcttcagcagcaaaaagccaatgttgccggccaagttcgggcagccccaaggatccccttgtgaggtggcacgctttttcctgagcacactgccagccagcggtgaatgccagtggcattatgccaaccccctagtgcctagcagctcgtctccagctaaaaatcctccagagccaccggcgaacactgctaggcacagcctggtgccaagctacgaaggcaagcagatgtcctctgcggagataccgccagctccccaggacgcagactgactcctgtttgctcgctggaccaac

SEQ ID NO: 181780 - DNA, 824 bp, Homo sapiens
  Payload ID: 15800
  Gene Symbol: SIM2
  Gene Name: single-minded family bHLH transcription factor 2
  ENST ID: ENST00000483178
  CDS Start-End: 1-222
gatggcaaaatcatgtatatatccgagaccgcttctgtccatttaggcttatcccaggtggagctcacgggcaacagtatttatgaatacatccatccttctgaccacgatgagatgaccgctgtcctcacggcccaccagccgctgcaccaccacctgctccaaggtattccatccagagggaaaaaaaaaaacagactaaaagcaaggcgacattcttaaatggaactcagggctttgcttcccacatctgccaagtggctgggcatgactaggactgcccagcccaggtctctccaatacacacacagcacccaccacgtggggatttgcattgatacctgtgtcttttaagccaatattcatcaagctcctattgttggccagaacccgtgttgagtgctaggtagaggacaaaagtggtgcaagcctgctcccctcgtgctcttgggtcagaattccagggattacagcatcacgggtctagaccaagcttctccttaaccaagatgccgtgcctaaaactcgggggtcgggggtggtccatgacatttcatggggaaaattacatatgtgtttcctccagttgaaatttggcatttcctttgcttctgatgatagatgataaaccatcttggggtccctagtacctgtggctttgccaacaatagaaatcacagatgttttccatatcataggaaagttttgcaggtttaaacatatcgcttatgcccacatgcctacttcaaaatttcaggagttctaagacctgctactgaatcttcttatttatgtattaataaagcagcacatttatatccgta

SEQ ID NO: 181781 - DNA, 1567 bp, Homo sapiens
  Payload ID: 15801
  Gene Symbol: SMDT1
  Gene Name: single-pass membrane protein with aspartate-rich tail 1
  Uniprot ID: Q9H4I9
  ENST ID: ENST00000331479
  CDS Start-End: 75-398
gctttcttcccgagggcggcacgagggctgggcggtggggtgcgggtgcccgggtgaggggcggagctgggggcatggcgtccggagcggctcgctggctagtattggcacccgtcaggtccggggctctccggagcgggcctagcttgaggaaagatggcgatgtctccgccgcatggagcggctcaggccggagcctggtaccgtcgaggtcagtcatcgttacccgcagcggcgccattttgcccaaaccggtgaaaatgtccttcggccttctccgtgtgttctccattgtgatcccctttctctatgtcgggacactcattagcaagaactttgctgctctacttgaggaacatgacatttttgttccagaggatgatgatgatgatgactaacaggaattacagaaaggagaaagcactaactgaagaaatggtgatgctctcagtttctctgccttccctatcagcagaaaggctcggggaaggccctcagcctcccagtctggtgaagcttcctgtatggtccatgaccgtattccaccccaggctctgggaggctccctgagatgtgctgtccactaagcactgcacaaacaagcaatcaaattatgaataaacataataaatatcagccgtgcgtgactgagtgatggctgcagtttctcagtatccctaggttctagttggtgcagttgtctctgctgtcctttatttatgggagaaacataggcccaggctatccaggctgcagtggagcctggtgaactattctgggggccctgggaactattttcattgtttacaaaagcccaacagaaactgtgcattttcccttaagaaagcttcatgggctaactaaagcctcatgccattctgtgttcagtgccagtcatgacagctctgcttgttagcatactacttaaatataactagaatgattcaaaactcgggttctgtgatatgaggatatagataggttttcatctatttcctggcttataactcccaaaacccttgttttaggcttttgttataatgttgggcacttcgggcctcagaaaacagcaggctgtttctcagatcttctcctgacctcctttcacctgctgctttttctccccaaggcaggccatagaaactaaaagtataatcttcctttgcccgtcttccagttggccataaaaagaatcctctgacctaccttgtctgattttaggtcatgagacccccatttcagaagggattctgccccatacctgagaggaagaaatgtagacaggccttgttggacttccccactccatctgtattagattatgcctcttttgtccaatcccatttctccagtgttgtccatgcttcaatcatccctatccaatgaggtctccataaaaggcccaagaagacaggtttagagagctttcggagaacagaacacttggctttgcaaagtggcacgcctggagagaacttggaagctccacgccccttctatacctcaccctatgcatctcttcagctgtatcttttgtgatatcctttataataaaccagtaaacgga

SEQ ID NO: 181782 - DNA, 591 bp, Homo sapiens
  Payload ID: 15801
  Gene Symbol: SMDT1
  Gene Name: single-pass membrane protein with aspartate-rich tail 1
  ENST ID: ENST00000422252
  CDS Start-End: 79-252
ggcggctttcttcccgagggcggcacgagggctgggcggtggggtgcgggtgcccgggtgaggggcggagctgggggcatggcgtccggagcggctcgctggctagtattggcacccgtcaggtccggggctctccggagcgggcctagcttgaggaaagatggcgatgtctccgccgcatggagcggctcaggccggagcctggtaccgtcgagatgtccttcggccttctccgtgtgttctccattgtgatcccctttctctatgtcgggacactcattagcaagaactttgctgctctacttgaggaacatgacatttttgttccagaggatgatgatgatgatgactaacaggaattacagaaaggagaaagcactaactgaagaaatggtgatgctctcagtttctctgccttccctatcagcagaaaggctcggggaaggccctcagcctcccagtctggtgaagcttcctgtatggtccatgaccgtattccaccccaggctctgggaggctccctgagatgtgctgtccactaagcactgcacaaacaagcaatcaaattatgaataaacataataaatatca

SEQ ID NO: 181783 - DNA, 1567 bp, Homo sapiens; identical to SEQ ID NO: 181781
  Payload ID: 15801
  Gene Symbol: SMDT1
  Gene Name: single-pass membrane protein with aspartate-rich tail 1
  Uniprot ID: Q9H4I9
  ENST ID: ENST00000571525
  CDS Start-End: 75-398

SEQ ID NO: 181784 - DNA, 1567 bp, Homo sapiens; identical to SEQ ID NO: 181781
  Payload ID: 15801
  Gene Symbol: SMDT1
  Gene Name: single-pass membrane protein with aspartate-rich tail 1
  Uniprot ID: Q9H4I9
  ENST ID: ENST00000607293
  CDS Start-End: 75-398

SEQ ID NO: 181785 - DNA, 591 bp, Homo sapiens; identical to SEQ ID NO: 181782
  Payload ID: 15801
  Gene Symbol: SMDT1
  Gene Name: single-pass membrane protein with aspartate-rich tail 1
  ENST ID: ENST00000608773
  CDS Start-End: 79-252

SEQ ID NO: 181786 - DNA, 1567 bp, Homo sapiens; identical to SEQ ID NO: 181781
  Payload ID: 15801
  Gene Symbol: SMDT1
  Gene Name: single-pass membrane protein with aspartate-rich tail 1
  Uniprot ID: Q9H4I9
  ENST ID: ENST00000615504
  CDS Start-End: 75-398

SEQ ID NO: 181787 - DNA, 591 bp, Homo sapiens; identical to SEQ ID NO: 181782
  Payload ID: 15801
  Gene Symbol: SMDT1
  Gene Name: single-pass membrane protein with aspartate-rich tail 1
  ENST ID: ENST00000625945
  CDS Start-End: 79-252

SEQ ID NO: 181788 - DNA, 591 bp, Homo sapiens; identical to SEQ ID NO: 181782
  Payload ID: 15801
  Gene Symbol: SMDT1
  Gene Name: single-pass membrane protein with aspartate-rich tail 1
  ENST ID: ENST00000630819
  CDS Start-End: 79-252

SEQ ID NO: 181789 - DNA, 1812 bp, Homo sapiens
  Payload ID: 15802
  Gene Symbol: SMCO1
  Gene Name: single-pass membrane protein with coiled-coil domains 1
  Uniprot ID: Q147U7
  ENST ID: ENST00000397537
  CDS Start-End: 158-802
cttgtactgagtgacctttcaggcagaatgtagactgagcgctcctgctactgctgcctgttgctgagaggaagaccgcagaaaattctggattcaaacatttattgctttttttgttttgctttgtttttgttttctttccttttgccttcagaagatgaacaatgaaaccacaaccctgatatccttgaaggaggcaatgaaaagagtagaccacaaactccaagcgttagaaacacagttcaaagaactagacttcaccaaggataacctgatgcagaaattcgaacatcatagtaaggctttggcaagccaagcagcccaagatgagatgtggacagcagttcgggcactccagctcacttcaatggaattgaatattttatacagctacgtcattgaagtacttatctgcttgcatactcgtgtgcttgagaagctgccagacctggtgagaggtcttccaaccttagcctctgtactcagaagaaaagttaagaacaagcgcgttagagttgtatgggagtccatactggaggagtgtgggctgcaagaaggagacatcacagcactttgtaccttctttattgcacgtggtaacaaggcagaacactatactgctaaagtgaggcagatgtacatcagggatgtcacgttcctaattactaacatggtaaagaaccaggctctgcaggacagtttgctgagggctgtgcaggtaattgagaaggggaaagcagttaggacccctgaaaagcaaaagtcatccctcgaagagttgataccatctgtcaaaaactaacctgttaccctatgacccagtgattccacctacagtaatttatcttggaaacagcaaaaagtatgcacaatttattatagtcttatttttatagcaaagagtgagaggatgttaaataaattatgacaaattgatacaatagatactttctttgcagccatataaaagaatgaagaagctctttgtgtaatgatatgaagtgatcaccaaatgtattgttgttttcaaatgtttatttccaatatacattgctaagtggaaaaaaggtgacaaatatatatatataaatatatatataacacatattagtttacatatccataaacttcttctgcagagatacacaagacagtgataacattagttgtcaggaaagaaagctaagaggctaggggtcaaagacaagaggaagtcttttcactgttaatccattttttacattttcaattttgaaccatgtgaatgtattacctatttaaaaaataaacaaggccggacatggtggctcatgcctataatccaagcaccttaggaggccaaggtaggaggatcacttgagctcaggggtttcagaccagcctgggcaacacagtgatagcaataggaggcaggtaaattcctaggcagacagggaggggtccctggtgaaactcaaccttcaagccaaggacagtctaaagcctgaaaaccaagctatgagttctggataaatccatgagccagactgagagctcccattctcgtctggcaccctctctcctgattggtccttacccttcacctattttatacatacctacccttccgcgattggtcctctacactatcgtgcctatttctgaatggtgctttgtcaagcatagccacagaccaatcagcatgcacttgcccatttctagcccacaaaaacccatagactcaggctcgtggccagcaacccaccttcgggtcccctctcactgccaagagccgttctgtcactcaataaattctactttgccttactcact

SEQ ID NO: 181790 - DNA, 1846 bp, Homo sapiens
  Payload ID: 15802
  Gene Symbol: SMCO1
  Gene Name: single-pass membrane protein with coiled-coil domains 1
  ENST ID: ENST00000452776
  CDS Start-End: 138-248
aggcagaatgtagactgagcgctcctgctactgctgcctgttgctgagaggaagaccgcagaaaattctggattcaaacatttattgctttttttgttttgctttgtttttgttttctttccttttgccttcagaagatgaacaatgaaaccacaaccctgatatccttgaaggaggcaatgaaaaggttgctgagggctatagggagggagcaagcatgggtctgctattctgggaagatggagtagaccacaaactccaagcgttagaaacacagttcaaagaactagacttcaccaaggataacctgatgcagaaattcgaacatcatagtaaggctttggcaagccaagcagcccaagatgagatgtggacagcagttcgggcactccagctcacttcaatggaattgaatattttatacagctacgtcattgaagtacttatctgcttgcatactcgtgtgcttgagaagctgccagacctggtgagaggtcttccaaccttagcctctgtactcagaagaaaagttaagaacaagcgcgttagagttgtatgggagtccatactggaggagtgtgggctgcaagaaggagacatcacagcactttgtaccttctttattgcacgtggtaacaaggcagaacactatactgctaaagtgaggcagatgtacatcagggatgtcacgttcctaattactaacatggtaaagaaccaggctctgcaggacagtttgctgagggctgtgcaggtaattgagaaggggaaagcagttaggacccctgaaaagcaaaagtcatccctcgaagagttgataccatctgtcaaaaactaacctgttaccctatgacccagtgattccacctacagtaatttatcttggaaacagcaaaaagtatgcacaatttattatagtcttatttttatagcaaagagtgagaggatgttaaataaattatgacaaattgatacaatagatactttctttgcagccatataaaagaatgaagaagctctttgtgtaatgatatgaagtgatcaccaaatgtattgttgttttcaaatgtttatttccaatatacattgctaagtggaaaaaaggtgacaaatatatatatataaatatatatataacacatattagtttacatatccataaacttcttctgcagagatacacaagacagtgataacattagttgtcaggaaagaaagctaagaggctaggggtcaaagacaagaggaagtcttttcactgttaatccattttttacattttcaattttgaaccatgtgaatgtattacctatttaaaaaataaacaaggccggacatggtggctcatgcctataatccaagcaccttaggaggccaaggtaggaggatcacttgagctcaggggtttcagaccagcctgggcaacacagtgatagcaataggaggcaggtaaattcctaggcagacagggaggggtccctggtgaaactcaaccttcaagccaaggacagtctaaagcctgaaaaccaagctatgagttctggataaatccatgagccagactgagagctcccattctcgtctggcaccctctctcctgattggtccttacccttcacctattttatacatacctacccttccgcgattggtcctctacactatcgtgcctatttctgaatggtgctttgtcaagcatagccacagaccaatcagcatgcacttgcccatttctagcccacaaaaacccatagactcaggctcgtggccagcaacccaccttcgggtcccctctcactgccaagagccgttctgtcactcaataaattctactttgccttactca

SEQ ID NO: 181791 - DNA, 1122 bp, Homo sapiens
  Payload ID: 15803
  Gene Symbol: SMCO2
  Gene Name: single-pass membrane protein with coiled-coil domains 2
  ENST ID: ENST00000298876
  CDS Start-End: 177-1058
acctgccttggtgtttaccactcaaatggttcctctctgcctttggtgctgaggaaaggaggctctggcaccactggaacaggaaaacttgactgttgctagtctattccattgaacttacagatatttgggattaccaaattgggaagagcaaagctatctccagtgccgaagaaatggctctcacgcccacaaacctaaataacaaaatgtctctgcagatgaagatggactgccaggaacaacagctgactaagaaaaacaatggctttttccaaaagctcaatgtgactgaaggtgcaatgcaggatttgctaaaggaaattatcaaagtggaccacatcttagacagatcggatgatgaggatgacatttcctccgaaaaccctcaaactgacttccttcacaagggtatgttggagctagaggctgagcatgaccaggacctgagtaaacaggataagcaagaaacagatgttgatgaggaccctcaagcgtctacatctctgcagttttcaaagaagaacctccttgaactcttattaaaagacatgctgaccctgaagggtcaaattgaaaagctggaggaccggggccttgaccttgatcaagggacaagcactgaggtgaatacttgtaatgaagtttatgaattaaagaagaaagtcatagaaaggctggaggacctttgcaagaatgtggaactgctgagtgcaaagctaaggatgtatcaaatggaggcagaggacactgactctcacagttctgaggaaatagatacggaagagatggaggccctgcttcctcaggccccagcatcctttttagtgcagaagtctcctccccgcaatacagcatggaaacgtgcactgaggattttcatcatgtttgatgtcctcaccgtcactggacttttatgttacatactattttttggtgctacatttctctttgaaagggtgcttctgagaatgcttgggtgccgcaccacatgggacctacgggagatgagagagcctttcttgaatttggaagtggaagccttgttaccctcctaaagatacagaagttactgtcaccctactgactttctcaccagtaaacattgtggctgttcctgta

SEQ ID NO: 181792 - DNA, 1272 bp, Homo sapiens
  Payload ID: 15803
  Gene Symbol: SMCO2
  Gene Name: single-pass membrane protein with coiled-coil domains 2
  Uniprot ID: A6NFE2
  ENST ID: ENST00000416383
  CDS Start-End: 177-1208
acctgccttggtgtttaccactcaaatggttcctctctgcctttggtgctgaggaaaggaggctctggcaccactggaacaggaaaacttgactgttgctagtctattccattgaacttacagatatttgggattaccaaattgggaagagcaaagctatctccagtgccgaagaaatggctctcacgcccacaaacctaaataacaaaatgtctctgcagatgaagatggactgccaggaacaacagctgactaagaaaaacaatggctttttccaaaagctcaatgtgactgaaggtgcaatgcaggatttgctaaaggaaattatcaaagtggaccacatcttagacagatcggatgatgaggatgacatttcctccgaaaaccctcaaactgacttccttcacaagggtatgttggagctagaggctgagcatgaccaggacctgagtaaacaggataagcaagaaacagatgttgatgaggaccctcaagcgtctacatctctgcagttttcaaagaagaacctccttgaactgtgtctgaagggcatgttcctcaagctaaactactggaacacaaagataggtctccaggtgaaagaacttggagctgattacatagacggaacggagaaaattgacaatattattaaaaaaataaatgtaacagaaaacacagtgaagagcttattaaaagacatgctgaccctgaagggtcaaattgaaaagctggaggaccggggccttgaccttgatcaagggacaagcactgaggtgaatacttgtaatgaagtttatgaattaaagaagaaagtcatagaaaggctggaggacctttgcaagaatgtggaactgctgagtgcaaagctaaggatgtatcaaatggaggcagaggacactgactctcacagttctgaggaaatagatacggaagagatggaggccctgcttcctcaggccccagcatcctttttagtgcagaagtctcctccccgcaatacagcatggaaacgtgcactgaggattttcatcatgtttgatgtcctcaccgtcactggacttttatgttacatactattttttggtgctacatttctctttgaaagggtgcttctgagaatgcttgggtgccgcaccacatgggacctacgggagatgagagagcctttcttgaatttggaagtggaagccttgttaccctcctaaagatacagaagttactgtcaccctactgactttctcaccagtaaacattgtggctgttcctgta

SEQ ID NO: 181793 - DNA, 1096 bp, Homo sapiens
  Payload ID: 15803
  Gene Symbol: SMCO2
  Gene Name: single-pass membrane protein with coiled-coil domains 2
  Uniprot ID: A6NFE2
  ENST ID: ENST00000535986
  CDS Start-End: 1-1032
atggctctcacgcccacaaacctaaataacaaaatgtctctgcagatgaagatggactgccaggaacaacagctgactaagaaaaacaatggctttttccaaaagctcaatgtgactgaaggtgcaatgcaggatttgctaaaggaaattatcaaagtggaccacatcttagacagatcggatgatgaggatgacatttcctccgaaaaccctcaaactgacttccttcacaagggtatgttggagctagaggctgagcatgaccaggacctgagtaaacaggataagcaagaaacagatgttgatgaggaccctcaagcgtctacatctctgcagttttcaaagaagaacctccttgaactgtgtctgaagggcatgttcctcaagctaaactactggaacacaaagataggtctccaggtgaaagaacttggagctgattacatagacggaacggagaaaattgacaatattattaaaaaaataaatgtaacagaaaacacagtgaagagcttattaaaagacatgctgaccctgaagggtcaaattgaaaagctggaggaccggggccttgaccttgatcaagggacaagcactgaggtgaatacttgtaatgaagtttatgaattaaagaagaaagtcatagaaaggctggaggacctttgcaagaatgtggaactgctgagtgcaaagctaaggatgtatcaaatggaggcagaggacactgactctcacagttctgaggaaatagatacggaagagatggaggccctgcttcctcaggccccagcatcctttttagtgcagaagtctcctccccgcaatacagcatggaaacgtgcactgaggattttcatcatgtttgatgtcctcaccgtcactggacttttatgttacatactattttttggtgctacatttctctttgaaagggtgcttctgagaatgcttgggtgccgcaccacatgggacctacgggagatgagagagcctttcttgaatttggaagtggaagccttgttaccctcctaaagatacagaagttactgtcaccctactgactttctcaccagtaaacattgtggctgttcctgta

SEQ ID NO: 181794 - DNA, 2104 bp, Homo sapiens
  Payload ID: 15804
  Gene Symbol: SMCO3
  Gene Name: single-pass membrane protein with coiled-coil domains 3
  Uniprot ID: A2RU48
  ENST ID: ENST00000316048
  CDS Start-End: 74-751
actttaacaatactcctaaacaactgctaggaccacggaactcagaaacacagcaagcgatcatattggaaatatggcccaaagtgacttcctttacccagagaacccaaaaaggcgggaagaagtaaatcgtcttcaccagcagcttcttgattgcttatctgacagcttcgatgtcaccaataagctgactgaggttctaaatatgcacttggggtgcaggctggcctccattgagatgaaaagagatgggaccatcaaagaaaactgtgacctcatcatccaagccattatgaaaatccaaaaggaattgcagaaggttgatgaagcactaaaagataagctagagccaaccctctatagaaaacttcaggatattaaggaaaaggaaacagacaaaattgcaatagtgcaaaaggttatttcggtcatcctgggagaagctacatctgcagccagtgcagtcgctgttaaacttgtgggctcaaatgtcacaactggcataattaacaagttggtcactgtgttagctcaaattggtgcttctctccttggtagtattggagttgctgttcttggccttggcatagatatgattgtccgtgccatcctgggagcagtggaaaaaacacagcttcaagcagccatcaaaagttatgagaagcatctggtggagttcaaatcagcctcagaaaaatataatcatgccattactgaggtcatcaatacagtgaaacaccaaatgaaatgaacagccgttttatttgccactgaagtgtttttctgcttccttttcagtaacagtgtttgcttctttgattaggttcattttctataggcttccaatatggacttaaataagataaacaatttggagagggaaactggagatgccaagactagatgactagatgagttttgagtcaacaatgcctggatcagctgatgctagaccctgtgaggtaaaaaaattttctccctggatgttttcacaccctgctctaccagatcaacattggggtaaatgctatcgtagagtagcaagtataggggttacttttctcttttctaatttcagtaaaattcttaaatttcacattgaatgcagagactttcatttctaccaccagcttcaaacatcatttagttataaggggacatactcagtaacttctgcctagacacaaactctaggccttcgaatgagacagaaatactaccatatttttgaccatcagagtaaatctggttttctgtaaactagaagagactgaaaaatggtttgtaacaatgtgcttcaattaggacaggaagctgatctgtaaacgtctactgattacacaatgtaaaccggatggatttgaaaatggtaaaaatcaaaactaaaaacatcaaggtcctgtttcagtcactgcaatcaaccctgaccaactgtgataattaaatatcgctcaagtgaatgttcaaacactgaaacatttagaagacaagaaagcaaaacacagctacacatattgcatttaggatgcagaatagaaggtcactactcaaagcatttgtcatttaaaagaaagtcataatttattataagctttcagaaaaaagaatataatttcattttcaacactagcaaaaaggaggcagctgcctttgctacatgacgcattaggtgggccatttcactaattacctgattttagaaaacgccaaaggctatggaagcctattaatggttccgctgaatctctgcagatgtgtttgttttctaaatcctttgccaaccaataattcccatgaggactcttttagtctatactgacaaaattattaatatgctgttgatgccagactgtgtttgttatagttgattctcccatccaagtacaagaaatgtattgaaataaaaactgctcagcatatcttaaaaatagtagctacatataaaattttagctacatgaaagactttaatatttccaacatacactgttttctctttctcttcttgcattgtttttcaaaacgagttgcaaaactatgatcactaatgtgttaggaaagaaaaaaaactagttgcaaaacattacaacttagctcaccttcgc

SEQ ID NO: 181795 - DNA, 1104 bp, Homo sapiens
  Payload ID: 15805
  Gene Symbol: SMCO4
  Gene Name: single-pass membrane protein with coiled-coil domains 4
  Uniprot ID: Q9NRQ5
  ENST ID: ENST00000298966
  CDS Start-End: 387-566
ggggaagagggggcgggagccgaggcccgggcgggggcagccagcgagttagggttaggacgggaggattcggcttcccggcggcagagggcgcctggcgctgcggtctggcgcgccagagtcgcccgcgcgggcgccgagaggagaggcgaggcggggagcgcaagcggcggcggccactgccacgtattcccggcagtggtggcggcggcggcggcggcgcccgcgggcaggaataactcaagtcacctgtactggaaatcagtttgctgaaattaatcaacgattcttgaagttgaagaaaaggaggttccagccttggcaagaggagtgtggcccttcctggaatccctctggacacaccctcctagcatcctctaggaaagatgcggcagctcaaagggaagcccaagaaggagacctccaaggacaagaaggagcggaagcaagccatgcaggaggcccggcagcagatcactacagtggtgctgcccacgctggccgtggtcgtgctcttgatcgtggtgtttgtgtacgtggccacgcgccccaccatcaccgagtgagccccgcagccggctgcggaccccatcggcagggagaggaggcgcgggagggggacgcaaacaaaaaatggctttcatattcagagatgttcatgttgctgagctgtaagcaggagcaccctgtcttctctggtctttgacttgattaaagtatctccgctttcttgggagggaataggggatgttttatcagtgaatgtgccatacaccttatggtccacttcatgtgcctttcagacttcaaagcgcgcgcgcatgtgtgtgtgtgtgtgtgtgtgtgtgtgtgtgtgtgtgtgcttctttttctctcctaaaaatcgataagtagctccacctgaagagggatggaacctctgggtcaggaaacagctggaatccacactcacctcattcccattgtttggatcatgcttctttccaacacgtgttcacaatctccaaagggactgtatttcttctctgtgcttaatgtgatttgaaatatgttgaatcaaagtgaaatatttattttttgaataaaggagataatagccttaaa

SEQ ID NO: 181796 - DNA, 889 bp, Homo sapiens
  Payload ID: 15805
  Gene Symbol: SMCO4
  Gene Name: single-pass membrane protein with coiled-coil domains 4
  Uniprot ID: Q9NRQ5
  ENST ID: ENST00000525141
  CDS Start-End: 172-351
caggaataactcaagtcacctgtactggaaatcagtttgctgaaattaatcaacgattcttgaagttgaagaaaagttgttctctctacaggaggttccagccttggcaagaggagtgtggcccttcctggaatccctctggacacaccctcctagcatcctctaggaaagatgcggcagctcaaagggaagcccaagaaggagacctccaaggacaagaaggagcggaagcaagccatgcaggaggcccggcagcagatcactacagtggtgctgcccacgctggccgtggtcgtgctcttgatcgtggtgtttgtgtacgtggccacgcgccccaccatcaccgagtgagccccgcagccggctgcggaccccatcggcagggagaggaggcgcgggagggggacgcaaacaaaaaatggctttcatattcagagatgttcatgttgctgagctgtaagcaggagcaccctgtcttctctggtctttgacttgattaaagtatctccgctttcttgggagggaataggggatgttttatcagtgaatgtgccatacaccttatggtccacttcatgtgcctttcagacttcaaagcgcgcgcgcatgtgtgtgtgtgtgtgtgtgtgtgtgtgtgtgtgtgtgtgcttctttttctctcctaaaaatcgataagtagctccacctgaagagggatggaacctctgggtcaggaaacagctggaatccacactcacctcattcccattgtttggatcatgcttctttccaacacgtgttcacaatctccaaagggactgtatttcttctctgtgcttaatgtgatttgaaatatgttgaatcaaagtgaaatatttattttttgaataaaggagataatagccttaaa

SEQ ID NO: 181797 - DNA, 355 bp, Homo sapiens
  Payload ID: 15805
  Gene Symbol: SMCO4
  Gene Name: single-pass membrane protein with coiled-coil domains 4
  ENST ID: ENST00000529714
  CDS Start-End: 200-355
cctcttcaaagacctaatcagcgtctagtgggaataactcaagtcacctgtactggaaatcagtttgctgaaattaatcaacgattcttgaagttgaagaaaagttgttctctctacaggaggttccagccttggcaagaggagtgtggcccttcctggaatccctctggacacaccctcctagcatcctctaggaaagatgcggcagctcaaagggaagcccaagaaggagacctccaaggacaagaaggagcggaagcaagccatgcaggaggcccggcagcagatcactacagtggtgctgcccacgctggccgtggtcgtgctcttgatcgtggtgtttgtgtacgtggcc

SEQ ID NO: 181798 - DNA, 472 bp, Homo sapiens
  Payload ID: 15805
  Gene Symbol: SMCO4
  Gene Name: single-pass membrane protein with coiled-coil domains 4
  Uniprot ID: Q9NRQ5
  ENST ID: ENST00000527149
  CDS Start-End: 224-403
ggaggaagccaggttacctctgttggacctgcctgctcccagcatctccagcaacaagctgtctctgccggaataactcaagtcacctgtactggaaatcagtttgctgaaattaatcaacgattcttgaagttgaagaaaaggaggttccagccttggcaagaggagtgtggcccttcctggaatccctctggacacaccctcctagcatcctctaggaaagatgcggcagctcaaagggaagcccaagaaggagacctccaaggacaagaaggagcggaagcaagccatgcaggaggcccggcagcagatcactacagtggtgctgcccacgctggccgtggtcgtgctcttgatcgtggtgtttgtgtacgtggccacgcgccccaccatcaccgagtgagccccgcagccggctgcggaccccatcggcagggagaggaggcgcgggagggggacgcaaacaaaaaat

SEQ ID NO: 181799 - DNA, 374 bp, Homo sapiens
  Payload ID: 15805
  Gene Symbol: SMCO4
  Gene Name: single-pass membrane protein with coiled-coil domains 4
  ENST ID: ENST00000526869
  CDS Start-End: 234-374
gcggggagcgcaagcggcggcggccactgccacgtattcccggcagtggtggcggcggcggcggcggcgcccgcgggcaggaataactcaagtcacctgtactggaaatcagtttgctgaaattaatcaacgattcttgaagttgaagaaaaggaggttccagccttggcaagaggagtgtggcccttcctggaatccctctggacacaccctcctagcatcctctaggaaagatgcggcagctcaaagggaagcccaagaaggagacctccaaggacaagaaggagcggaagcaagccatgcaggaggcccggcagcagatcactacagtggtgctgcccacgctggccgtggtcgtgctcttgatcgtggtg

SEQ ID NO: 181800 - DNA, 180 bp, Homo sapiens
  Payload ID: 15805
  Gene Symbol: SMCO4
  Gene Name: single-pass membrane protein with coiled-coil domains 4
  Uniprot ID: Q9NRQ5
  ENST ID: ENST00000596676
  CDS Start-End: 1-180
atgcggcagctcaaagggaagcccaagaaggagacctccaaggacaagaaggagcggaagcaagccatgcaggaggcccggcagcagatcactacagtggtgctgcccacgctggccgtggtcgtgctcttgatcgtggtgtttgtgtacgtggccacgcgccccaccatcaccgagtga

SEQ ID NO: 181801 - DNA, 687 bp, Homo sapiens
  Payload ID: 15806
  Gene Symbol: SSBP1
  Gene Name: single-stranded DNA binding protein 1, mitochondrial
  Uniprot ID: Q04837
  ENST ID: ENST00000265304
  CDS Start-End: 134-580
ctgtttcctttttcctctggcgagctttgcgttccctgtgcgccggaagtgatcccctgcgtggctgggctgctcgggttagatcgtcaggaaaagcctaaagattagactgtaagaaaagaaaatagaagccatgtttcgaagacctgtattacaggtacttcgtcagtttgtaagacatgagtccgaaacaactaccagtttggttcttgaaagatccctgaatcgtgtgcacttacttgggcgagtgggtcaggaccctgtcttgagacaggtggaaggaaaaaatccagtcacaatattttctctagcaactaatgagatgtggcgatcaggggatagtgaagtttaccaactgggtgatgtcagtcaaaagacaacatggcacagaatatcagtattccggccaggcctcagagacgtggcatatcaatatgtgaaaaaggggtctcgaatttatttggaagggaaaatagactatggtgaatacatggataaaaataatgtgaggcgacaagcaacaacaatcatagctgataatattatatttctgagtgaccagacgaaagagaaggagtagaaaggatgattcttctttggccatcatttggtacagtctcatttccaagtcatgtataatctttatggcttccaaggacaagaattaaaatactcttttacgtaaaa

SEQ ID NO: 181802 - DNA, 630 bp, Homo sapiens
  Payload ID: 15806
  Gene Symbol: SSBP1
  Gene Name: single-stranded DNA binding protein 1, mitochondrial
  ENST ID: ENST00000467681
  CDS Start-End: 224-630
gggttagatcgtcaggtgagggaggaagggatagccagcgcgaaggaagtgctggagtcgtgtgttttggctgcgcgtgatcctgcgtgggtcgggaggtgtttctgtgtaggtgtctggccctttcatcagtcgtgcggaggaccgcgtgatttccttccagttctcctcggttttcaggaaaagcctaaagattagactgtaagaaaagaaaatagaagccatgtttcgaagacctgtattacaggtacttcgtcagtttgtaagacatgagtccgaaacaactaccagtttggttcttgaaagatccctgaatcgtgtgcacttacttgggcgagtgggtcaggaccctgtcttgagacaggtggaaggaaaaaatccagtcacaatattttctctagcaactaatgagatgtggcgatcaggggatagtgaagtttaccaactgggtgatgtcagtcaaaagacaacatggcacagaatatcagtattccggccaggcctcagagacgtggcatatcaatatgtgaaaaaggggtctcgaatttatttggaagggaaaatagactatggtgaatacatggataaaaataatgtgaggcgacaagcaacaacaatcatagctgataa

SEQ ID NO: 181803 - DNA, 470 bp, Homo sapiens
  Payload ID: 15806
  Gene Symbol: SSBP1
  Gene Name: single-stranded DNA binding protein 1, mitochondrial
  ENST ID: ENST00000473783
  CDS Start-End: 386-470
gtccacctctccctatggtgtggctggctagcccgggggtctctacgctgcttggtctttgttaacggagatgaaggcagtaatttttcagtaacaggtttcagatataagtcccttggtgatgctaatatttatggaggccttactatgcattaagaacttttttagaagtttagaaaatggcagtgaataaagcagatacaaatctctgctctaagggagcttgcatagtaatgaaatttgagaagacagtggattggaagtgggattaactcagaatcaaaattttgtcgatgggttggaggaagaggaagttatttgggaccaaaaagacatacaggtgaaaagcctaaagattagactgtaagaaaagaaaatagaagccatgtttcgaagacctgtattacaggtacttcgtcagtttgtaagacatgagtccgaaacaactaccagtttggttcttgaaagat

SEQ ID NO: 181804 - DNA, 676 bp, Homo sapiens
  Payload ID: 15806
  Gene Symbol: SSBP1
  Gene Name: single-stranded DNA binding protein 1, mitochondrial
  Uniprot ID: Q04837
  ENST ID: ENST00000484178
  CDS Start-End: 123-569
ggtgtccacctctccctatggtgtggctggctagcccgggggtctctacgctgcttggtctttgttaacggagatgaaggaaaagcctaaagattagactgtaagaaaagaaaatagaagccatgtttcgaagacctgtattacaggtacttcgtcagtttgtaagacatgagtccgaaacaactaccagtttggttcttgaaagatccctgaatcgtgtgcacttacttgggcgagtgggtcaggaccctgtcttgagacaggtggaaggaaaaaatccagtcacaatattttctctagcaactaatgagatgtggcgatcaggggatagtgaagtttaccaactgggtgatgtcagtcaaaagacaacatggcacagaatatcagtattccggccaggcctcagagacgtggcatatcaatatgtgaaaaaggggtctcgaatttatttggaagggaaaatagactatggtgaatacatggataaaaataatgtgaggcgacaagcaacaacaatcatagctgataatattatatttctgagtgaccagacgaaagagaaggagtagaaaggatgattcttctttggccatcatttggtacagtctcatttccaagtcatgtataatctttatggcttccaaggacaagaattaaaatactcttttacgtaaaa

SEQ ID NO: 181805 - DNA, 636 bp, Homo sapiens
  Payload ID: 15806
  Gene Symbol: SSBP1
  Gene Name: single-stranded DNA binding protein 1, mitochondrial
  Uniprot ID: Q04837
  ENST ID: ENST00000498107
  CDS Start-End: 190-636
gtgcgccggaagtgatcccctgcgtggctgggctgctcgggttagatcgtcaggtgagggaggaagggatagccagcgcgaaggaagtgctggagtcgtgtgttttggctgcgcgtgatcctgcgtgggtcgggaggtgtttctgtgaaaagcctaaagattagactgtaagaaaagaaaatagaagccatgtttcgaagacctgtattacaggtacttcgtcagtttgtaagacatgagtccgaaacaactaccagtttggttcttgaaagatccctgaatcgtgtgcacttacttgggcgagtgggtcaggaccctgtcttgagacaggtggaaggaaaaaatccagtcacaatattttctctagcaactaatgagatgtggcgatcaggggatagtgaagtttaccaactgggtgatgtcagtcaaaagacaacatggcacagaatatcagtattccggccaggcctcagagacgtggcatatcaatatgtgaaaaaggggtctcgaatttatttggaagggaaaatagactatggtgaatacatggataaaaataatgtgaggcgacaagcaacaacaatcatagctgataatattatatttctgagtgaccagacgaaagagaaggagtag

SEQ ID NO: 181806 - DNA, 600 bp, Homo sapiens
  Payload ID: 15806
  Gene Symbol: SSBP1
  Gene Name: single-stranded DNA binding protein 1, mitochondrial
  ENST ID: ENST00000463093
  CDS Start-End: 237-600
agatcgtcaggtgagggaggaagggatagccagcgcgaaggaagtgctggagtcgtgtgttttggctgcgcgtgatcctgcgtgggtcgggaggtgtttctgtgtaggtgtctggccctttcatcagtcgtgcggaggaccgcgtgatttccttccagttctcctcggttttcaggtggtggcgccatcttcggaaaagcctaaagattagactgtaagaaaagaaaatagaagccatgtttcgaagacctgtattacaggtacttcgtcagtttgtaagacatgagtccgaaacaactaccagtttggttcttgaaagatccctgaatcgtgtgcacttacttgggcgagtgggtcaggaccctgtcttgagacaggtggaaggaaaaaatccagtcacaatattttctctagcaactaatgagatgtggcgatcaggggatagtgaagtttaccaactgggtgatgtcagtcaaaagacaacatggcacagaatatcagtattccggccaggcctcagagacgtggcatatcaatatgtgaaaaaggggtctcgaatttatttggaagggaaaatagactatggtgaatacatggata

SEQ ID NO: 181807 - DNA, 989 bp, Homo sapiens
  Payload ID: 15806
  Gene Symbol: SSBP1
  Gene Name: single-stranded DNA binding protein 1, mitochondrial
  Uniprot ID: Q04837
  ENST ID: ENST00000481508
  CDS Start-End: 436-882
acctctccctatggtgtggctggctagcccgggggtctctacgctgcttggtctttgttaacggagatgaaggcagtaatttttcagtaacaggtttcagatataagtcccttggtgatgctaatatttatggaggccttactatgcattaagaacttttttagaagtttagaaaatggcagtgaataaagcagatacaaatctctgctctaagggagcttgcatagtaatgaaatttgagaagacagtggattggaagtgggattaactcagaatcaaaattttgtcgatgggttggaggaagaggaagttatttgggaccaaaaagacatacaggtgtgagtttatttgggagggaggaaggaatcctcatcagatgtgcaggaatgttggaaaagcctaaagattagactgtaagaaaagaaaatagaagccatgtttcgaagacctgtattacaggtacttcgtcagtttgtaagacatgagtccgaaacaactaccagtttggttcttgaaagatccctgaatcgtgtgcacttacttgggcgagtgggtcaggaccctgtcttgagacaggtggaaggaaaaaatccagtcacaatattttctctagcaactaatgagatgtggcgatcaggggatagtgaagtttaccaactgggtgatgtcagtcaaaagacaacatggcacagaatatcagtattccggccaggcctcagagacgtggcatatcaatatgtgaaaaaggggtctcgaatttatttggaagggaaaatagactatggtgaatacatggataaaaataatgtgaggcgacaagcaacaacaatcatagctgataatattatatttctgagtgaccagacgaaagagaaggagtagaaaggatgattcttctttggccatcatttggtacagtctcatttccaagtcatgtataatctttatggcttccaaggacaagaattaaaatactcttttacgtaaaa

SEQ ID NO: 181808 - DNA, 731 bp, Homo sapiens
  Payload ID: 15806
  Gene Symbol: SSBP1
  Gene Name: single-stranded DNA binding protein 1, mitochondrial
  Uniprot ID: Q04837
  ENST ID: ENST00000465582
  CDS Start-End: 55-501
tagatcgtcaggaaaagcctaaagattagactgtaagaaaagaaaatagaagccatgtttcgaagacctgtattacaggtacttcgtcagtttgtaagacatgagtccgaaacaactaccagtttggttcttgaaagatccctgaatcgtgtgcacttacttgggcgagtgggtcaggaccctgtcttgagacaggtggaaggaaaaaatccagtcacaatattttctctagcaactaatgagatgtggcgatcaggggatagtgaagtttaccaactgggtgatgtcagtcaaaagacaacatggcacagaatatcagtattccggccaggcctcagagacgtggcatatcaatatgtgaaaaaggggtctcgaatttatttggaagggaaaatagactatggtgaatacatggataaaaataatgtgaggcgacaagcaacaacaatcatagctgataatattatatttctgagtgaccagacgaaagagaaggagtagaaaggatgattcttctttggccatcatttgggattctgacacagccagcagcagtacgtgttcatcagcactgaagcagggcacctcctgattcagcagagagaccctcccctccccagccatgttggcggctgccctaggattgctgatgcccattgcaggggctgaatttctcattggcctggttggaaatggagtccctgtggtctgcagttttagaggatgggtca

SEQ ID NO: 181809 - DNA, 470 bp, Homo sapiens; identical to SEQ ID NO: 181803
  Payload ID: 15806
  Gene Symbol: SSBP1
  Gene Name: single-stranded DNA binding protein 1, mitochondrial
  ENST ID: ENST00000573322
  CDS Start-End: 386-470

SEQ ID NO: 181810 - DNA, 457 bp, Homo sapiens
  Payload ID: 15806
  Gene Symbol: SSBP1
  Gene Name: single-stranded DNA binding protein 1, mitochondrial
  Uniprot ID: Q04837
  ENST ID: ENST00000575059
  CDS Start-End: 55-457
tagatcgtcaggaaaagcctaaagattagactgtaagaaaagaaaatagaagccatgtttcgaagacctgtattacaggtacttcgtcagtttgtaagacatgagtccgaaacaactaccagtttggttcttgaaagatccctgaatcgtgtgcacttacttgggcgagtgggtcaggaccctgtcttgagacaggtggaaggaaaaaatccagtcacaatattttctctagcaactaatgagatgtggcgatcaggggatagtgaagtttaccaactgggtgatgtcagtcaaaagacaacatggcacagaatatcagtattccggccaggcctcagagacgtggcatatcaatatgtgaaaaaggggtctcgaatttatttggaagggaaaatagactatggtgaatacatggataaaaataatgtgaggcgacaagcaacaacaatcatagctg

SEQ ID NO: 181811 - DNA, 838 bp, Homo sapiens
  Payload ID: 15806
  Gene Symbol: SSBP1
  Gene Name: single-stranded DNA binding protein 1, mitochondrial
  Uniprot ID: Q04837
  ENST ID: ENST00000576834
  CDS Start-End: 436-838
acctctccctatggtgtggctggctagcccgggggtctctacgctgcttggtctttgttaacggagatgaaggcagtaatttttcagtaacaggtttcagatataagtcccttggtgatgctaatatttatggaggccttactatgcattaagaacttttttagaagtttagaaaatggcagtgaataaagcagatacaaatctctgctctaagggagcttgcatagtaatgaaatttgagaagacagtggattggaagtgggattaactcagaatcaaaattttgtcgatgggttggaggaagaggaagttatttgggaccaaaaagacatacaggtgtgagtttatttgggagggaggaaggaatcctcatcagatgtgcaggaatgttggaaaagcctaaagattagactgtaagaaaagaaaatagaagccatgtttcgaagacctgtattacaggtacttcgtcagtttgtaagacatgagtccgaaacaactaccagtttggttcttgaaagatccctgaatcgtgtgcacttacttgggcgagtgggtcaggaccctgtcttgagacaggtggaaggaaaaaatccagtcacaatattttctctagcaactaatgagatgtggcgatcaggggatagtgaagtttaccaactgggtgatgtcagtcaaaagacaacatggcacagaatatcagtattccggccaggcctcagagacgtggcatatcaatatgtgaaaaaggggtctcgaatttatttggaagggaaaatagactatggtgaatacatggataaaaataatgtgaggcgacaagcaacaacaatcatagctg

SEQ ID NO: 181812 - DNA, 592 bp, Homo sapiens
  Payload ID: 15806
  Gene Symbol: SSBP1
  Gene Name: single-stranded DNA binding protein 1, mitochondrial
  Uniprot ID: Q04837
  ENST ID: ENST00000571430
  CDS Start-End: 190-592
gtgcgccggaagtgatcccctgcgtggctgggctgctcgggttagatcgtcaggtgagggaggaagggatagccagcgcgaaggaagtgctggagtcgtgtgttttggctgcgcgtgatcctgcgtgggtcgggaggtgtttctgtgaaaagcctaaagattagactgtaagaaaagaaaatagaagccatgtttcgaagacctgtattacaggtacttcgtcagtttgtaagacatgagtccgaaacaactaccagtttggttcttgaaagatccctgaatcgtgtgcacttacttgggcgagtgggtcaggaccctgtcttgagacaggtggaaggaaaaaatccagtcacaatattttctctagcaactaatgagatgtggcgatcaggggatagtgaagtttaccaactgggtgatgtcagtcaaaagacaacatggcacagaatatcagtattccggccaggcctcagagacgtggcatatcaatatgtgaaaaaggggtctcgaatttatttggaagggaaaatagactatggtgaatacatggataaaaataatgtgaggcgacaagcaacaacaatcatagctg

SEQ ID NO: 181813 - DNA, 536 bp, Homo sapiens
  Payload ID: 15806
  Gene Symbol: SSBP1
  Gene Name: single-stranded DNA binding protein 1, mitochondrial
  Uniprot ID: Q04837
  ENST ID: ENST00000570667
  CDS Start-End: 134-536
ctgtttcctttttcctctggcgagctttgcgttccctgtgcgccggaagtgatcccctgcgtggctgggctgctcgggttagatcgtcaggaaaagcctaaagattagactgtaagaaaagaaaatagaagccatgtttcgaagacctgtattacaggtacttcgtcagtttgtaagacatgagtccgaaacaactaccagtttggttcttgaaagatccctgaatcgtgtgcacttacttgggcgagtgggtcaggaccctgtcttgagacaggtggaaggaaaaaatccagtcacaatattttctctagcaactaatgagatgtggcgatcaggggatagtgaagtttaccaactgggtgatgtcagtcaaaagacaacatggcacagaatatcagtattccggccaggcctcagagacgtggcatatcaatatgtgaaaaaggggtctcgaatttatttggaagggaaaatagactatggtgaatacatggataaaaataatgtgaggcgacaagcaacaacaatcatagctg

SEQ ID NO: 181814 - DNA, 626 bp, Homo sapiens
  Payload ID: 15806
  Gene Symbol: SSBP1
  Gene Name: single-stranded DNA binding protein 1, mitochondrial
  ENST ID: ENST00000576311
  CDS Start-End: 224-626
gggttagatcgtcaggtgagggaggaagggatagccagcgcgaaggaagtgctggagtcgtgtgttttggctgcgcgtgatcctgcgtgggtcgggaggtgtttctgtgtaggtgtctggccctttcatcagtcgtgcggaggaccgcgtgatttccttccagttctcctcggttttcaggaaaagcctaaagattagactgtaagaaaagaaaatagaagccatgtttcgaagacctgtattacaggtacttcgtcagtttgtaagacatgagtccgaaacaactaccagtttggttcttgaaagatccctgaatcgtgtgcacttacttgggcgagtgggtcaggaccctgtcttgagacaggtggaaggaaaaaatccagtcacaatattttctctagcaactaatgagatgtggcgatcaggggatagtgaagtttaccaactgggtgatgtcagtcaaaagacaacatggcacagaatatcagtattccggccaggcctcagagacgtggcatatcaatatgtgaaaaaggggtctcgaatttatttggaagggaaaatagactatggtgaatacatggataaaaataatgtgaggcgacaagcaacaacaatcatagctg

SEQ ID NO: 181815 - DNA, 600 bp, Homo sapiens; identical to SEQ ID NO: 181806
  Payload ID: 15806
  Gene Symbol: SSBP1
  Gene Name: single-stranded DNA binding protein 1, mitochondrial
  ENST ID: ENST00000571709
  CDS Start-End: 237-600

SEQ ID NO: 181816 - DNA, 525 bp, Homo sapiens
  Payload ID: 15806
  Gene Symbol: SSBP1
  Gene Name: single-stranded DNA binding protein 1, mitochondrial
  Uniprot ID: Q04837
  ENST ID: ENST00000574199
  CDS Start-End: 123-525
ggtgtccacctctccctatggtgtggctggctagcccgggggtctctacgctgcttggtctttgttaacggagatgaaggaaaagcctaaagattagactgtaagaaaagaaaatagaagccatgtttcgaagacctgtattacaggtacttcgtcagtttgtaagacatgagtccgaaacaactaccagtttggttcttgaaagatccctgaatcgtgtgcacttacttgggcgagtgggtcaggaccctgtcttgagacaggtggaaggaaaaaatccagtcacaatattttctctagcaactaatgagatgtggcgatcaggggatagtgaagtttaccaactgggtgatgtcagtcaaaagacaacatggcacagaatatcagtattccggccaggcctcagagacgtggcatatcaatatgtgaaaaaggggtctcgaatttatttggaagggaaaatagactatggtgaatacatggataaaaataatgtgaggcgacaagcaacaacaatcatagctg

SEQ ID NO: 181817 - DNA, 884 bp, Homo sapiens
  Payload ID: 15806
  Gene Symbol: SSBP1
  Gene Name: single-stranded DNA binding protein 1, mitochondrial
  Uniprot ID: Q04837
  ENST ID: ENST00000612337
  CDS Start-End: 304-750
cctctggcgagctttgcgttccctgtgcgccggaagtgatcccctgcgtggctgggctgctcgggttagatcgtcaggtgagggaggaagggatagccagcgcgaaggaagtgctggagtcgtgtgttttggctgcgcgtgatcctgcgtgggtcgggaggtgtttctgtgtaggtgtctggccctttcatcagtcgtgcggaggaccgcgtgatttccttccagttctcctcggttttcaggtggtggcgccatcttcggaaaagcctaaagattagactgtaagaaaagaaaatagaagccatgtttcgaagacctgtattacaggtacttcgtcagtttgtaagacatgagtccgaaacaactaccagtttggttcttgaaagatccctgaatcgtgtgcacttacttgggcgagtgggtcaggaccctgtcttgagacaggtggaaggaaaaaatccagtcacaatattttctctagcaactaatgagatgtggcgatcaggggatagtgaagtttaccaactgggtgatgtcagtcaaaagacaacatggcacagaatatcagtattccggccaggcctcagagacgtggcatatcaatatgtgaaaaaggggtctcgaatttatttggaagggaaaatagactatggtgaatacatggataaaaataatgtgaggcgacaagcaacaacaatcatagctgataatattatatttctgagtgaccagacgaaagagaaggagtagaaaggatgattcttctttggccatcatttggtacagtctcatttccaagtcatgtataatctttatggcttccaaggacaagaattaaaatactcttttacgtaaaatgagtaataatcttttttctgactgtc

SEQ ID NO: 181818 - DNA, 8780 bp, Homo sapiens
  Payload ID: 15807
  Gene Symbol: SSBP2
  Gene Name: single-stranded DNA binding protein 2
  Uniprot ID: P81877
  ENST ID: ENST00000320672
  CDS Start-End: 212-1297
ggcttagccgccaccgcgcgcttcggaaggccagagggagggggaggcctgtcagtctcgcgcgttgcctgggcgaagggggcggagctttggcgtggggcggccaatagtgggggtggctgcgtgggtcgccatggggacggggctgttcccggggaggctgtgatgggttgacaggtgcgtgacagtgggagctgctctcggcacaagcatgtacggcaaaggcaagagtaacagcagcgccgtcccgtccgacagccaggcccgggagaagttagcactctacgtatatgaatatctgctccatgtaggagctcagaaatcagctcaaacatttttatcagagataagatgggaaaaaaacatcacattgggggaaccaccaggattcttacattcttggtggtgtgtattttgggatctctactgtgcagctccagagagacgtgaaacatgtgaacactcaagtgaagcaaaagccttccatgattacagtgctgcagcagctcccagtccagtgctaggaaacattcccccaggagatggcatgccagtaggtcctgtaccaccagggttctttcagccttttatgtcacctcggtaccctggaggtccaaggcccccattgaggatacctaatcaggcacttggaggtgtcccaggaagtcagccattactccccagtggaatggatccaactcgacaacaaggacatccaaatatgggtgggccaatgcagagaatgactcctccaagaggaatggtgcccttaggaccacagaactatggaggtgcaatgagacccccactgaatgctttaggtggccctggaatgcctggaatgaacatgggtccaggtggtggtagaccttggccaaacccaacaaatgccaattcaataccatactcctcagcatctcctgggaattatgtaggtcctccaggaggtggagggccaccaggaacacccatcatgcctagtccagcagattcaaccaactctggtgataacatgtatactttaatgaatgcagtacctcctggacctaacagacctaattttccaatgggtcctgggtcagatggtcccatgggtggattaggaggaatggagtcacatcacatgaatggctctttaggctcaggagatatggacagtatttccaagaattctcccaataatatgagcctgagtaatcaaccgggcactccaagggatgatggcgaaatggggggaaatttcttaaatccttttcagagtgagagttactcccctagcatgacaatgagcgtgtgatccattaccaagtctcctcatgaaaaccacagtgagtcagcccttcacagaactactacggaagaaaattattcatcacagtgtacagttaaacaaaggaatctcagtcacaccaaaccaacctttttatttcctgctctctcccctcttttgtgaagaaagcgggtccaaatgtgattcaaacaactgtacggagtggcatattagaattgccctaaactgaactgcaaataattatgtgtgtatgtatatgtgtgggaaagagaatgtactgtatatgtgtatgttatacagacatatacacatacatacattgacccacaggacattgtaaaatattatcacatgacatcttaagtagaaataagtagggacttttattccatcctttttttcacgtttacattttaattattacaagttgctcctgccccctccctgaactattttgtgctgtgtatatcactgctttatataagttattttttaaggtgaactcagatgttatggttttgtaaatgtctgcaatcatggataggaataaaatcgcttatttgagagctttcattaaattgcgtctgatgcaagttatcctgtgaatcacaaagtgtactgtctcaaaaaatagaagaaaatgtgtcttcgtctttatgttgaatcaaacaatttctcagttaccttcagtgaaaagtatttttttaatttttatttgagaaaaacacttcaaatcagtaaaagcttaactggggcctcacacagtatatttctgcaataactgctttaaacggagttcttgatttgtttgtcttagatgatacagaaatcattaaatagcccaaatcatttagaccatagcaataaagtgaccggggttgtcatatatttagcaacatcttttctctttaacatgatgaagcccaaaagtgataacaaaagcatttgcttgaatttgtcacttctcaccaggagtactagaggtaaatttttaataacatactaatgtgaaatggtatctggtttttattcagactttttgtgagcatattcttatagacactagaaataaatacatagaaggagactttgagcacaagggagaagagagttattagcactcctgaggcctctggaatgctgcttttctatccaggtatcttgcttgctaccagcagaattgactggtattggttctcactggccagggagcctctgctctgttcctggaatataaggcttttattcaggagcaaatcattgatagtaactttgctttatctagccattgacttcagcaggctaaaactacattgtgtaactgactgttcaaaaaagaataagtaaattttttttaatctaattcccttatggaaagcaccttgctctatggcactttccagatcttttgggattttgtgcttaattatacatacatacaccaaaatcacaatagaaagatatgaagactttaattttagactctgaaagataactgggtgatcctttgtgttaaaattgtgatacaaacaaccattgataaataccaactatgaatccaaactctagagactttgaaaagcattgtttaattgcaggtaagaggaatcttctctttcctttaggcttatagtctctaaagtgaaaatttggcaggatatagtcatgcagctcataatgacattccaatcaaccacagactgcatatacagcagtggtcctataagattataataccatatttttagcatatcttttctatgcttagatacacaaataccattgtattacagttgcctttggtattcagtacagtaacatgctgtacaggtttgtagcctaggagcaatagtttatattatatagcctaggtgtgtaggagcctataccatctaggtttgtgtaagtacactctatgatgttcagacaaggacaatattgcctgacaatgcatttctcagaatgtatacttatcattaagtaacatatgactgtatgtactagttcctgatgacttacttctctcaaattcataatgatttagtccttgtaaaaataaagattttgcctgtgcctaaacagggatactaggcagaactgttgagaaaaaaaagctgaattaaatttatgttgcagatttaaactatcataaaatgagcctcagttaatcacacacagtattcaggtgcctaggagtgcacaccggagaacagcctcatgctgtcaagctgcagaaacctttcatgcaaattcagatgaaaaggtctttacctcaagccagggtaacctgaatgaaggtgatagtttgtccagacacctgactttaccaagaagaattttgactttcatattttatgacaatcatataaaaattgacagtcctttgattattaagcttaatcttataatgctagaattttcaaatattttgttgactcttctccattgttaccgatcttgaaattcttttcttcgccttctgagaaggtattatttcttatcacaaagaatgatgaatatgattttatctacccttattttgggggtaatacgagaatatgaattgcatcatgatccccattatttctaacctaaaagtaaaattcgttttttttttcaaggcagagcagtcaattgattataagtatttatttcttttttcttcttggagcccagattaaaaagagttattttagatttaaaaatttcctgaaatagttgaaaaattatttttgaggagaaaattgtatccaagaaacccagaatgtaaggatacttgatttttatatccagataattctttcatgcactgaatggaagacagtatatctgtatattaatttttgtttagattttgaatcatttaacccttatccttttttcttgtaataagactatttaatgtttttctcttgtgttttccatctttatcaatgcattcgtgttggtcttgatgtatactacctgttcctagtgttatttttacacgtcatctcacagtaataatatcagcaattcttgctgcattgaacatattaaatacacatgtaaaatgaaaaagtaagcagtaggtaaaatcttgttactctgctttgcattctgcctaactcactgcatttgaaaatacatgtcaaattctttctgagggtatgtatgattcttaactacgtgtcttacagcaaagttgcccatgggaacaaaggctgtagggtgtcattgatcttgtaatacaacacatatttgatgggtgaatcttattagcactcctttgaaaatgttccagtatggagtcagttgctgataaagaggaagttcacagctaggaatccgaagttaagatttctcaattgccgcctgggcactcatgcctgtaatcccagcacttgggaggccaaggtgggcagatcacctgaggtcgggagttcaagaccagcctggccaacctggtgaaacccccccatctctactaaaaatacaaaaattagccaggtatggtggtggctgcctgtaatcccagctactcaagaggctgaggcgggagaatcacttgaacccaggaggcggaggttgcagtgagccgagattgtgccactgcactccagcctgggtgacagagcaagactccatctcaaaaatagaaaagatttctcaattgccaaaaagattaacaagtaaatcaattctgctcccccagccatgaaaagtgcccaaaacagccctttccctccagaataaaataaaacttccatttctatttttatgattctctaagatatctgaactccattgcatttcatagggttattcagttagcacttctgtggtttaaaagacaacaaatgaaaataagtaagttcagtttggggcatgaagaagtcccacatctgtctatatcttttcttcatcatattgtccctaggaatgtatagcaaagcattcagaactgctcctttggctggggaagttttccaccgtccttaatactatgaagtcttgattacttcttccgtggctttatccttgcctccctcccaatccctgcatcttccaggagaaataaaataccaactgaacactgttaccttctcagcccttaccattttcatctgcatatagtgtatagtactaagagtagttttcccaggagaaataattgcaattttcatttcttgattatcactgctaattcgaaggagtgccacaaatcatagccacttgattttgattttggaatgcattttagtgttttgacactggttttccttttttttaaatttttttttcttttttttttttgagacagtcttgctctgtcacccaggctggagtgcagtggcacaatcttggctcactgccgtctccgcctcccaggttccagagattctcctgcctcagcctccagagtagctggattacaggcatgcgtcacaggctaatttttgtatttttagtagaggcagggtttcaccatgttggccaggctggtctggaactcctgacctcaagtgatctgcccgcctcagcctcccaaagtgctgggattacaggcatgagccactatgcttgatcaggttttcctcttttttttttttttttttgagtcagaatcttgctctgtcacccaggctggagtgcaatggtgtgatctcggctcactgcaaccttcacctcccgggttcatgcaattctcctgcctcagcctcccgagtggctgggactacaggtgctcaccaccatgcccagctaattttttgtatttttagtagagaccgggtttcaccgtgttagccaggatggtctcgatctcctgacctcgtgatccacccgccttggcctcccaaagtgttgggattacaggcatgagccaccgtacctggcccaggttttcctttttttttatgtcttctgtacaatagagttggccctccatatccacaggttccacatccctgattcaatcaactcctgataaaaaatattggaaaaaatttttataacaataaaaaccaataatacaacaataattacaaataatacattgtaacaatgatttccatggcatttataatacattgtattaggtattataagtaaacgagatgatttgaagtatattggaggatgtgcataggttatactatgccgttttatataaaggacttaagcgtctgtggattttggtatctgcagaggtcctggaaccggtctcccttggatacggagggacaactgtagttctctgtctttgaaaacattaatcgatacaagtggccagtgaatgtatagtatgggagggagtaatccagtatgggggacaaggttgccatatatttgccaaaagtagttgaatcttctttctgtttttccctcctggtggaataagtttattgtttgctatgaggagccagaggctgtgtttgtttaaagcaatggtacccaatcttaagcatgtgtaaaggtctccctgggtctgtgaaccataccttgagaaataactagaaaagtaaaagaatggtgaaccactattaataatacttccattttgcatactaaatatgttgcgtgtacctgtgtgtgtgtgttgggaatagtaatatgaagtttgctcacaaaacactcccactgtgattcacattattttatagcacaaccaataatgattaaacataattatttcctttgactacttttcatttcagtggtaaaacagctgatgaaagttatttgggatggaaagagtaatacaagacatacgcagatggagtctcctgtgcgtaggtttagcacacccatgttagcttgtccacattaggccttcttttgaaggtactgtatctaaagataagggcataagtgatcatttaattctcagccacttcactgatactacaaggtgttacacagtaattatagtggtttgatacagacatttgtttacaagaaactgaattggcattattaacttatttcacacaaaaaaagttagctttacccatgaactgtaattcagattgataaggtgacctacccatgaaaaagacacctgagacctgtttacttttttaaactatgaagtgaaatcctcagttcaataagtgtcccaaggagaatttcctctgttaaattttccctgttaacttagtataattggttttcttgaatagaagaataatgatttctgtaagatattttaatgtgaatatttttgctgtcttcatctttaaaaattaaatacagtactatatatagatattaaaattttaaagtgggactaggtgtttttatgtatacaattacagtttgtctcctctctttgcaaatttactggctattatcagaataaaggttggactcattttgcttatcccagtcattaaaatgttgtgatctgtttctaacatatttagcatttcatttttaaaatgagatgtgccattatcataacaaaggcaactattaatgttcctagaaaaaatgatgtaaaggacttactcctagtcaatattaacacttaatcccactttcttttttccaccaaatggcctcagtacattgccaagagagtgaaatttggattcctcacagtactcagaacacaatatgatatttgtcagctaactttccatcatgtcttggtaaaattgctcagttaaatataattggccatctacttattaaaaaacaattcaaataatctgtacagttaccataatttgacaacaaattactttaaatttagcaccatcttagaaatcttcttaatataaactactgattgaaatgtgtttatactttctatcatatttcaaactgttttactttccttgcattaagacaattaaaacacaaactacatgttagaatgaataatttaaaggacatgctgctgtttcagcataaaaaatggtaaagtctttataaatagaatacttatgatagccattaacgtattgaattgtttaattaacctagttgtgattttccgaatttaagacgttttcttactacatgtgttaaattgttacctataatatcttcctggaaaaatagaagtatttgtaaggtttttataaatgcacaatttatgtataaatataattggaatctgggatgactcttagtaatctactattcttaattcaacgatggccaccagctacctgacacattttgtaaatttagcatctgtgtatgtgtgttcgtgtatgtgtgtgtgcgtgcatgtgcacattactgcatttattctcaaatggatttataatttagtgtttttgtacaagtacttgagctattcatgtaatgggataagttgccataaagatgtacataaatgacccttaatttggcacgttttcacatttaattttttaaaatacagcttttcatatacagttcctaccctttcatttctagcctgtacttcattacttgttgaaaaagtcaagtttgtatgaagccagcataaacatcaaaatataactaatgtgga

SEQ ID NO: 181819 - DNA, 709 bp, Homo sapiens
  Payload ID: 15807
  Gene Symbol: SSBP2
  Gene Name: single-stranded DNA binding protein 2
  ENST ID: ENST00000509013
  CDS Start-End: 84-709
taacagcagcgccgtcccgtccgacagccaggcccgggagaaaattcatctgtgccttattccagttcactcttgtaagggtgatgcttgtgatcccctcagccctcatgtattcattcgtattatattggaggttagcactctacgtatatgaatatctgctccatgtaggagctcagaaatcagctcaaacatttttatcagagataagatgggaaaaaaacatcacattgggggaaccaccaggattcttacattcttggtggtgtgtattttgggatctctactgtgcagctccagagagacgtgaaacatgtgaacactcaagtgaagcaaaagccttccatgattacagtgctgcagcagctcccagtccagtgctaggaaacattcccccaggagatggcatgccagtaggtcctgtaccaccagggttctttcagccttttatgtcacctcggtaccctggaggtccaaggcccccattgaggatacctaatcaggcacttggaggtgtcccaggaagtcagccattactccccagtggaatggatccaactcgacaacaaggacatccaaatatgggtgggccaatgcagagaatgactcctccaagaggaatggtgcccttaggaccacagaactatggaggtgcaatgagacccccactgaatgctttaggtggccctggaatgcctggaatgaacat

SEQ ID NO: 181820 - DNA, 1534 bp, Homo sapiens
  Payload ID: 15807
  Gene Symbol: SSBP2
  Gene Name: single-stranded DNA binding protein 2
  Uniprot ID: P81877
  ENST ID: ENST00000509053
  CDS Start-End: 7-903
acaagcatgtacggcaaaggcaagagtaacagcagcgccgtcccgtccgacagccaggcccgggagaagttagcactctacgtatatgaatatctgctccatgtaggagctcagaaatcagctcaaacatttttatcagagataagatgggaaaaaaacatcacattgggggaaccaccaggattcttacattcttggtggtgtgtattttgggatctctactgtgcagctccagagagacgtgaaacatgtgaacactcaagtgaagcaaaagccttccatgattacccttttatgtcacctcggtaccctggaggtccaaggcccccattgaggatacctaatcaggcacttggaggtgtcccaggaagtcagccattactccccagtggaatggatccaactcgacaacaaggacatccaaatatgggtgggccaatgcagagaatgactcctccaagaggaatggtgcccttaggaccacagaactatggaggtgcaatgagacccccactgaatgctttaggtggccctggaatgcctggaatgaacatgggtccaggtggtggtagaccttggccaaacccaacaaatgccaattcaataccatactcctcagcatctcctgggaattatgtaggtcctccaggaggtggagggccaccaggaacacccatcatgcctagtccagcagattcaaccaactctggtgataacatgtatactttaatgaatgcagtacctcctggacctaacagacctaattttccaatgggtcctgggtcagatggtcccatgggtggattaggaggaatggagtcacatcacatgaatggctctttaggctcaggagatatggacagtatttccaagtactcccctagcatgacaatgagcgtgtgatccattaccaagtctcctcatgaaaaccacagtgagtcagcccttcacagaactactacggaagaaaattattcatcacagtgtacagttaaacaaaggaatctcagtcacaccaaaccaacctttttatttcctgctctctcccctcttttgtgaagaaagcgggtccaaatgtgattcaaacaactgtacggagtggcatattagaattgccctaaactgaactgcaaataattatgtgtgtatgtatatgtgtgggaaagagaatgtactgtatatgtgtatgttatacagacatatacacatacatacattgacccacaggacattgtaaaatattatcacatgacatcttaagtagaaataagtagggacttttattccatcctttttttcacgtttacattttaattattacaagttgctcctgccccctccctgaactattttgtgctgtgtatatcactgctttatataagttattttttaaggtgaactcagatgttatggttttgtaaatgtctgcaatcatggataggaataaaatcgcttatttgagagctttcattaaattgcgtctgatgcaagttatcctgtgaatcacaaagtgtactgtctcaaaaaatagaag

SEQ ID NO: 181821 - DNA, 1521 bp, Homo sapiens
  Payload ID: 15807
  Gene Symbol: SSBP2
  Gene Name: single-stranded DNA binding protein 2
  Uniprot ID: P81877
  ENST ID: ENST00000505980
  CDS Start-End: 6-1031
caagcatgtacggcaaaggcaagagtaacagcagcgccgtcccgtccgacagccaggcccgggagaagttagcactctacgtatatgaatatctgctccatgtaggagctcagaaatcagctcaaacatttttatcagagataagatgggaaaaaaacatcacattgggggaaccaccaggattcttacattcttggtggtgtgtattttgggatctctactgtgcagctccagagagacgtgaaacatgtgaacactcaagtgaagcaaaagccttccatgattacagtgctgcagcagctcccagtccagtgctaggaaacattcccccaggagatggcatgccagtaggtcctgtaccaccagggttctttcaggcacttggaggtgtcccaggaagtcagccattactccccagtggaatggatccaactcgacaacaaggacatccaaatatgggtgggccaatgcagagaatgactcctccaagaggaatggtgcccttaggaccacagaactatggaggtgcaatgagacccccactgaatgctttaggtggccctggaatgcctggaatgaacatgggtccaggtggtggtagaccttggccaaacccaacaaatgccaattcaataccatactcctcagcatctcctgggaattatgtaggtcctccaggaggtggagggccaccaggaacacccatcatgcctagtccagcagattcaaccaactctggtgataacatgtatactttaatgaatgcagtacctcctggacctaacagacctaattttccaatgggtcctgggtcagatggtcccatgggtggattaggaggaatggagtcacatcacatgaatggctctttaggctcaggagatatggacagtatttccaagaattctcccaataatatgagcctgagtaatcaaccgggcactccaagggatgatggcgaaatggggggaaatttcttaaatccttttcagagtgagagttactcccctagcatgacaatgagcgtgtgatccattaccaagtctcctcatgaaaaccacagtgagtcagcccttcacagaactactacggaagaaaattattcatcacagtgtacagttaaacaaaggaatctcagtcacaccaaaccaacctttttatttcctgctctctcccctcttttgtgaagaaagcgggtccaaatgtgattcaaacaactgtacggagtggcatattagaattgccctaaactgaactgcaaataattatgtgtgtatgtatatgtgtgggaaagagaatgtactgtatatgtgtatgttatacagacatatacacatacatacattgacccacaggacattgtaaaatattatcacatgacatcttaagtagaaataagtagggacttttattccatcctttttttcacgtttacattttaattattacaagttgctcctgccccctccctgaactattttgtgctgtgtatatcactgctttatataagttattttttaa

SEQ ID NO: 181822 - DNA, 1336 bp, Homo sapiens
  Payload ID: 15807
  Gene Symbol: SSBP2
  Gene Name: single-stranded DNA binding protein 2
  ENST ID: ENST00000512923
  CDS Start-End: 1-795
agtgctgcagcagctcccagtccagtgctaggaaacattcccccaggagatggcatgccagtaggtcctgtaccaccagggttctttcagccttttatgtcacctcggtaccctggaggtccaaggcccccattgaggatacctaatcaggcacttggaggtgtcccaggaagtcagccattactccccagtggaatggatccaactcgacaacaaggacatccaaatatgggtgggccaatgcagagaatgactcctccaagaggaatggtgcccttaggaccacagaactatggaggtgcaatgagacccccactgaatgctttaggtggccctggaatgcctggaatgaacatgggtccaggtggtggtagaccttggccaaacccaacaaatgccaattcaataccatactcctcagcatctcctgggaattatgtaggtcctccaggaggtggagggccaccaggaacacccatcatgcctagtccagcagattcaaccaactctggtgataacatgtatactttaatgaatgcagtacctcctggacctaacagacctaattttccaatgggtcctgggtcagatggtcccatgggtggattaggaggaatggagtcacatcacatgaatggctctttaggtaaggcttttcaatttgataattctcccaataatatgagcctgagtaatcaaccgggcactccaagggatgatggcgaaatggggggaaatttcttaaatccttttcagagtgagagttactcccctagcatgacaatgagcgtgtgatccattaccaagtctcctcatgaaaaccacagtgagtcagcccttcacagaactactacggaagaaaattattcatcacagtgtacagttaaacaaaggaatctcagtcacaccaaaccaacctttttatttcctgctctctcccctcttttgtgaagaaagcgggtccaaatgtgattcaaacaactgtacggagtggcatattagaattgccctaaactgaactgcaaataattatgtgtgtatgtatatgtgtgggaaagagaatgtactgtatatgtgtatgttatacagacatatacacatacatacattgacccacaggacattgtaaaatattatcacatgacatcttaagtagaaataagtagggacttttattccatcctttttttcacgtttacattttaattattacaagttgctcctgccccctccctgaactattttgtgctgtgtatatcactgctttatataagttattttttaaggtgaactcagatgttatggttttgtaaatgtctgcaatcatggataggaa

SEQ ID NO: 181823 - DNA, 1398 bp, Homo sapiens
  Payload ID: 15807
  Gene Symbol: SSBP2
  Gene Name: single-stranded DNA binding protein 2
  Uniprot ID: P81877
  ENST ID: ENST00000515395
  CDS Start-End: 56-1075
gaggctgtgatgggttgacaggtgcgtgacagtgggagctgctctcggcacaagcatgtacggcaaaggcaagagtaacagcagcgccgtcccgtccgacagccaggcccgggagaagttagcactctacgtatatgaatatctgctccatgtaggagctcagaaatcagctcaaacatttttatcagagataagatgggaaaaaaacatcacattgggggaaccaccaggattcttacattcttggtggtgtgtattttgggatctctactgtgcagctccagagagacgtgaaacatgtgaacactcaagtgaagcaaaagccttccatgattacccttttatgtcacctcggtaccctggaggtccaaggcccccattgaggatacctaatcaggcacttggaggtgtcccaggaagtcagccattactccccagtggaatggatccaactcgacaacaaggacatccaaatatgggtgggccaatgcagagaatgactcctccaagaggaatggtgcccttaggaccacagtctgacccttggttatcattacagaactatggaggtgcaatgagacccccactgaatgctttaggtggccctggaatgcctggaatgaacatgggtccaggtggtggtagaccttggccaaacccaacaaatgccaattcaataccatactcctcagcatctcctgggaattatgtaggtcctccaggaggtggagggccaccaggaacacccatcatgcctagtccagcagattcaaccaactctggtgataacatgtatactttaatgaatgcagtacctcctggacctaacagacctaattttccaatgggtcctgggtcagatggtcccatgggtggattaggaggaatggagtcacatcacatgaatggctctttaggctcaggagatatggacagtatttccaagaattctcccaataatatgagcctgagtaatcaaccgggcactccaagggatgatggcgaaatggggggaaatttcttaaatccttttcagagtgagagttactcccctagcatgacaatgagcgtgtgatccattaccaagtctcctcatgaaaaccacagtgagtcagcccttcacagaactactacggaagaaaattattcatcacagtgtacagttaaacaaaggaatctcagtcacaccaaaccaacctttttatttcctgctctctcccctcttttgtgaagaaagcgggtccaaatgtgattcaaacaactgtacggagtggcatattagaattgccctaaactgaactgcaaataattatgtgtgtatgtatatgtgtgggaaagagaatgtactgtatatgtgtatgttatacagacatatacacatacatacattgacccaca

SEQ ID NO: 181824 - DNA, 1396 bp, Homo sapiens
  Payload ID: 15807
  Gene Symbol: SSBP2
  Gene Name: single-stranded DNA binding protein 2
  ENST ID: ENST00000504985
  CDS Start-End: 1-828
agtgctgcagcagctcccagtccagtgctaggaaacattcccccaggagatggcatgccagtaggtcctgtaccaccagggttctttcagccttttatgtcacctcggtaccctggaggtccaaggcccccattgaggatacctaatcaggcacttggaggtgtcccaggaagtcagccattactccccagtggaatggatccaactcgacaacaaggacatccaaatatgggtgggccaatgcagagaatgactcctccaagaggaatggtgcccttaggaccacagtctgacccttggttatcattacagaactatggaggtgcaatgagacccccactgaatgctttaggtggccctggaatgcctggaatgaacatgggtccaggtggtggtagaccttggccaaacccaacaaatgccaattcaataccatactcctcagcatctcctgggaattatgtaggtcctccaggaggtggagggccaccaggaacacccatcatgcctagtccagcagattcaaccaactctggtgataacatgtatactttaatgaatgcagtacctcctggacctaacagacctaattttccaatgggtcctgggtcagatggtcccatgggtggattaggaggaatggagtcacatcacatgaatggctctttaggctcaggagatatggacagtatttccaagaattctcccaataatatgagcctgagtaatcaaccgggcactccaagggatgatggcgaaatggggggaaatttcttaaatccttttcagagtgagagttactcccctagcatgacaatgagcgtgtgatccattaccaagtctcctcatgaaaaccacagtgagtcagcccttcacagaactactacggaagaaaattattcatcacagtgtacagttaaacaaaggaatctcagtcacaccaaaccaacctttttatttcctgctctctcccctcttttgtgaagaaagcgggtccaaatgtgattcaaacaactgtacggagtggcatattagaattgccctaaactgaactgcaaataattatgtgtgtatgtatatgtgtgggaaagagaatgtactgtatatgtgtatgttatacagacatatacacatacatacattgacccacaggacattgtaaaatattatcacatgacatcttaagtagaaataagtagggacttttattccatcctttttttcacgtttacattttaattattacaagttgctcctgccccctccctgaactattttgtgctgtgtatatcactgctttatataagttattttttaaggtgaactcagatgttatggttttgtaaatgtctgcaatcatggataggaataaaatcgcttatttgagagctttcat

SEQ ID NO: 181825 - DNA, 1790 bp, Homo sapiens
  Payload ID: 15807
  Gene Symbol: SSBP2
  Gene Name: single-stranded DNA binding protein 2
  Uniprot ID: P81877
  ENST ID: ENST00000514493
  CDS Start-End: 209-1204
ttagccgccaccgcgcgcttcggaaggccagagggagggggaggcctgtcagtctcgcgcgttgcctgggcgaagggggcggagctttggcgtggggcggccaatagtgggggtggctgcgtgggtcgccatggggacggggctgttcccggggaggctgtgatgggttgacaggtgcgtgacagtgggagctgctctcggcacaagcatgtacggcaaaggcaagagtaacagcagcgccgtcccgtccgacagccaggcccgggagaagttagcactctacgtatatgaatatctgctccatgtaggagctcagaaatcagctcaaacatttttatcagagataagatgggaaaaaaacatcacattgggggaaccaccaggattcttacattcttggtggtgtgtattttgggatctctactgtgcagctccagagagacgtgaaacatgtgaacactcaagtgaagcaaaagccttccatgattacccttttatgtcacctcggtaccctggaggtccaaggcccccattgaggatacctaatcaggcacttggaggtgtcccaggaagtcagccattactccccagtggaatggatccaactcgacaacaaggacatccaaatatgggtgggccaatgcagagaatgactcctccaagaggaatggtgcccttaggaccacagaactatggaggtgcaatgagacccccactgaatgctttaggtggccctggaatgcctggaatgaacatgggtccaggtggtggtagaccttggccaaacccaacaaatgccaattcaataccatactcctcagcatctcctgggaattatgtaggtcctccaggaggtggagggccaccaggaacacccatcatgcctagtccagcagattcaaccaactctggtgataacatgtatactttaatgaatgcagtacctcctggacctaacagacctaattttccaatgggtcctgggtcagatggtcccatgggtggattaggaggaatggagtcacatcacatgaatggctctttaggctcaggagatatggacagtatttccaagaattctcccaataatatgagcctgagtaatcaaccgggcactccaagggatgatggcgaaatggggggaaatttcttaaatccttttcagagtgagagttactcccctagcatgacaatgagcgtgtgatccattaccaagtctcctcatgaaaaccacagtgagtcagcccttcacagaactactacggaagaaaattattcatcacagtgtacagttaaacaaaggaatctcagtcacaccaaaccaacctttttatttcctgctctctcccctcttttgtgaagaaagcgggtccaaatgtgattcaaacaactgtacggagtggcatattagaattgccctaaactgaactgcaaataattatgtgtgtatgtatatgtgtgggaaagagaatgtactgtatatgtgtatgttatacagacatatacacatacatacattgacccacaggacattgtaaaatattatcacatgacatcttaagtagaaataagtagggacttttattccatcctttttttcacgtttacattttaattattacaagttgctcctgccccctccctgaactattttgtgctgtgtatatcactgctttatataagttattttttaaggtgaactcagatgttatggttttgtaaatgtctgcaatcatggataggaataaaatcgcttatttgagagctttcattaaattgcgtctgatgca

SEQ ID NO: 181826 - DNA, 4465 bp, Homo sapiens
  Payload ID: 15807
  Gene Symbol: SSBP2
  Gene Name: single-stranded DNA binding protein 2
  ENST ID: ENST00000615665
  CDS Start-End: 212-1321
ggcttagccgccaccgcgcgcttcggaaggccagagggagggggaggcctgtcagtctcgcgcgttgcctgggcgaagggggcggagctttggcgtggggcggccaatagtgggggtggctgcgtgggtcgccatggggacggggctgttcccggggaggctgtgatgggttgacaggtgcgtgacagtgggagctgctctcggcacaagcatgtacggcaaaggcaagagtaacagcagcgccgtcccgtccgacagccaggcccgggagaagttagcactctacgtatatgaatatctgctccatgtaggagctcagaaatcagctcaaacatttttatcagagataagatgggaaaaaaacatcacattgggggaaccaccaggattcttacattcttggtggtgtgtattttgggatctctactgtgcagctccagagagacgtgaaacatgtgaacactcaagtgaagcaaaagccttccatgattacagtgctgcagcagctcccagtccagtgctaggaaacattcccccaggagatggcatgccagtaggtcctgtaccaccagggttctttcagccttttatgtcacctcggtaccctggaggtccaaggcccccattgaggatacctaatcaggcacttggaggtgtcccaggaagtcagccattactccccagtggaatggatccaactcgacaacaaggacatccaaatatgggtgggccaatgcagagaatgactcctccaagaggaatggtgcccttaggaccacagtctgacccttggttatcattacagaactatggaggtgcaatgagacccccactgaatgctttaggtggccctggaatgcctggaatgaacatgggtccaggtggtggtagaccttggccaaacccaacaaatgccaattcaataccatactcctcagcatctcctgggaattatgtaggtcctccaggaggtggagggccaccaggaacacccatcatgcctagtccagcagattcaaccaactctggtgataacatgtatactttaatgaatgcagtacctcctggacctaacagacctaattttccaatgggtcctgggtcagatggtcccatgggtggattaggaggaatggagtcacatcacatgaatggctctttaggctcaggagatatggacagtatttccaagaattctcccaataatatgagcctgagtaatcaaccgggcactccaagggatgatggcgaaatggggggaaatttcttaaatccttttcagagtgagagttactcccctagcatgacaatgagcgtgtgatccattaccaagtctcctcatgaaaaccacagtgagtcagcccttcacagaactactacggaagaaaattattcatcacagtgtacagttaaacaaaggaatctcagtcacaccaaaccaacctttttatttcctgctctctcccctcttttgtgaagaaagcgggtccaaatgtgattcaaacaactgtacggagtggcatattagaattgccctaaactgaactgcaaataattatgtgtgtatgtatatgtgtgggaaagagaatgtactgtatatgtgtatgttatacagacatatacacatacatacattgacccacaggacattgtaaaatattatcacatgacatcttaagtagaaataagtagggacttttattccatcctttttttcacgtttacattttaattattacaagttgctcctgccccctccctgaactattttgtgctgtgtatatcactgctttatataagttattttttaaggtgaactcagatgttatggttttgtaaatgtctgcaatcatggataggaataaaatcgcttatttgagagctttcattaaattgcgtctgatgcaagttatcctgtgaatcacaaagtgtactgtctcaaaaaatagaagaaaatgtgtcttcgtctttatgttgaatcaaacaatttctcagttaccttcagtgaaaagtatttttttaatttttatttgagaaaaacacttcaaatcagtaaaagcttaactggggcctcacacagtatatttctgcaataactgctttaaacggagttcttgatttgtttgtcttagatgatacagaaatcattaaatagcccaaatcatttagaccatagcaataaagtgaccggggttgtcatatatttagcaacatcttttctctttaacatgatgaagcccaaaagtgataacaaaagcatttgcttgaatttgtcacttctcaccaggagtactagaggtaaatttttaataacatactaatgtgaaatggtatctggtttttattcagactttttgtgagcatattcttatagacactagaaataaatacatagaaggagactttgagcacaagggagaagagagttattagcactcctgaggcctctggaatgctgcttttctatccaggtatcttgcttgctaccagcagaattgactggtattggttctcactggccagggagcctctgctctgttcctggaatataaggcttttattcaggagcaaatcattgatagtaactttgctttatctagccattgacttcagcaggctaaaactacattgtgtaactgactgttcaaaaaagaataagtaaattttttttaatctaattcccttatggaaagcaccttgctctatggcactttccagatcttttgggattttgtgcttaattatacatacatacaccaaaatcacaatagaaagatatgaagactttaattttagactctgaaagataactgggtgatcctttgtgttaaaattgtgatacaaacaaccattgataaataccaactatgaatccaaactctagagactttgaaaagcattgtttaattgcaggtaagaggaatcttctctttcctttaggcttatagtctctaaagtgaaaatttggcaggatatagtcatgcagctcataatgacattccaatcaaccacagactgcatatacagcagtggtcctataagattataataccatatttttagcatatcttttctatgcttagatacacaaataccattgtattacagttgcctttggtattcagtacagtaacatgctgtacaggtttgtagcctaggagcaatagtttatattatatagcctaggtgtgtaggagcctataccatctaggtttgtgtaagtacactctatgatgttcagacaaggacaatattgcctgacaatgcatttctcagaatgtatacttatcattaagtaacatatgactgtatgtactagttcctgatgacttacttctctcaaattcataatgatttagtccttgtaaaaataaagattttgcctgtgcctaaacagggatactaggcagaactgttgagaaaaaaaagctgaattaaatttatgttgcagatttaaactatcataaaatgagcctcagttaatcacacacagtattcaggtgcctaggagtgcacaccggagaacagcctcatgctgtcaagctgcagaaacctttcatgcaaattcagatgaaaaggtctttacctcaagccagggtaacctgaatgaaggtgatagtttgtccagacacctgactttaccaagaagaattttgactttcatattttatgacaatcatataaaaattgacagtcctttgattattaagcttaatcttataatgctagaattttcaaatattttgttgactcttctccattgttaccgatcttgaaattcttttcttcgccttctgagaaggtattatttcttatcacaaagaatgatgaatatgattttatctacccttattttgggggtaatacgagaatatgaattgcatcatgatccccattatttctaacctaaaagtaaaattcgttttttttttcaaggcagagcagtcaattgattataagtatttatttcttttttcttcttggagcccagattaaaaagagttattttagatttaaaaatttcctgaaatagttgaaaaattatttttgaggagaaaattgtatccaagaaacccagaatgtaaggatacttgatttttatatccagataattctttcatgcactgaatggaagacagtatatctgtatattaatttttgtttagattttgaatcatttaacccttatccttttttcttgtaataagactatttaatgtttttctcttgtgttttccatctttatcaatgcattcgtgttggtcttgatgtatactacctgttcctagtgttatttttacacgtcatctcacagtaataatatcagcaattcttgctgcattgaacatattaaatacacatgtaaaatgaaaaagtaagcagtaggtaaaatcttgttactctgctttgcattctgcctaactcactgcatttgaaaatacatgtcaaattctttctgagggta

SEQ ID NO: 181827 - DNA, 1698 bp, Homo sapiens
  Payload ID: 15807
  Gene Symbol: SSBP2
  Gene Name: single-stranded DNA binding protein 2
  ENST ID: ENST00000622130
  CDS Start-End: 185-1129
gggttgacaggtgcgtgacagtgggagctgctctcggcacaagcatgtacggcaaaggcaagagtaacagcagcgccgtcccgtccgacagccaggcccgggagaagttagcactctacgtatatgaatatctgctccatgtaggagctcagaaatcagctcaaacatttttatcagagataagatgggaaaaaacatcacattgggggaaccaccaggattcttacattcttggtggtgtgtattttgggatctctactgtgcagctccagagagacgtgaaacatgtgaacactcaagtgaagcaaaagccttccatgattacagtgctgcagcagctcccagtccagtgctaggaaacattcccccaggagatggcatgccagtaggtcctgtaccaccagggttctttcagccttttatgtcacctcggtaccctggaggtccaaggcccccattgaggatacctaatcaggcacttggaggtgtcccaggaagtcagccattactccccagtggaatggatccaactcgacaacaaggacatccaaatatgggtgggccaatgcagagaatgactcctccaagaggaatggtgcccttaggaccacagaactatggaggtgcaatgagacccccactgaatgctttaggtggccctggaatgcctggaatgaacatgggtccaggtggtggtagaccttggccaaacccaacaaatgccaattcaataccatactcctcagcatctcctgggaattatgtaggtcctccaggaggtggagggccaccaggaacacccatcatgcctagtccagcagattcaaccaactctggtgataacatgtatactttaatgaatgcagtacctcctggacctaacagacctaattttccaatgggtcctgggtcagatggtcccatgggtggattaggaggaatggagtcacatcacatgaatggctctttaggctcaggagatatggacagtatttccaagaattctcccaataatatgagcctgagtaatcaaccgggcactccaagggatgatggcgaaatggggggaaatttcttaaatccttttcagagtgagagttactcccctagcatgacaatgagcgtgtgatccattaccaagtctcctcatgaaaaccacagtgagtcagcccttcacagaactactacggaagaaaattattcatcacagtgtacagttaaacaaaggaatctcagtcacaccaaaccaacctttttatttcctgctctctcccctcttttgtgaagaaagcgggtccaaatgtgattcaaacaactgtacggagtggcatattagaattgccctaaactgaactgcaaataattatgtgtgtatgtatatgtgtgggaaagagaatgtactgtatatgtgtatgttatacagacatatacacatacatacattgacccacaggacattgtaaaatattatcacatgacatcttaagtagaaataagtagggacttttattccatcctttttttcacgtttacattttaattattacaagttgctcctgccccctccctgaactattttgtgctgtgtatatcactgctttatataagttattttttaaggtgaactcagatgttatggttttgtaaatgtctgcaatcatggataggaataaaatcgcttatttgagagctttcatt

SEQ ID NO: 181828 - DNA, 627 bp, Homo sapiens
  Payload ID: 15808
  Gene Symbol: SMUG1
  Gene Name: single-strand-selective monofunctional uracil-DNA glycosylase 1
  Uniprot ID: Q53HV7
  ENST ID: ENST00000243112
  CDS Start-End: 46-579
ggaaacgggatggggagctggaccaggtgacagcggcatggacatatgccccaggctttcctgctggggtccatccatgagcctgcaggtgccctcatggagccccagccctgccctggaagcttggctgagagcttcctggaggaggagcttcggctcaatgctgagctgagccagctgcagttttcggagcctgtgggcatcatctacaatcccgtggagtatgcatgggagccacatcgcaactacgtgactcgctactgccagggccccaaggaagtactcttcctgggcatgaaccctggaccttttggcatggcccagactggggtgccctttggggaagtaagcatggtccgggactggttgggcattgtggggcctgtgctgacccctccccaagagcatcctaaacgaccagtgctgggactggagtgcccacagtcagaaggaccaagacaaagcatgggacatgaaattaagagtgaacttcttatgggaggctgcagctggatcagaggaaaaatccagtgtgacagagtgcaagtcagaagacctggcttttcatcccagctttgaaacttggaactttttgattgacaaattaataaacctctctatgcctca

SEQ ID NO: 181829 - DNA, 1571 bp, Homo sapiens
  Payload ID: 15808
  Gene Symbol: SMUG1
  Gene Name: single-strand-selective monofunctional uracil-DNA glycosylase 1
  Uniprot ID: Q53HV7
  ENST ID: ENST00000337581
  CDS Start-End: 131-943
aaacgggatggggagctggaccagcagattatgagcttacagaaagcctggcctacattttactctttttggatttcttcctcatcaagagactgctgcagtgcctgtcatgtgacagcggcatggacatatgccccaggctttcctgctggggtccatccatgagcctgcaggtgccctcatggagccccagccctgccctggaagcttggctgagagcttcctggaggaggagcttcggctcaatgctgagctgagccagctgcagttttcggagcctgtgggcatcatctacaatcccgtggagtatgcatgggagccacatcgcaactacgtgactcgctactgccagggccccaaggaagtactcttcctgggcatgaaccctggaccttttggcatggcccagactggggtgccctttggggaagtaagcatggtccgggactggttgggcattgtggggcctgtgctgacccctccccaagagcatcctaaacgaccagtgctgggactggagtgcccacagtcagaagtgagtggtgcccgattctggggctttttccggaacctctgtggacagcctgaggtcttcttccatcactgttttgtccacaatctatgccctctgcttttcctggctcccagcgggcgcaaccttactcctgctgagctgcctgccaagcagcgagaacagcttcttgggatctgtgatgcagccctctgccggcaggtgcagctgctgggggtgcggctggtggtgggagttgggcgactggcagagcagcgggcacgacgggctctggcaggcctgatgccagaggtccaggtggaagggctcctgcatccctctccccgtaacccacaggccaacaagggctgggaggcagtggccaaggaaagattgaatgagctggggctgctgccactgctgttgaaatgagtgcccttggggccttgcatgggacacattcaagacctcgaagtcattcttggccaagcagatgacaacacatctcctggactggagcaaaaggtccttctgtgcaccctggtcgctgggaaacgtattctttgatctgttgaactgtcttccaacctgccatggcagttttgacactactcctgtttgccctcctgattcctgctttctttaccttttaacattgcccctttcaggggaccccactttgtagggaatctgcagaaggtgtgcttttgcacttgcagactgctctacctcagtgtttccttgggagactttattcagctgagagtgccctagacagtaacttctaaggtcacgtttactatttcagaggaaatatcttgccaggatacctacccatccttatagaacagttacctttagctgacccctttcctcacagggaccaagacaaagcatgggacatgaaattaagagtgaacttcttatgggaggctgcagctggatcagaggaaaaatccagtgtgacagagtgcaagtcagaagacctggcttttcatcccagctttgaaacttggaactttttgattgacaaattaataaacctctctatgcctcaggc

SEQ ID NO: 181830 - DNA, 1082 bp, Homo sapiens
  Payload ID: 15808
  Gene Symbol: SMUG1
  Gene Name: single-strand-selective monofunctional uracil-DNA glycosylase 1
  Uniprot ID: Q53HV7
  ENST ID: ENST00000401977
  CDS Start-End: 128-940
agacggaattttgctctgaattccaggctggagtgcaatggcgcgatctcagctcactgcagcctccgcctcccgggttcaagcgattcttctgcctcagcctcccgagtgacagcggcatggacatatgccccaggctttcctgctggggtccatccatgagcctgcaggtgccctcatggagccccagccctgccctggaagcttggctgagagcttcctggaggaggagcttcggctcaatgctgagctgagccagctgcagttttcggagcctgtgggcatcatctacaatcccgtggagtatgcatgggagccacatcgcaactacgtgactcgctactgccagggccccaaggaagtactcttcctgggcatgaaccctggaccttttggcatggcccagactggggtgccctttggggaagtaagcatggtccgggactggttgggcattgtggggcctgtgctgacccctccccaagagcatcctaaacgaccagtgctgggactggagtgcccacagtcagaagtgagtggtgcccgattctggggctttttccggaacctctgtggacagcctgaggtcttcttccatcactgttttgtccacaatctatgccctctgcttttcctggctcccagcgggcgcaaccttactcctgctgagctgcctgccaagcagcgagaacagcttcttgggatctgtgatgcagccctctgccggcaggtgcagctgctgggggtgcggctggtggtgggagttgggcgactggcagagcagcgggcacgacgggctctggcaggcctgatgccagaggtccaggtggaagggctcctgcatccctctccccgtaacccacaggccaacaagggctgggaggcagtggccaaggaaagattgaatgagctggggctgctgccactgctgttgaaatgagtgcccttggggccttgcatgggacacattcaagacctcgaagtcattcttggccaagcagatgacaacacatctcctggactggagcaaaaggtccttctgtgcaccctggtcgctgggaaacgtattctttgatctgttg

SEQ ID NO: 181831 - DNA, 926 bp, Homo sapiens
  Payload ID: 15808
  Gene Symbol: SMUG1
  Gene Name: single-strand-selective monofunctional uracil-DNA glycosylase 1
  Uniprot ID: Q53HV7
  ENST ID: ENST00000514685
  CDS Start-End: 327-860
agggggctgggaatccgggactgtgggggcaagttgacggctcccagggtcgtcggggctgagccgagagggtggttagaatttctatattttggggtccctccctccgtatggggtaagactcagtgcagggagagcccagcctatgaaaccgcctgggaggtctgcaggatcaaggctttccagtcggccggagccagcgggcgcccccggaggttttcagattatgagcttacagaaagcctggcctacattttactctttttggatttcttcctcatcaagagactgctgcagtgcctgtcatgtgacagcggcatggacatatgccccaggctttcctgctggggtccatccatgagcctgcaggtgccctcatggagccccagccctgccctggaagcttggctgagagcttcctggaggaggagcttcggctcaatgctgagctgagccagctgcagttttcggagcctgtgggcatcatctacaatcccgtggagtatgcatgggagccacatcgcaactacgtgactcgctactgccagggccccaaggaagtactcttcctgggcatgaaccctggaccttttggcatggcccagactggggtgccctttggggaagtaagcatggtccgggactggttgggcattgtggggcctgtgctgacccctccccaagagcatcctaaacgaccagtgctgggactggagtgcccacagtcagaaggaccaagacaaagcatgggacatgaaattaagagtgaacttcttatgggaggctgcagctggatcagaggaaaaatccagtgtgacagagtgcaagtcagaagacctggcttttcatcccagctttgaaacttggaactttttgattgacaaattaataaacctctctatgcctcaggctcctcatctgtaaaa

SEQ ID NO: 181832 - DNA, 712 bp, Homo sapiens
  Payload ID: 15808
  Gene Symbol: SMUG1
  Gene Name: single-strand-selective monofunctional uracil-DNA glycosylase 1
  Uniprot ID: Q53HV7
  ENST ID: ENST00000506595
  CDS Start-End: 113-646
ctgaattccaggctggagtgcaatggcgcgatctcagctcactgcagcctccgcctcccgggttcaagcgattcttctgcctcagcctcccgagtgacagcggcatggacatatgccccaggctttcctgctggggtccatccatgagcctgcaggtgccctcatggagccccagccctgccctggaagcttggctgagagcttcctggaggaggagcttcggctcaatgctgagctgagccagctgcagttttcggagcctgtgggcatcatctacaatcccgtggagtatgcatgggagccacatcgcaactacgtgactcgctactgccagggccccaaggaagtactcttcctgggcatgaaccctggaccttttggcatggcccagactggggtgccctttggggaagtaagcatggtccgggactggttgggcattgtggggcctgtgctgacccctccccaagagcatcctaaacgaccagtgctgggactggagtgcccacagtcagaaggaccaagacaaagcatgggacatgaaattaagagtgaacttcttatgggaggctgcagctggatcagaggaaaaatccagtgtgacagagtgcaagtcagaagacctggcttttcatcccagctttgaaacttggaactttttgattgacaaattaataaacctctctatgcctcaggctcctcatctgtaaaa

SEQ ID NO: 181833 - DNA, 470 bp, Homo sapiens
  Payload ID: 15808
  Gene Symbol: SMUG1
  Gene Name: single-strand-selective monofunctional uracil-DNA glycosylase 1
  ENST ID: ENST00000504797
  CDS Start-End: 184-470
ggaagtagggggctgggaatccgggactgtgggggcaagttgacggctcccagggtcgtcggggctgagccgagagggtgattatgagcttacagaaagcctggcctacattttactctttttggatttcttcctcatcaagagactgctgcagtgcctgtcatgtgacagcggcatggacatatgccccaggctttcctgctggggtccatccatgagcctgcaggtgccctcatggagccccagccctgccctggaagcttggctgagagcttcctggaggaggagcttcggctcaatgctgagctgagccagctgcagttttcggagcctgtgggcatcatctacaatcccgtggagtatgcatgggagccacatcgcaactacgtgactcgctactgccagggccccaaggaagtactcttcctgggcatgaaccctggaccttttggcatggcccagactggggt

SEQ ID NO: 181834 - DNA, 2607 bp, Homo sapiens
  Payload ID: 15808
  Gene Symbol: SMUG1
  Gene Name: single-strand-selective monofunctional uracil-DNA glycosylase 1
  ENST ID: ENST00000505128
  CDS Start-End: 124-504
acgggatggggagctggaccaggctggagtgcaatggcgcgatctcagctcactgcagcctccgcctcccgggttcaagcgattcttctgcctcagcctcccgagtgacagcggcatggacatatgccccaggctttcctgctggggtccatccatgagcctgcaggtgccctcatggagccccagccctgccctggaagcttggctgagagcttcctggaggaggagcttcggctcaatgctgagctgagccagctgcagttttcggagcctgtgggcatcatctacaatcccgtggagtatgcatgggagccacatcgcaactacgtgactcgctactgccagggccccaaggaagtactcttcctgggcatgaaccctggaccttttggcatggcccagactggggtaaagggtttggcttccccagtgggtggagtggggggttctaggtggatgcttggctgggtgtgctgtggagaaggagcatgtgcatggctgtagacatgtgtaggtcctcccgccccattctgtctcaacacatatactggctcctgtggtccgaggccctctcccagcgtctctgcccgtaattaaccaagcacattaatggtagtttcgttttccctgtgagctggccagtaattgcctctgagagcccttccttccgccagccccatccttactttactggatctcccctgtccctgaagtgtggttggggtcagaagagggactaggactgctgggtcctcagaagagactggttgacaggggtgggtatgtaagagatgcagggcgttctgggaacctgggttctgtttcctagctaaggcgaggttcaaaacagagcctggctccagtgcctgcccgcttttctttcagggctcaggatgagtgactgcccccagtgggggtgcttggcaggtgggggaggggaagaggcttcagggcagaaggctcaatcgcttttattgaccccaactgggtgatgaaaggtgatcaatgatgatcgatggaaatgacagcctgaggcttggggctgagagggcatccagacagcagtggtcagcccatccttgtgcctcctttaaccctggctgcctttctgtctcagaccatctgtctgtccccagtactaaccatcaaaccctgtgtagggctagatatctcaatgtagtccctgtacttagtcccaaaggctagttgggctagagggaaacaaattcttctggaccacggttcacaatgaagaactggaaaaagacagacaggctcaaaccatagggccaagaatccttgtctcaggcctttgggtgaaggtaggggtagggggtgcaggctggatcctcatgtaaggtataaagaagtcagttggtccagagcccgggcctcaggtctccagtttgaagcctttcatgtctctctccttcctcacaggtgccctttggggaagtaagcatggtccgggactggttgggcattgtggggcctgtgctgacccctccccaagagcatcctaaacgaccagtgctgggactggagtgcccacagtcagaagtgagtggtgcccgattctggggctttttccggaacctctgtggacagcctgaggtcttcttccatcactgttttgtccacaatctatgccctctgcttttcctggctcccagcgggcgcaaccttactcctgctgagctgcctgccaagcagcgagaacagcttcttgggatctgtgatgcagccctctgccggcaggtgcagctgctgggggtgcggctggtggtgggagttgggcgactggcagagcagcgggcacgacgggctctggcaggcctgatgccagaggtccaggtggaagggctcctgcatccctctccccgtaacccacaggccaacaagggctgggaggcagtggccaaggaaagattgaatgagctggggctgctgccactgctgttgaaatgagtgcccttggggccttgcatgggacacattcaagacctcgaagtcattcttggccaagcagatgacaacacatctcctggactggagcaaaaggtccttctgtgcaccctggtcgctgggaaacgtattctttgatctgttgaactgtcttccaacctgccatggcagttttgacactactcctgtttgccctcctgattcctgctttctttaccttttaacattgcccctttcaggggaccccactttgtagggaatctgcagaaggtgtgcttttgcacttgcagactgctctacctcagtgtttccttgggagactttattcagctgagagtgccctagacagtaacttctaaggtcacgtttactatttcagaggaaatatcttgccaggatacctacccatccttatagaacagttacctttagctgacccctttcctcacagggaccaagacaaagcatgggacatgaaattaagagtgaacttcttatgggaggctgcagctggatcagaggaaaaatccagtgtgacagagtgcaagtcagaagacctggcttttcatcccagctttgaaacttggaactttttgattgacaaattaataaacctctctatgcctcaggctcctcatctgt

SEQ ID NO: 181835 - DNA, 751 bp, Homo sapiens
  Payload ID: 15808
  Gene Symbol: SMUG1
  Gene Name: single-strand-selective monofunctional uracil-DNA glycosylase 1
  ENST ID: ENST00000504338
  CDS Start-End: 235-751
gggtggttagaatttctatattttggggtccctccctccgtatggggctggagtgcaatggcgcgatctcagctcactgcagcctccgcctcccgggttcaagcgattcttctgcctcagcctcccgacagattatgagcttacagaaagcctggcctacattttactctttttggatttcttcctcatcaagagactgctgcagtgcctgtcatgtgacagcggcatggacatatgccccaggctttcctgctggggtccatccatgagcctgcaggtgccctcatggagccccagccctgccctggaagcttggctgagagcttcctggaggaggagcttcggctcaatgctgagctgagccagctgcagttttcggagcctgtgggcatcatctacaatcccgtggagtatgcatgggagccacatcgcaactacgtgactcgctactgccagggccccaaggaagtactcttcctgggcatgaaccctggaccttttggcatggcccagactggggtgccctttggggaagtaagcatggtccgggactggttgggcattgtggggcctgtgctgacccctccccaagagcatcctaaacgaccagtgctgggactggagtgcccacagtcagaagtgagtggtgcccgattctggggctttttccggaacctctgtggacagcctgaggtcttcttccatcactgttttgtccacaatctatgccctctgcttttcctggctccca

SEQ ID NO: 181836 - DNA, 465 bp, Homo sapiens
  Payload ID: 15808
  Gene Symbol: SMUG1
  Gene Name: single-strand-selective monofunctional uracil-DNA glycosylase 1
  ENST ID: ENST00000507904
  CDS Start-End: 142-465
gggggaaaggaaccggaaacgggatggggagctggaccaggctggagtgcaatggcgcgatctcagctcactgcagcctccgcctcccgggttcaagcgattcttctgcctcagcctcccgagtgacagcggcatggacatatgccccaggctttcctgctggggtccatccatgagcctgcaggtgccctcatggagccccagccctgccctggaagcttggctgagagcttcctggaggaggagcttcggctcaatgctgagctgagccagctgcagttttcggagcctgtgggcatcatctacaatcccgtggagtatgcatgggagccacatcgcaactacgtgactcgctactgccagggccccaaggaagtactcttcctgggcatgaaccctggaccttttggcatggcccagactggggtgccctttggggaagtaagcatggtccgggactggttg

SEQ ID NO: 181837 - DNA, 2119 bp, Homo sapiens
  Payload ID: 15808
  Gene Symbol: SMUG1
  Gene Name: single-strand-selective monofunctional uracil-DNA glycosylase 1
  Uniprot ID: Q53HV7
  ENST ID: ENST00000513838
  CDS Start-End: 425-958
ggaccaggtgaggaagtagggggctgggaatccgggactgtgggggcaagttgacggctcccagggtcgtcggggctgagccgagagggtggttagaatttctatattttggggtccctccctccgtatggggtaagactcagtgcagggagagcccagcctatgaaaccgcctgggaggtctgcaggatcaaggctttccagtcggccggagccagcgggcgcccccggaggctggagtgcaatggcgcgatctcagctcactgcagcctccgcctcccgggttcaagcgattcttctgcctcagcctcccgagtagcagattatgagcttacagaaagcctggcctacattttactctttttggatttcttcctcatcaagagactgctgcagtgcctgtcatgtgacagcggcatggacatatgccccaggctttcctgctggggtccatccatgagcctgcaggtgccctcatggagccccagccctgccctggaagcttggctgagagcttcctggaggaggagcttcggctcaatgctgagctgagccagctgcagttttcggagcctgtgggcatcatctacaatcccgtggagtatgcatgggagccacatcgcaactacgtgactcgctactgccagggccccaaggaagtactcttcctgggcatgaaccctggaccttttggcatggcccagactggggtgccctttggggaagtaagcatggtccgggactggttgggcattgtggggcctgtgctgacccctccccaagagcatcctaaacgaccagtgctgggactggagtgcccacagtcagaaggaccaagacaaagcatgggacatgaaattaagagtgaacttcttatgggaggctgcagctggatcagaggaaaaatccagtgtgacagagtgcaagtcagaagacctggcttttcatcccagctttgaaacttggaactttttgattgacaaattaataaacctctctatgcctcaggctcctcatctgtaaaacagggatgcctaccttatggggttggtgtgaggattaactgagatcacacttgaaagtgccttgcatgggcttggcatgtgggtgctcattacatagtcttcttgttttcttgcctctgggttgaggattcacagcactgcactacaagggtagcccctctccattctggataccttgctaggagagagtctgggcttccacctgcggccagggtgaagggaaaattcttgccatgtcagagatggatcaatgactatgaaaaaactagcctgtgattttttttcactctaagcattaagagctcctaaagccttttgtcttgttacttttttccccctcttgcatgctagaggtggaaggtagtcatttagatttcccccctcttccctcttcattgttggccaggggttctcttgggcagctgggggaaggatgtagtagatctctcttttttttttttttttgagatggagtctcatgctgttgcccaggctggagtgcagtggcatggtctcagttcactgcaacatctgctttcccggttcaagtgattctcctgcctcagcctcctgtatagctggaattacaggcatgtgccaccacgcctggctaatttttgtatttttattaaagacagtgtttcaccatgttggccaggctggtctcaaactcctgacttcaagtaatccacctgtcttggcctcccaaagtgctgctgcctggctggatgtagcagatctccaattgccttaccaaacctgcagggtctctgttaagtgtctgttaggggtcttatatgatactctggacaccgtgagaaacaggtgatggggcagatgggaacctggtatccaactcattttttatgtctgctgaatggttgactgggtgcccctttggtaagggctgggaaagtgaaccaagttgggagcagagcaggtcttgagaccaccttaatgaggaacacatggtctacttcctatctcctgggacacaggtcatttccagcttccagaattagtaagatttttcatataaatcctcccctacttcattgtataataaagaatttggcctttgtcttcagttcctga

SEQ ID NO: 181838 - DNA, 1697 bp, Homo sapiens
  Payload ID: 15808
  Gene Symbol: SMUG1
  Gene Name: single-strand-selective monofunctional uracil-DNA glycosylase 1
  Uniprot ID: Q53HV7
  ENST ID: ENST00000508394
  CDS Start-End: 64-876
gggtgggggaaaggaaccggaaacgggatggggagctggaccaggtgacagcggcatggacatatgccccaggctttcctgctggggtccatccatgagcctgcaggtgccctcatggagccccagccctgccctggaagcttggctgagagcttcctggaggaggagcttcggctcaatgctgagctgagccagctgcagttttcggagcctgtgggcatcatctacaatcccgtggagtatgcatgggagccacatcgcaactacgtgactcgctactgccagggccccaaggaagtactcttcctgggcatgaaccctggaccttttggcatggcccagactggggtgccctttggggaagtaagcatggtccgggactggttgggcattgtggggcctgtgctgacccctccccaagagcatcctaaacgaccagtgctgggactggagtgcccacagtcagaagtgagtggtgcccgattctggggctttttccggaacctctgtggacagcctgaggtcttcttccatcactgttttgtccacaatctatgccctctgcttttcctggctcccagcgggcgcaaccttactcctgctgagctgcctgccaagcagcgagaacagcttcttgggatctgtgatgcagccctctgccggcaggtgcagctgctgggggtgcggctggtggtgggagttgggcgactggcagagcagcgggcacgacgggctctggcaggcctgatgccagaggtccaggtggaagggctcctgcatccctctccccgtaacccacaggccaacaagggctgggaggcagtggccaaggaaagattgaatgagctggggctgctgccactgctgttgaaatgagtgcccttggggccttgcatgggacacattcaagacctcgaagtcattcttggccaagcagatgacaacacatctcctggactggagcaaaaggtccttctgtgcaccctggtcgctgggaaacgtattctttgatctgttgaactgtcttccaacctgccatggcagttttgacactactcctgtttgccctcctgattcctgctttctttaccttttaacattgcccctttcaggggaccccactttgtagggaatctgcagaaggtgtgcttttgcacttgcagactgctctacctcagtgtttccttgggagactttattcagctgagagtgccctagacagtaacttctaaggtcacgtttactatttcagaggaaatatcttgccaggatacctacccatccttatagaacagttacctttagctgacccctttcctcacagggaccaagacaaagcatgggacatgaaattaagagtgaacttcttatgggaggctgcagctggatcagaggaaaaatccagtgtgacagagtgcaagtcagaagacctggcttttcatcccagctttgaaacttggaactttttgattgacaaattaataaacctctctatgcctcaggctcctcatctgtaaaacagggatgcctaccttatggggttggtgtgaggattaactgagatcacacttgaaagtgccttgcatgggcttggcatgtgggtgctcattacatagtcttcttgttttcttgcctctgggttgaggattcacagcactgcactacaagggtagcccctctccattctggataccttg

SEQ ID NO: 181839 - DNA, 541 bp, Homo sapiens
  Payload ID: 15808
  Gene Symbol: SMUG1
  Gene Name: single-strand-selective monofunctional uracil-DNA glycosylase 1
  ENST ID: ENST00000503306
  CDS Start-End: 296-541
aaacgggatggggagctggaccagcagattatgagcttacagaaagcctggcctacattttactctttttggatttcttcctcatcaagagactgctgcagtgcctgtcatatggggtctcattatgtcagccaggctggtcttgaactcctggcctcaagcaattcttctgccttggcctctcaaagtgctgggattacaggcatgagccactgtgcccagcacagaaggtagttttaaacaaaagtgaaaaagaagatggacattgctgagcaggtgacagcggcatggacatatgccccaggctttcctgctggggtccatccatgagcctgcaggtgccctcatggagccccagccctgccctggaagcttggctgagagcttcctggaggaggagcttcggctcaatgctgagctgagccagctgcagttttcggagcctgtgggcatcatctacaatcccgtggagtatgcatgggagccacatcgcaactacgtgactcgctactgccagggccccaaggaagtactcttcctg

SEQ ID NO: 181840 - DNA, 553 bp, Homo sapiens
  Payload ID: 15808
  Gene Symbol: SMUG1
  Gene Name: single-strand-selective monofunctional uracil-DNA glycosylase 1
  ENST ID: ENST00000514196
  CDS Start-End: 50-529
aaccggaaacgggatggggagctggaccaggtgacagcggcatggacatatgccccaggctttcctgctggggtccatccatgagcctgcaggtgccctcatggagccccagccctgccctggaagcttggctgagagcttcctggaggaggagcttcggctcaatgctgagctgagccagctgcagttttcggagcctgtgggcatcatctacaatcccgtggagtatgcatgggagccacatcgcaactacgtgactcgctactgccagggccccaaggaagtactcttcctgggcatgaaccctggaccttttggcatggcccagactggggtgccctttggggaagtaagcatggtccgggactggttgggcattgtggggcctgtgctgacccctccccaagagcatcctaaacgaccagtgctgggactggagtgcccacagtcagaagccaacaagggctgggaggcagtggccaaggaaagattgaatgagctggggctgctgccactgctgttgaaatgagtgcccttggggccttgcatggga

SEQ ID NO: 181841 - DNA, 621 bp, Homo sapiens
  Payload ID: 15808
  Gene Symbol: SMUG1
  Gene Name: single-strand-selective monofunctional uracil-DNA glycosylase 1
  ENST ID: ENST00000509864
  CDS Start-End: 1-431
aggctttcctgctggggtccatccatgagcctgcaggtgccctcatggagccccagccctgccctggaagcttggctgagagcttcctggaggaggagcttcggctcaatgctgagctgagccagctgcagttttcggagcctgtgggcatcatctacaatcccgtggagtatgcatgggagccacatcgcaactacgtgactcgctactgccagggccccaaggaagtactcttcctgggcatgaaccctggaccttttggcatggcccagactggggtgccctttggggaagtaagcatggtccgggactggttgggcattgtggggcctgtgctgacccctccccaagagcatcctaaacgaccagtgctgggactggagtgcccacagtcagaaaaaattcttgctgctgtattgagaacagattgagaaaacaagggcagaagcagggagaccagtcaggagctgattgcagtatcaggctggtctggaactcctgggctgaagctatcctcttgccttggcctccctaaatgttggaattacagacatgggccactacacctggcgatctgtgtcttatacgccactgtcctgtcttcatgcggatgaaggggga

SEQ ID NO: 181842 - DNA, 572 bp, Homo sapiens
  Payload ID: 15808
  Gene Symbol: SMUG1
  Gene Name: single-strand-selective monofunctional uracil-DNA glycosylase 1
  ENST ID: ENST00000506169
  CDS Start-End: 302-572
aaaggaaccggaaacgggatggggagctggaccaggctggagtgcaatggcgcgatctcagctcactgcagcctccgcctcccgggttcaagcgattcttctgcctcagcctcccgaatggggtctcattatgtcagccaggctggtcttgaactcctggcctcaagcaattcttctgccttggcctctcaaagtgctgggattacaggcatgagccactgtgcccagcacagaaggtagttttaaacaaaagtgaaaaagaagatggacattgctgagcaggtgacagcggcatggacatatgccccaggctttcctgctggggtccatccatgagcctgcaggtgccctcatggagccccagccctgccctggaagcttggctgagagcttcctggaggaggagcttcggctcaatgctgagctgagccagctgcagttttcggagcctgtgggcatcatctacaatcccgtggagtatgcatgggagccacatcgcaactacgtgactcgctactgccagggccccaaggaagtactcttcctgggcatgaaccctggaccttttggca

SEQ ID NO: 181843 - DNA, 1115 bp, Homo sapiens
  Payload ID: 15808
  Gene Symbol: SMUG1
  Gene Name: single-strand-selective monofunctional uracil-DNA glycosylase 1
  ENST ID: ENST00000635546
  CDS Start-End: 165-650
gggggttgggtttggggtgggggaaaggaaccggaaacgggatggggagctggaccagcagattatgagcttacagaaagcctggcctacattttactctttttggatttcttcctcatcaagagactgctgcagtgcctgtcatgtgacagcggcatggacatatgccccaggctttcctgctggggtccatccatgagcctgcaggtgccctcatggagccccagccctgccctggaagcttggctgagagcttcctggaggaggagcttcggctcaatgctgagctgagccagctgcagttttcggagcctgtgggcatcatctacaatcccgtggagtatgcatgggagccacatcgcaactacgtgactcgctactgccagggccccaaggaagtactcttcctgggcatgaaccctggaccttttggcatggcccagactggggtgccctttggggaagtaagcatggtccgggactggttgggcattgtggggcctgtgctgacccctccccaagagcatcctaaacgaccagtgctgggactggagtgcccacagtcagaagaggatatagggcagctgtttcctcttcttccctggtgccccagagaagtaaagaacttcaactggagcatgagacattgaggttagacacatggataaacttcccagctgtgaccatcaggcgccccaacatatggagctgcagtttagcagatgctacgtggcatacagatttccggaaaattcttgctgctgtattgagaacagattgagaaaacaagggcagaagcagggagaccagtcaggagctgattgcagtatcaggctggtctggaactcctgggctgaagctatcctcttgccttggcctccctaaatgttggaattacagacatgggccactacacctggcgatctgtgtcttatacgctgggcagatgtgcctgagacaggtttgaccaggcaactgaaaagacatccctaagggaagacaaagcaaaggtatgaaaggaacacacgtccctgactgactaggaggaacagagctgcctgctgtctggaaccgcttcctcccagactaagtgagaaataaacttctgttttcta

SEQ ID NO: 181844 - DNA, 4094 bp, Homo sapiens
  Payload ID: 15809
  Gene Symbol: SIRT1
  Gene Name: sirtuin 1
  Uniprot ID: Q96EB6
  ENST ID: ENST00000212015
  CDS Start-End: 54-2297
gtcgagcgggagcagaggaggcgagggaggagggccagagaggcagttggaagatggcggacgaggcggccctcgcccttcagcccggcggctccccctcggcggcgggggccgacagggaggccgcgtcgtcccccgccggggagccgctccgcaagaggccgcggagagatggtcccggcctcgagcggagcccgggcgagcccggtggggcggccccagagcgtgaggtgccggcggcggccaggggctgcccgggtgcggcggcggcggcgctgtggcgggaggcggaggcagaggcggcggcggcaggcggggagcaagaggcccaggcgactgcggcggctggggaaggagacaatgggccgggcctgcagggcccatctcgggagccaccgctggccgacaacttgtacgacgaagacgacgacgacgagggcgaggaggaggaagaggcggcggcggcggcgattgggtaccgagataaccttctgttcggtgatgaaattatcactaatggttttcattcctgtgaaagtgatgaggaggatagagcctcacatgcaagctctagtgactggactccaaggccacggataggtccatatacttttgttcagcaacatcttatgattggcacagatcctcgaacaattcttaaagatttattgccggaaacaatacctccacctgagttggatgatatgacactgtggcagattgttattaatatcctttcagaaccaccaaaaaggaaaaaaagaaaagatattaatacaattgaagatgctgtgaaattactgcaagagtgcaaaaaaattatagttctaactggagctggggtgtctgtttcatgtggaatacctgacttcaggtcaagggatggtatttatgctcgccttgctgtagacttcccagatcttccagatcctcaagcgatgtttgatattgaatatttcagaaaagatccaagaccattcttcaagtttgcaaaggaaatatatcctggacaattccagccatctctctgtcacaaattcatagccttgtcagataaggaaggaaaactacttcgcaactatacccagaacatagacacgctggaacaggttgcgggaatccaaaggataattcagtgtcatggttcctttgcaacagcatcttgcctgatttgtaaatacaaagttgactgtgaagctgtacgaggagatatttttaatcaggtagttcctcgatgtcctaggtgcccagctgatgaaccgcttgctatcatgaaaccagagattgtgttttttggtgaaaatttaccagaacagtttcatagagccatgaagtatgacaaagatgaagttgacctcctcattgttattgggtcttccctcaaagtaagaccagtagcactaattccaagttccataccccatgaagtgcctcagatattaattaatagagaacctttgcctcatctgcattttgatgtagagcttcttggagactgtgatgtcataattaatgaattgtgtcataggttaggtggtgaatatgccaaactttgctgtaaccctgtaaagctttcagaaattactgaaaaacctccacgaacacaaaaagaattggcttatttgtcagagttgccacccacacctcttcatgtttcagaagactcaagttcaccagaaagaacttcaccaccagattcttcagtgattgtcacacttttagaccaagcagctaagagtaatgatgatttagatgtgtctgaatcaaaaggttgtatggaagaaaaaccacaggaagtacaaacttctaggaatgttgaaagtattgctgaacagatggaaaatccggatttgaagaatgttggttctagtactggggagaaaaatgaaagaacttcagtggctggaacagtgagaaaatgctggcctaatagagtggcaaaggagcagattagtaggcggcttgatggtaatcagtatctgtttttgccaccaaatcgttacattttccatggcgctgaggtatattcagactctgaagatgacgtcttatcctctagttcttgtggcagtaacagtgatagtgggacatgccagagtccaagtttagaagaacccatggaggatgaaagtgaaattgaagaattctacaatggcttagaagatgagcctgatgttccagagagagctggaggagctggatttgggactgatggagatgatcaagaggcaattaatgaagctatatctgtgaaacaggaagtaacagacatgaactatccatcaaacaaatcatagtgtaataattgtgcaggtacaggaattgttccaccagcattaggaactttagcatgtcaaaatgaatgtttacttgtgaactcgatagagcaaggaaaccagaaaggtgtaatatttataggttggtaaaatagattgtttttcatggataatttttaacttcattatttctgtacttgtacaaactcaacactaacttttttttttttaaaaaaaaaaaggtactaagtatcttcaatcagctgttggtcaagactaactttcttttaaaggttcatttgtatgataaattcatatgtgtatatataattttttttgttttgtctagtgagtttcaacatttttaaagttttcaaaaagccatcggaatgttaaattaatgtaaagggaacagctaatctagaccaaagaatggtattttcacttttctttgtaacattgaatggtttgaagtactcaaaatctgttacgctaaacttttgattctttaacacaattatttttaaacactggcattttccaaaactgtggcagctaactttttaaaatctcaaatgacatgcagtgtgagtagaaggaagtcaacaatatgtggggagagcactcggttgtctttacttttaaaagtaatacttggtgctaagaatttcaggattattgtatttacgttcaaatgaagatggcttttgtacttcctgtggacatgtagcaatgtctatattggctcataaaactaacctgaaaaacaaataaatgctttggaaatgtttcagttgctttagaaacattagtgcctgcctggatccccttagttttgaaatatttgccattgttgtttaaatacctatcactgtggtagagcttgcattgatcttttccacaagtattaaactgccaaaatgtgaatatgcaaagcctttctgaatctataataatggtacttctactggggagagtgtaatattttggactgctgttttccattaatgaggagagcaacaggcccctgattatacagttccaaagtaataagatgttaattgtaattcagccagaaagtacatgtctcccattgggaggatttggtgttaaataccaaactgctagccctagtattatggagatgaacatgatgatgtaacttgtaatagcagaatagttaatgaatgaaactagttcttataatttatctttatttaaaagcttagcctgccttaaaactagagatcaactttctcagctgcaaaagcttctagtctttcaagaagttcatactttatgaaattgcacagtaagcatttatttttcagaccatttttgaacatcactcctaaattaataaagtattcctctgttgctttagtatttattacaataaaaagggtttgaaatatagctgttctttatgcataaaacacccagctaggaccattactgccagagaaaaaaatcgtattgaatggccatttccctacttataagatgtctcaatctgaatttatttggctacactaaagaatgcagtatatttagttttccatttgcatgatgtttgtgtgctatagatgatattttaaattgaaaagtttgttttaaattatttttacagtgaagactgttttcagctctttttatattgtacatagtcttttatgtaatttactggcatatgttttgtagactgtttaatgactggatatcttccttcaacttttgaaatacaaaaccagtgttttttacttgtacactgttttaaagtctattaaaattgtcatttgacttttttctgttaactta

SEQ ID NO: 181845 - DNA, 3333 bp, Homo sapiens
  Payload ID: 15809
  Gene Symbol: SIRT1
  Gene Name: sirtuin 1
  ENST ID: ENST00000403579
  CDS Start-End: 206-1540
cacttactaaatggaatttaataaaaacactgtcaaaagttgggaggaccaaaattgatactttttctctgatctttttgccatgtgtatatctgaattctttgtttttaaagaagaaacagcattgaagcattatttggggggaaaaacacacacacaaaatccagcaactcagcattcatgagcaactctatactataccagtatgtgcctgtgcagtggaaggaaaacaattttggaaatatatcctggacaattccagccatctctctgtcacaaattcatagccttgtcagataaggaaggaaaactacttcgcaactatacccagaacatagacacgctggaacaggttgcgggaatccaaaggataattcagtgtcatggttcctttgcaacagcatcttgcctgatttgtaaatacaaagttgactgtgaagctgtacgaggagatatttttaatcaggtagttcctcgatgtcctaggtgcccagctgatgaaccgcttgctatcatgaaaccagagattgtgttttttggtgaaaatttaccagaacagtttcatagagccatgaagtatgacaaagatgaagttgacctcctcattgttattgggtcttccctcaaagtaagaccagtagcactaattccaagttccataccccatgaagtgcctcagatattaattaatagagaacctttgcctcatctgcattttgatgtagagcttcttggagactgtgatgtcataattaatgaattgtgtcataggttaggtggtgaatatgccaaactttgctgtaaccctgtaaagctttcagaaattactgaaaaacctccacgaacacaaaaagaattggcttatttgtcagagttgccacccacacctcttcatgtttcagaagactcaagttcaccagaaagaacttcaccaccagattcttcagtgattgtcacacttttagaccaagcagctaagagtaatgatgatttagatgtgtctgaatcaaaaggttgtatggaagaaaaaccacaggaagtacaaacttctaggaatgttgaaagtattgctgaacagatggaaaatccggatttgaagaatgttggttctagtactggggagaaaaatgaaagaacttcagtggctggaacagtgagaaaatgctggcctaatagagtggcaaaggagcagattagtaggcggcttgatggtaatcagtatctgtttttgccaccaaatcgttacattttccatggcgctgaggtatattcagactctgaagatgacgtcttatcctctagttcttgtggcagtaacagtgatagtgggacatgccagagtccaagtttagaagaacccatggaggatgaaagtgaaattgaagaattctacaatggcttagaagatgagcctgatgttccagagagagctggaggagctggatttgggactgatggagatgatcaagaggcaattaatgaagctatatctgtgaaacaggaagtaacagacatgaactatccatcaaacaaatcatagtgtaataattgtgcaggtacaggaattgttccaccagcattaggaactttagcatgtcaaaatgaatgtttacttgtgaactcgatagagcaaggaaaccagaaaggtgtaatatttataggttggtaaaatagattgtttttcatggataatttttaacttcattatttctgtacttgtacaaactcaacactaacttttttttttttaaaaaaaaaaaggtactaagtatcttcaatcagctgttggtcaagactaactttcttttaaaggttcatttgtatgataaattcatatgtgtatatataattttttttgttttgtctagtgagtttcaacatttttaaagttttcaaaaagccatcggaatgttaaattaatgtaaagggaacagctaatctagaccaaagaatggtattttcacttttctttgtaacattgaatggtttgaagtactcaaaatctgttacgctaaacttttgattctttaacacaattatttttaaacactggcattttccaaaactgtggcagctaactttttaaaatctcaaatgacatgcagtgtgagtagaaggaagtcaacaatatgtggggagagcactcggttgtctttacttttaaaagtaatacttggtgctaagaatttcaggattattgtatttacgttcaaatgaagatggcttttgtacttcctgtggacatgtagcaatgtctatattggctcataaaactaacctgaaaaacaaataaatgctttggaaatgtttcagttgctttagaaacattagtgcctgcctggatccccttagttttgaaatatttgccattgttgtttaaatacctatcactgtggtagagcttgcattgatcttttccacaagtattaaactgccaaaatgtgaatatgcaaagcctttctgaatctataataatggtacttctactggggagagtgtaatattttggactgctgttttccattaatgaggagagcaacaggcccctgattatacagttccaaagtaataagatgttaattgtaattcagccagaaagtacatgtctcccattgggaggatttggtgttaaataccaaactgctagccctagtattatggagatgaacatgatgatgtaacttgtaatagcagaatagttaatgaatgaaactagttcttataatttatctttatttaaaagcttagcctgccttaaaactagagatcaactttctcagctgcaaaagcttctagtctttcaagaagttcatactttatgaaattgcacagtaagcatttatttttcagaccatttttgaacatcactcctaaattaataaagtattcctctgttgctttagtatttattacaataaaaagggtttgaaatatagctgttctttatgcataaaacacccagctaggaccattactgccagagaaaaaaatcgtattgaatggccatttccctacttataagatgtctcaatctgaatttatttggctacactaaagaatgcagtatatttagttttccatttgcatgatgtttgtgtgctatagatgatattttaaattgaaaagtttgttttaaattatttttacagtgaagactgttttcagctctttttatattgtacatagtcttttatgtaatttactggcatatgttttgtagactgtttaatgactggatatcttccttcaacttttgaaatacaaaaccagtgttttttacttgtacactgttttaaagtctattaaaattgtcatttgacttttttctgttaa

SEQ ID NO: 181846 - DNA, 3295 bp, Homo sapiens
  Payload ID: 15809
  Gene Symbol: SIRT1
  Gene Name: sirtuin 1
  ENST ID: ENST00000406900
  CDS Start-End: 164-1498
cagatcctcaagcgatgtttgatattgaatatttcagaaaagatccaagaccattcttcaagtttgcaaagaagaaacagcattgaagcattatttggggggaaaaacacacacacaaaatccagcaactcagcattcatgagcaactctatactataccagtatgtgcctgtgcagtggaaggaaaacaattttggaaatatatcctggacaattccagccatctctctgtcacaaattcatagccttgtcagataaggaaggaaaactacttcgcaactatacccagaacatagacacgctggaacaggttgcgggaatccaaaggataattcagtgtcatggttcctttgcaacagcatcttgcctgatttgtaaatacaaagttgactgtgaagctgtacgaggagatatttttaatcaggtagttcctcgatgtcctaggtgcccagctgatgaaccgcttgctatcatgaaaccagagattgtgttttttggtgaaaatttaccagaacagtttcatagagccatgaagtatgacaaagatgaagttgacctcctcattgttattgggtcttccctcaaagtaagaccagtagcactaattccaagttccataccccatgaagtgcctcagatattaattaatagagaacctttgcctcatctgcattttgatgtagagcttcttggagactgtgatgtcataattaatgaattgtgtcataggttaggtggtgaatatgccaaactttgctgtaaccctgtaaagctttcagaaattactgaaaaacctccacgaacacaaaaagaattggcttatttgtcagagttgccacccacacctcttcatgtttcagaagactcaagttcaccagaaagaacttcaccaccagattcttcagtgattgtcacacttttagaccaagcagctaagagtaatgatgatttagatgtgtctgaatcaaaaggttgtatggaagaaaaaccacaggaagtacaaacttctaggaatgttgaaagtattgctgaacagatggaaaatccggatttgaagaatgttggttctagtactggggagaaaaatgaaagaacttcagtggctggaacagtgagaaaatgctggcctaatagagtggcaaaggagcagattagtaggcggcttgatggtaatcagtatctgtttttgccaccaaatcgttacattttccatggcgctgaggtatattcagactctgaagatgacgtcttatcctctagttcttgtggcagtaacagtgatagtgggacatgccagagtccaagtttagaagaacccatggaggatgaaagtgaaattgaagaattctacaatggcttagaagatgagcctgatgttccagagagagctggaggagctggatttgggactgatggagatgatcaagaggcaattaatgaagctatatctgtgaaacaggaagtaacagacatgaactatccatcaaacaaatcatagtgtaataattgtgcaggtacaggaattgttccaccagcattaggaactttagcatgtcaaaatgaatgtttacttgtgaactcgatagagcaaggaaaccagaaaggtgtaatatttataggttggtaaaatagattgtttttcatggataatttttaacttcattatttctgtacttgtacaaactcaacactaacttttttttttttaaaaaaaaaaaggtactaagtatcttcaatcagctgttggtcaagactaactttcttttaaaggttcatttgtatgataaattcatatgtgtatatataattttttttgttttgtctagtgagtttcaacatttttaaagttttcaaaaagccatcggaatgttaaattaatgtaaagggaacagctaatctagaccaaagaatggtattttcacttttctttgtaacattgaatggtttgaagtactcaaaatctgttacgctaaacttttgattctttaacacaattatttttaaacactggcattttccaaaactgtggcagctaactttttaaaatctcaaatgacatgcagtgtgagtagaaggaagtcaacaatatgtggggagagcactcggttgtctttacttttaaaagtaatacttggtgctaagaatttcaggattattgtatttacgttcaaatgaagatggcttttgtacttcctgtggacatgtagcaatgtctatattggctcataaaactaacctgaaaaacaaataaatgctttggaaatgtttcagttgctttagaaacattagtgcctgcctggatccccttagttttgaaatatttgccattgttgtttaaatacctatcactgtggtagagcttgcattgatcttttccacaagtattaaactgccaaaatgtgaatatgcaaagcctttctgaatctataataatggtacttctactggggagagtgtaatattttggactgctgttttccattaatgaggagagcaacaggcccctgattatacagttccaaagtaataagatgttaattgtaattcagccagaaagtacatgtctcccattgggaggatttggtgttaaataccaaactgctagccctagtattatggagatgaacatgatgatgtaacttgtaatagcagaatagttaatgaatgaaactagttcttataatttatctttatttaaaagcttagcctgccttaaaactagagatcaactttctcagctgcaaaagcttctagtctttcaagaagttcatactttatgaaattgcacagtaagcatttatttttcagaccatttttgaacatcactcctaaattaataaagtattcctctgttgctttagtatttattacaataaaaagggtttgaaatatagctgttctttatgcataaaacacccagctaggaccattactgccagagaaaaaaatcgtattgaatggccatttccctacttataagatgtctcaatctgaatttatttggctacactaaagaatgcagtatatttagttttccatttgcatgatgtttgtgtgctatagatgatattttaaattgaaaagtttgttttaaattatttttacagtgaagactgttttcagctctttttatattgtacatagtcttttatgtaatttactggcatatgttttgtagactgtttaatgactggatatcttccttcaacttttgaaatacaaaaccagtgttttttacttgtacactgttttaaagtctattaaaattgtcatttgacttttttctgttaactta

SEQ ID NO: 181847 - DNA, 3587 bp, Homo sapiens
  Payload ID: 15809
  Gene Symbol: SIRT1
  Gene Name: sirtuin 1
  ENST ID: ENST00000432464
  CDS Start-End: 433-1791
gcatctcctcctccctctccccgggctcctactggcctgaggttgagggcggctgggggctcggggcaggctccgcggcgttcccctccccaccccggccctccgttcagccgcgctcctccggggctgcggttcctactgcgcgagctgccagtggattcgctcttttcctccgtccgtggcccgcctgggcggccttgttctttccgcagcagccagataaccttctgttcggtgatgaaattatcactaatggttttcattcctgtgaaagtgatgaggaggatagagcctcacatgcaagctctagtgactggactccaaggccacggataggtgtctgtttcatgtggaatacctgacttcaggtcaagggatggtatttatgctcgccttgctgtagacttcccagatcttccagatcctcaagcgatgtttgatattgaatatttcagaaaagatccaagaccattcttcaagtttgcaaaggaaatatatcctggacaattccagccatctctctgtcacaaattcatagccttgtcagataaggaaggaaaactacttcgcaactatacccagaacatagacacgctggaacaggttgcgggaatccaaaggataattcagtgtcatggttcctttgcaacagcatcttgcctgatttgtaaatacaaagttgactgtgaagctgtacgaggagatatttttaatcaggtagttcctcgatgtcctaggtgcccagctgatgaaccgcttgctatcatgaaaccagagattgtgttttttggtgaaaatttaccagaacagtttcatagagccatgaagtatgacaaagatgaagttgacctcctcattgttattgggtcttccctcaaagtaagaccagtagcactaattccaagttccataccccatgaagtgcctcagatattaattaatagagaacctttgcctcatctgcattttgatgtagagcttcttggagactgtgatgtcataattaatgaattgtgtcataggttaggtggtgaatatgccaaactttgctgtaaccctgtaaagctttcagaaattactgaaaaacctccacgaacacaaaaagaattggcttatttgtcagagttgccacccacacctcttcatgtttcagaagactcaagttcaccagaaagaacttcaccaccagattcttcagtgattgtcacacttttagaccaagcagctaagagtaatgatgatttagatgtgtctgaatcaaaaggttgtatggaagaaaaaccacaggaagtacaaacttctaggaatgttgaaagtattgctgaacagatggaaaatccggatttgaagaatgttggttctagtactggggagaaaaatgaaagaacttcagtggctggaacagtgagaaaatgctggcctaatagagtggcaaaggagcagattagtaggcggcttgatggtaatcagtatctgtttttgccaccaaatcgttacattttccatggcgctgaggtatattcagactctgaagatgacgtcttatcctctagttcttgtggcagtaacagtgatagtgggacatgccagagtccaagtttagaagaacccatggaggatgaaagtgaaattgaagaattctacaatggcttagaagatgagcctgatgttccagagagagctggaggagctggatttgggactgatggagatgatcaagaggcaattaatgaagctatatctgtgaaacaggaagtaacagacatgaactatccatcaaacaaatcatagtgtaataattgtgcaggtacaggaattgttccaccagcattaggaactttagcatgtcaaaatgaatgtttacttgtgaactcgatagagcaaggaaaccagaaaggtgtaatatttataggttggtaaaatagattgtttttcatggataatttttaacttcattatttctgtacttgtacaaactcaacactaacttttttttttttaaaaaaaaaaaggtactaagtatcttcaatcagctgttggtcaagactaactttcttttaaaggttcatttgtatgataaattcatatgtgtatatataattttttttgttttgtctagtgagtttcaacatttttaaagttttcaaaaagccatcggaatgttaaattaatgtaaagggaacagctaatctagaccaaagaatggtattttcacttttctttgtaacattgaatggtttgaagtactcaaaatctgttacgctaaacttttgattctttaacacaattatttttaaacactggcattttccaaaactgtggcagctaactttttaaaatctcaaatgacatgcagtgtgagtagaaggaagtcaacaatatgtggggagagcactcggttgtctttacttttaaaagtaatacttggtgctaagaatttcaggattattgtatttacgttcaaatgaagatggcttttgtacttcctgtggacatgtagcaatgtctatattggctcataaaactaacctgaaaaacaaataaatgctttggaaatgtttcagttgctttagaaacattagtgcctgcctggatccccttagttttgaaatatttgccattgttgtttaaatacctatcactgtggtagagcttgcattgatcttttccacaagtattaaactgccaaaatgtgaatatgcaaagcctttctgaatctataataatggtacttctactggggagagtgtaatattttggactgctgttttccattaatgaggagagcaacaggcccctgattatacagttccaaagtaataagatgttaattgtaattcagccagaaagtacatgtctcccattgggaggatttggtgttaaataccaaactgctagccctagtattatggagatgaacatgatgatgtaacttgtaatagcagaatagttaatgaatgaaactagttcttataatttatctttatttaaaagcttagcctgccttaaaactagagatcaactttctcagctgcaaaagcttctagtctttcaagaagttcatactttatgaaattgcacagtaagcatttatttttcagaccatttttgaacatcactcctaaattaataaagtattcctctgttgctttagtatttattacaataaaaagggtttgaaatatagctgttctttatgcataaaacacccagctaggaccattactgccagagaaaaaaatcgtattgaatggccatttccctacttataagatgtctcaatctgaatttatttggctacactaaagaatgcagtatatttagttttccatttgcatgatgtttgtgtgctatagatgatattttaaattgaaaagtttgttttaaattatttttacagtgaagactgttttcagctctttttatattgtacatagtcttttatgtaatttactggcatatgttttgtagactgtttaatgactggatatcttccttcaacttttgaaatacaaaaccagtgttttttacttgtacactgttttaaagtctattaaaattgtcatttgacttttttctgttaactt

SEQ ID NO: 181848 - DNA, 2070 bp, Homo sapiens
  Payload ID: 15810
  Gene Symbol: SIRT2
  Gene Name: sirtuin 2
  Uniprot ID: Q8IXJ6
  ENST ID: ENST00000249396
  CDS Start-End: 303-1472
cattttccgggcgccctttaccaacatggctgctgacgccacgccttctgggactcgtagtccggtcctcgcgcgctttcttacctaactggggcgctctgggtgttgtacgaaagcgcgtctgcggccgcaatgtctgctgagagttgtagttctgtgccctatcacggccactcccatttctggtgccgtcacgggacagagcagtcggtgacaggacagagcagtcggtgacgggacacagtggttggtgacgggacagagcggtcggtgacagcctcaagggcttcagcaccgcgcccatggcagagccagacccctctcaccctctggagacccaggcagggaaggtgcaggaggctcaggactcagattcagactctgagggaggagccgctggtggagaagcagacatggacttcctgcggaacttattctcccagacgctcagcctgggcagccagaaggagcgtctgctggacgagctgaccttggaaggggtggcccggtacatgcagagcgaacgctgtcgcagagtcatctgtttggtgggagctggaatctccacatccgcaggcatccccgactttcgctctccatccaccggcctctatgacaacctagagaagtaccatcttccctacccagaggccatctttgagatcagctatttcaagaaacatccggaacccttcttcgccctcgccaaggaactctatcctgggcagttcaagccaaccatctgtcactacttcatgcgcctgctgaaggacaaggggctactcctgcgctgctacacgcagaacatagataccctggagcgaatagccgggctggaacaggaggacttggtggaggcgcacggcaccttctacacatcacactgcgtcagcgccagctgccggcacgaatacccgctaagctggatgaaagagaagatcttctctgaggtgacgcccaagtgtgaagactgtcagagcctggtgaagcctgatatcgtcttttttggtgagagcctcccagcgcgtttcttctcctgtatgcagtcagacttcctgaaggtggacctcctcctggtcatgggtacctccttgcaggtgcagccctttgcctccctcatcagcaaggcacccctctccacccctcgcctgctcatcaacaaggagaaagctggccagtcggaccctttcctggggatgattatgggcctcggaggaggcatggactttgactccaagaaggcctacagggacgtggcctggctgggtgaatgcgaccagggctgcctggcccttgctgagctccttggatggaagaaggagctggaggaccttgtccggagggagcacgccagcatagatgcccagtcgggggcgggggtccccaaccccagcacttcagcttcccccaagaagtccccgccacctgccaaggacgaggccaggacaacagagagggagaaaccccagtgacagctgcatctcccaggcgggatgccgagctcctcagggacagctgagccccaaccgggcctggccccctcttaaccagcagttcttgtctggggagctcagaacatcccccaatctcttacagctccctccccaaaactggggtcccagcaaccctggcccccaaccccagcaaatctctaacacctcctagaggccaaggcttaaacaggcatctctaccagccccactgtctctaaccactcctgggctaaggagtaacctccctcatctctaactgcccccacggggccagggctaccccagaacttttaactcttccaggacagggagcttcgggcccccactctgtctcctgcccccgggggcctgtggctaagtaaaccatacctaacctaccccagtgtgggtgtgggcctctgaatataacccacacccagcgtagggggagtctgagccgggagggctcccgagtctctgccttcagctcccaaagtgggtggtgggcccccttcacgtgggacccacttcccatgctggatgggcagaagacattgcttattggagacaaattaaaaacaaaaacaactaacaatcc

SEQ ID NO: 181849 - DNA, 1912 bp, Homo sapiens
  Payload ID: 15810
  Gene Symbol: SIRT2
  Gene Name: sirtuin 2
  ENST ID: ENST00000358931
  CDS Start-End: 406-1110
agagtattcgggaggactacaactctctagccgttcccacattttccgggcgccctttaccaacatggctgctgacgccacgccttctgggactcgtagtccggtcctcgcgcgctttcttacctaactggggcgctctgggtgttgtacgaaagcgcgtctgcggccgcaatgtctgctgagagttgtagttctgtgccctatcacggccactcccatttctggtgccgtcacgggacagagcagtcggtgacaggacagagcagtcggtgacgggacacagtggttggtgacgggacagagcggtcggtgacagcctcaagggcttcagcaccgcgcccatggcagagccagaccgactcagattcagactctgagggaggagccgctggtggagaagcagacatggacttcctgcggaacttattctcccagacgctcagcctgggcagccagaaggagcgtctgctggacgagctgaccttggaaggggtggcccggtacatgcagagcgaacgctgtcgcagagtcatctgtttggtgggagctggaatctccacatccgcaggcatccccgactttcgctctccatccaccggcctctatgacaacctagagaagtaccatcttccctacccagaggccatctttgagatcagctatttcaagaaacatccggaacccttcttcgccctcgccaaggaactctatcctgggcagttcaagccaaccatctgtcactacttcatgcgcctgctgaaggacaaggggctactcctgcgctgctacacgcagaacatagataccctggagcgaatagccgggctggaacaggaggacttggtggaggcgcacggcaccttctacacatcacactgcgtcagcgccagctgccggcacgaatacccgctaagctggatgaaagagaagatcttctctgaggtgacgcccaagtgtgaagactgtcagagcctggtgaagcctgatatcgtcttttttggtgagagcctcccagcgcgtttcttctcctgtatgcagtcagacttcctgaaggtggacctcctcctggtcatgggtacctccttgcagggacgtggcctggctgggtgaatgcgaccagggctgcctggcccttgctgagctccttggatggaagaaggagctggaggaccttgtccggagggagcacgccagcatagatgcccagtcgggggcgggggtccccaaccccagcacttcagcttcccccaagaagtccccgccacctgccaaggacgaggccaggacaacagagagggagaaaccccagtgacagctgcatctcccaggcgggatgccgagctcctcagggacagctgagccccaaccgggcctggccccctcttaaccagcagttcttgtctggggagctcagaacatcccccaatctcttacagctccctccccaaaactggggtcccagcaaccctggcccccaaccccagcaaatctctaacacctcctagaggccaaggcttaaacaggcatctctaccagccccactgtctctaaccactcctgggctaaggagtaacctccctcatctctaactgcccccacggggccagggctaccccagaacttttaactcttccaggacagggagcttcgggcccccactctgtctcctgcccccgggggcctgtggctaagtaaaccatacctaacctaccccagtgtgggtgtgggcctctgaatataacccacacccagcgtagggggagtctgagccgggagggctcccgagtctctgccttcagctcccaaagtgggtggtgggcccccttcacgtgggacccacttcccatgctggatgggcagaagacattgcttattggagacaaattaaaaacaaaaacaactaacaatccgg

SEQ ID NO: 181850 - DNA, 2062 bp, Homo sapiens
  Payload ID: 15810
  Gene Symbol: SIRT2
  Gene Name: sirtuin 2
  Uniprot ID: Q8IXJ6
  ENST ID: ENST00000392081
  CDS Start-End: 406-1464
agagtattcgggaggactacaactctctagccgttcccacattttccgggcgccctttaccaacatggctgctgacgccacgccttctgggactcgtagtccggtcctcgcgcgctttcttacctaactggggcgctctgggtgttgtacgaaagcgcgtctgcggccgcaatgtctgctgagagttgtagttctgtgccctatcacggccactcccatttctggtgccgtcacgggacagagcagtcggtgacaggacagagcagtcggtgacgggacacagtggttggtgacgggacagagcggtcggtgacagcctcaagggcttcagcaccgcgcccatggcagagccagaccgactcagattcagactctgagggaggagccgctggtggagaagcagacatggacttcctgcggaacttattctcccagacgctcagcctgggcagccagaaggagcgtctgctggacgagctgaccttggaaggggtggcccggtacatgcagagcgaacgctgtcgcagagtcatctgtttggtgggagctggaatctccacatccgcaggcatccccgactttcgctctccatccaccggcctctatgacaacctagagaagtaccatcttccctacccagaggccatctttgagatcagctatttcaagaaacatccggaacccttcttcgccctcgccaaggaactctatcctgggcagttcaagccaaccatctgtcactacttcatgcgcctgctgaaggacaaggggctactcctgcgctgctacacgcagaacatagataccctggagcgaatagccgggctggaacaggaggacttggtggaggcgcacggcaccttctacacatcacactgcgtcagcgccagctgccggcacgaatacccgctaagctggatgaaagagaagatcttctctgaggtgacgcccaagtgtgaagactgtcagagcctggtgaagcctgatatcgtcttttttggtgagagcctcccagcgcgtttcttctcctgtatgcagtcagacttcctgaaggtggacctcctcctggtcatgggtacctccttgcaggtgcagccctttgcctccctcatcagcaaggcacccctctccacccctcgcctgctcatcaacaaggagaaagctggccagtcggaccctttcctggggatgattatgggcctcggaggaggcatggactttgactccaagaaggcctacagggacgtggcctggctgggtgaatgcgaccagggctgcctggcccttgctgagctccttggatggaagaaggagctggaggaccttgtccggagggagcacgccagcatagatgcccagtcgggggcgggggtccccaaccccagcacttcagcttcccccaagaagtccccgccacctgccaaggacgaggccaggacaacagagagggagaaaccccagtgacagctgcatctcccaggcgggatgccgagctcctcagggacagctgagccccaaccgggcctggccccctcttaaccagcagttcttgtctggggagctcagaacatcccccaatctcttacagctccctccccaaaactggggtcccagcaaccctggcccccaaccccagcaaatctctaacacctcctagaggccaaggcttaaacaggcatctctaccagccccactgtctctaaccactcctgggctaaggagtaacctccctcatctctaactgcccccacggggccagggctaccccagaacttttaactcttccaggacagggagcttcgggcccccactctgtctcctgcccccgggggcctgtggctaagtaaaccatacctaacctaccccagtgtgggtgtgggcctctgaatataacccacacccagcgtagggggagtctgagccgggagggctcccgagtctctgccttcagctcccaaagtgggtggtgggcccccttcacgtgggacccacttcccatgctggatgggcagaagacattgcttattggagacaaattaaaaacaaaaacaactaacaatcc

SEQ ID NO: 181851 - DNA, 890 bp, Homo sapiens
  Payload ID: 15810
  Gene Symbol: SIRT2
  Gene Name: sirtuin 2
  ENST ID: ENST00000407552
  CDS Start-End: 383-890
acgaaagcgcgtctgcggccgcaatgtctgctgagagttgtagttctgtgccctatcacggccactcccatttctggtgccgtcacgggacagagcagtcggtgacaggacagagcagtcggtgacgggacacagtggttggtgacgggacagagcggtcggtgacagcctcaagggcttcagcaccgcgcccatggcagagccagaccgtaggaggaggaggatcgcttgagcccaggaatttgaggctgcagtgagctatgatcgcactattgcactccaacctgggtgacatgagcgagaccctttctctaaaaagtaaaaaagaaagaaagactcagattcagactctgagggaggagccgctggtggagaagcagacatggacttcctgcggaacttattctcccagacgctcagcctgggcagccagaaggagcgtctgctggacgagctgaccttggaaggggtggcccggtacatgcagagcgaacgctgtcgcagagtcatctgtttggtgggagctggaatctccacatccgcaggcatccccgactttcgctctccatccaccggcctctatgacaacctagagaagtaccatcttccctacccagaggccatctttgagatcagctatttcaagaaacatccggaacccttcttcgccctcgccaaggaactctatcctgggcagttcaagccaaccatctgtcactacttcatgcgcctgctgaaggacaaggggctactcctgcgctgctacacgcagaacatagataccctggagcgaatagccgggctggaacaggaggacttggtggaggcgcacggcaccttctacacatcacactgcgtcagcgccagctgccggcacgaatacccgctaa

SEQ ID NO: 181852 - DNA, 555 bp, Homo sapiens
  Payload ID: 15810
  Gene Symbol: SIRT2
  Gene Name: sirtuin 2
  ENST ID: ENST00000437828
  CDS Start-End: 320-555
atttctggtgccgtcacgggacagagcagtcggtgacaggacagagcagtcggtgacgggacacagtggttggtgacgggacagagcggtcggtgacagcctcaagggcttcagcaccgcgcccatggcagagccagacctctctccaccaccccgcacttcctcaggccaccttcctgccacagccttttccccaaacctggtatcaccccctctcctccctccctaatcccacctctcgggcctggccactccaccccaccccttccaggactcagattcagactctgagggaggagccgctggtggagaagcagacatggacttcctgcggaacttattctcccagacgctcagcctgggcagccagaaggagcgtctgctggacgagctgaccttggaaggggtggcccggtacatgcagagcgaacgctgtcgcagagtcatctgtttggtgggagctggaatctccacatccgcaggcatccccgactttcgctctccatccaccggcctctatgacaacctagagaagtaccatcttccctacccaga

SEQ ID NO: 181853 - DNA, 927 bp, Homo sapiens
  Payload ID: 15810
  Gene Symbol: SIRT2
  Gene Name: sirtuin 2
  ENST ID: ENST00000420440
  CDS Start-End: 222-557
gttgtagttctgtgccctatcacggccactcccatttctggtgccgtcacgggacagagcagtcggtgacaggacagagcagtcggtgacgggacacagtggttggtgacgggacagagcggtcggtgacagcctcaagggcttcagcaccgcgcccatggcagagccagaccgactcagattcagactctgagggaggagccgctggtggagaagcagacatggacttcctgcggaacttattctcccagacgctcagcctgggcagccagaaggagcgtctgctggacgagctgaccttggaaggggtggcccggtacatgcagagcgaacgctgtcgcagagtcatctgtttggtgggagctggaatctccacatccgcaggcatccccgactttcgctctccatccaccggcctctatgacaacctagagaagtaccatcttccctacccagaggccatctttgagatcagctatttcaagaaacatccggaacccttcttcgccctcgccaaggaactctatcctgggcagttcaagtttcctcatctgtgatctggggatagcagtggtctctccccgacgcggctgctgtgacggttccctggggccaaccatctgtcactacttcatgcgcctgctgaaggacaaggggctactcctgcgctgctacacgcagaacatagataccctggagcgaatagccgggctggaacaggaggacttggtggaggcgcacggcaccttctacacatcacactgcgtcagcgccagctgccggcacgaatacccgctaagctggatgaaagagaagatcttctctgaggtgacgcccaagtgtgaagactgtcagagcctggtgaagcctgatatcgtcttttttggtgagagcctcccagcgcgtttcttctcctgtatgcagtca

SEQ ID NO: 181854 - DNA, 848 bp, Homo sapiens
  Payload ID: 15810
  Gene Symbol: SIRT2
  Gene Name: sirtuin 2
  ENST ID: ENST00000381766
  CDS Start-End: 459-848
aaacaaacaaaaaatgagcctggcatggtggcacgtgcctgtggtcccagctacttgggaggctgaggtgggaggatcccttgagcttgggaggttgaggctgcagcaagctgtgactgcaccagtgcactccagcctgggcaacagagcgagacactgtctcaaaaaagaaaagcaaagcaaagccactcacatgaggtcttgctcctggggacgggcatggccaggactccaaccccggcagcctgtcccagagccctggagctagccccagtgcagtctctccaccaccccgcacttcctcaggccaccttcctgccacagccttttccccaaacctggtatcaccccctctcctccctccctaatcccacctctcgggcctggccactccaccccaccccttccaggactcagattcagactctgagggaggagccgctggtggagaagcagacatggacttcctgcggaacttattctcccagacgctcagcctgggcagccagaaggagcgtctgctggacgagctgaccttggaaggggtggcccggtacatgcagagcgaacgctgtcgcagagtcatctgtttggtgggagctggaatctccacatccgcaggcatccccgactttcgctctccatccaccggcctctatgacaacctagagaagtaccatcttccctacccagaggccatctttgagatcagctatttcaagaaacatccggaacccttcttcgccctcgccaaggaactctatcctgggcagttcaagccaaccatctgtcactacttcatgcgcctgctgaaggacaaggggctactcctgcgctgctacacgcag

SEQ ID NO: 181855 - DNA, 1251 bp, Homo sapiens
  Payload ID: 15810
  Gene Symbol: SIRT2
  Gene Name: sirtuin 2
  ENST ID: ENST00000414941
  CDS Start-End: 539-1251
cattttccgggcgccctttaccaacatggctgctgacgccacgccttctgggactcgtagtccggtcctcgcgcgctttcttacctaactggggcgctctgggtgttgtacgaaagcgcgtctgcggccgcaatgtctgctgagagttgtagttctgtgccctatcacggccactcccatttctggtgccgtcacgggacagagcagtcggtgacaggacagagcagtcggtgacgggacacagtggttggtgacgggacagagcggtcggtgacagcctcaagggcttcagcaccgcgcccatggcagagccagaccgtaggaggaggaggatcgcttgagcccaggaatttgaggctgcagtgagctatgatcgcactattgcactccaacctgggtgacatgagcgagaccctttctctaaaaagtaaaaaagaaagaaacctctcaccctctggagacccaggcagggaaggtgcaggaggctcaggactcagattcagactctgagggaggagccgctggtggagaagcagacatggacttcctgcggaacttattctcccagacgctcagcctgggcagccagaaggagcgtctgctggacgagctgaccttggaaggggtggcccggtacatgcagagcgaacgctgtcgcagagtcatctgtttggtgggagctggaatctccacatccgcaggcatccccgactttcgctctccatccaccggcctctatgacaacctagagaagtaccatcttccctacccagaggccatctttgagatcagctatttcaagaaacatccggaacccttcttcgccctcgccaaggaactctatcctgggcagttcaagccaaccatctgtcactacttcatgcgcctgctgaaggacaaggggctactcctgcgctgctacacgcagaacatagataccctggagcgaatagccgggctggaacaggaggacttggtggaggcgcacggcaccttctacacatcacactgcgtcagcgccagctgccggcacgaatacccgctaagctggatgaaagagaagatcttctctgaggtgacgcccaagtgtgaagactgtcagagcctggtgaagcctgatatcgtcttttttggtgagagcctcccagcgcgtttcttctcctgtatgcagtcagacttcctgaaggtggacctcctcctggtcatgggtacctccttgcaggtgcagccctttgcctccctcatcagcaa

SEQ ID NO: 181856 - DNA, 556 bp, Homo sapiens
  Payload ID: 15810
  Gene Symbol: SIRT2
  Gene Name: sirtuin 2
  ENST ID: ENST00000451193
  CDS Start-End: 146-265
gagcagtcggtgacgggacacagtggttggtgacgggacagagcggtcggtgacagcctcaagggcttcagcaccgcgcccatggcagagccagaccgactcagattcagactctgagggaggagccgctggtggagaagcagacatggacttcctgcggaacttattctcccagacgctcagcctgggcagccagaaggagcgtctgctggacgagctgaccttggaaggggtggcccggtacatgcagagcgaacgctgctagagtgcaatggcatgatctcggctcactgcaacctccgcctcccgggttcaagtgattctcctgcctcagcctcccaagtagctgagattacaggtcgcagagtcatctgtttggtgggagctggaatctccacatccgcaggcatccccgactttcgctctccatccaccggcctctatgacaacctagagaagtaccatcttccctacccagaggccatctttgagatcagctatttcaagaaacatccggaacccttcttcgccctcgccaaggaactctatcctgggc

SEQ ID NO: 181857 - DNA, 578 bp, Homo sapiens
  Payload ID: 15810
  Gene Symbol: SIRT2
  Gene Name: sirtuin 2
  ENST ID: ENST00000447739
  CDS Start-End: 359-578
aaagcgcgtctgcggccgcaatgtctgctgagagttgtagttctgtgccctatcacggccactcccatttctggtgccgtcacgggacagagcagtcggtgacaggacagagcagtcggtgacgggacacagtggttggtgacgggacagagcggtcggtgacagcctcaagggcttcagcaccgcgcccatggcagagccagaccgccaccttcctgccacagccttttccccaaacctggtatcaccccctctcctccctccctaatcccacctctcgggcctggccactccaccccaccccttccaggactcagattcagactctgagggaggagccgctggtggagaagcagacatggacttcctgcggaacttattctcccagacgctcagcctgggcagccagaaggagcgtctgctggacgagctgaccttggaaggggtggcccggtacatgcagagcgaacgctgtcgcagagtcatctgtttggtgggagctggaatctccacatccgcaggcatccccgactttcgctctccatccaccggcctctatgacaacctagagaagtacc

SEQ ID NO: 181858 - DNA, 556 bp, Homo sapiens
  Payload ID: 15810
  Gene Symbol: SIRT2
  Gene Name: sirtuin 2
  ENST ID: ENST00000423526
  CDS Start-End: 125-283
agtggttggtgacgggacagagcggtcggtgacagcctcaagggcttcagcaccgcgcccatggcagagccagaccgactcagattcagactctgagggaggagccgctggtggagaagcagacatggacttcctgcggaacttattctcccagacgctcagcctgggcagccagaaggagcgtctgctggacgagctgaccttggaaggggtggcccggtacatgcagagcgaacgctctgccactgtctccctcctcaggcagccaggcctgctgccctgagcctccctctcctgcggcaggcgagcagctgtctgcagccatcttttagcctgggcaggccccaaagacaacacaggcagtggctacaaagcatttgttccttgtgtcctcctgcacctggattctggggtcgcagagtcatctgtttggtgggagctggaatctccacatccgcaggcatccccgactttcgctctccatccaccggcctctatgacaacctagagaagtaccatcttccctacccagaggccatctttgagatcagctatt

SEQ ID NO: 181859 - DNA, 985 bp, Homo sapiens
  Payload ID: 15810
  Gene Symbol: SIRT2
  Gene Name: sirtuin 2
  ENST ID: ENST00000443898
  CDS Start-End: 191-481
aaagcgcgtctgcggccgcaatgtctgctgagagttgtagttctgtgccctatcacggccactcccatttctggtgccgtcacgggacagagcagtcggtgacaggacagagcagtcggtgacgggacacagtggttggtgacgggacagagcggtcggtgacagcctcaagggcttcagcaccgcgcccatggcagagccagacccctctcaccctctggagacccaggcagggaaggtgcaggaggctcaggccaccttcctgccacagccttttccccaaacctggtatcaccccctctcctccctccctaatcccacctctcgggcctggccactccaccccaccccttccaggactcagattcagactctgagggaggagccgctggtggagaagcagacatggacttcctgcggaacttattctcccagacgctcagcctgggcagccagaaggagcgtctgctggacgagctgaccttggaaggggtggcccggtacatgcagagcgaacgctgtcgcagagtcatctgtttggtgggagctggaatctccacatccgcaggcatccccgactttcgctctccatccaccggcctctatgacaacctagagaagtaccatcttccctacccagaggccatctttgagatcagctatttcaagaaacatccggaacccttcttcgccctcgccaaggaactctatcctgggcagttcaagccaaccatctgtcactacttcatgcgcctgctgaaggacaaggggctactcctgcgctgctacacgcagaacatagataccctggagcgaatagccgggctggaacaggaggacttggtggaggcgcacggcaccttctacacatcacactgcgtcagcgccagctgccggcacgaatacccgctaagctggatgaaagagaagatcttctctgaggtgacgcccaagtgtgaagactgtcagagcctggtgaagcctg

SEQ ID NO: 181860 - DNA, 1170 bp, Homo sapiens
  Payload ID: 15810
  Gene Symbol: SIRT2
  Gene Name: sirtuin 2
  ENST ID: ENST00000613542
  CDS Start-End: 1-1170
atgagtgacgaggcagaggactcagattcagactctgagggaggagccgctggtggagaagcagacatggacttcctgcggaacttattctcccagacgctcagcctgggcagccagaaggagcgtctgctggacgagctgaccttggaaggggtggcccggtacatgcagagcgaacgctgtcgcagagtcatctgtttggtgggagctggaatctccacatccgcaggcatccccgactttcgctctccatccaccggcctctatgacaacctagagaagtaccatcttccctacccagaggccatctttgagatcagctatttcaagaaacatccggaacccttcttcgccctcgccaaggaactctatcctgggcagttcaagccaaccatctgtcactacttcatgcgcctgctgaaggacaaggggctactcctgcgctgctacacgcagaacatagataccctggagcgaatagccgggctggaacaggaggacttggtggaggcgcacggcaccttctacacatcacactgcgtcagcgccagctgccggcacgaatacccgctaagctggatgaaagagaagatcttctctgaggtgacgcccaagtgtgaagactgtcagagcctggtgaagcctgatatcgtcttttttggtgagagcctcccagcgcgtttcttctcctgtatgcagtcagacttcctgaaggtggacctcctcctggtcatgggtacctccttgcaggtgcagccctttgcctccctcatcagcaaggcacccctctccacccctcgcctgctcatcaacaaggagaaagctggccagtcggaccctttcctggggatgattatgggcctcggaggaggcatggactttgactccaagaaggcctacagggacgtggcctggctgggtgaatgcgaccagggctgcctggcccttgctgagctccttggatggaagaaggagctggaggaccttgtccggagggagcacgccagcatagatgcccaggggggcgggggtccccaaccccagcacttcagcttcccccaagaagtccccgccacctgccaaggacgaggccaggacaacagagagggagaaaccccagtgacagctgcatctcccaggcgggatgccgagctcctcagggacagctga

SEQ ID NO: 181861 - DNA, 2062 bp, Homo sapiens; identical to SEQ ID NO: 181850
  Payload ID: 15810
  Gene Symbol: SIRT2
  Gene Name: Sirtuin 2
  ENST ID: ENST00000635478
  CDS Start-End: 406-1464

SEQ ID NO: 181862 - DNA, 1912 bp, Homo sapiens; identical to SEQ ID NO: 181849
  Payload ID: 15810
  Gene Symbol: SIRT2
  Gene Name: Sirtuin 2
  ENST ID: ENST00000634707
  CDS Start-End: 406-1110

SEQ ID NO: 181863 - DNA, 1170 bp, Homo sapiens; identical to SEQ ID NO: 181860
  Payload ID: 15810
  Gene Symbol: SIRT2
  Gene Name: Sirtuin 2
  ENST ID: ENST00000634328
  CDS Start-End: 1-1170

SEQ ID NO: 181864 - DNA, 927 bp, Homo sapiens; identical to SEQ ID NO: 181853
  Payload ID: 15810
  Gene Symbol: SIRT2
  Gene Name: Sirtuin 2
  ENST ID: ENST00000635486
  CDS Start-End: 222-557

SEQ ID NO: 181865 - DNA, 848 bp, Homo sapiens; identical to SEQ ID NO: 181854
  Payload ID: 15810
  Gene Symbol: SIRT2
  Gene Name: Sirtuin 2
  ENST ID: ENST00000634932
  CDS Start-End: 459-848

SEQ ID NO: 181866 - DNA, 578 bp, Homo sapiens; identical to SEQ ID NO: 181857
  Payload ID: 15810
  Gene Symbol: SIRT2
  Gene Name: Sirtuin 2
  ENST ID: ENST00000635192
  CDS Start-End: 359-578

SEQ ID NO: 181867 - DNA, 556 bp, Homo sapiens; identical to SEQ ID NO: 181858
  Payload ID: 15810
  Gene Symbol: SIRT2
  Gene Name: Sirtuin 2
  ENST ID: ENST00000634761
  CDS Start-End: 125-283

SEQ ID NO: 181868 - DNA, 556 bp, Homo sapiens; identical to SEQ ID NO: 181856
  Payload ID: 15810
  Gene Symbol: SIRT2
  Gene Name: Sirtuin 2
  ENST ID: ENST00000635627
  CDS Start-End: 146-265

SEQ ID NO: 181869 - DNA, 555 bp, Homo sapiens; identical to SEQ ID NO: 181852
  Payload ID: 15810
  Gene Symbol: SIRT2
  Gene Name: Sirtuin 2
  ENST ID: ENST00000635338
  CDS Start-End: 320-555

SEQ ID NO: 181870 - DNA, 1251 bp, Homo sapiens; identical to SEQ ID NO: 181855
  Payload ID: 15810
  Gene Symbol: SIRT2
  Gene Name: Sirtuin 2
  ENST ID: ENST00000635078
  CDS Start-End: 539-1251

SEQ ID NO: 181871 - DNA, 890 bp, Homo sapiens; identical to SEQ ID NO: 181851
  Payload ID: 15810
  Gene Symbol: SIRT2
  Gene Name: Sirtuin 2
  ENST ID: ENST00000634637
  CDS Start-End: 383-890

SEQ ID NO: 181872 - DNA, 985 bp, Homo sapiens; identical to SEQ ID NO: 181859
  Payload ID: 15810
  Gene Symbol: SIRT2
  Gene Name: Sirtuin 2
  ENST ID: ENST00000635694
  CDS Start-End: 191-481

SEQ ID NO: 181873 - DNA, 2070 bp, Homo sapiens; identical to SEQ ID NO: 181848
  Payload ID: 15810
  Gene Symbol: SIRT2
  Gene Name: Sirtuin 2
  ENST ID: ENST00000634533
  CDS Start-End: 303-1472

SEQ ID NO: 181874 - DNA, 2543 bp, Homo sapiens
  Payload ID: 15811
  Gene Symbol: SIRT3
  Gene Name: sirtuin 3
  Uniprot ID: Q9NTG7
  ENST ID: ENST00000382743
  CDS Start-End: 104-1303
cggaggcggggctggggcgccgggggcgggggtgggaggcggaggcggggccggggcgccgggggcggggcgagtccggaggactccttggactgcgcggaacatggcgttctggggttggcgcgccgcggcagccctccggctgtggggccgggtagttgaacgggtcgaggccgggggaggcgtggggccgtttcaggcctgcggctgtcggctggtgcttggcggcagggacgatgtgagtgcggggctgagaggcagccatggggcccgcggtgagcccttggacccggcgcgccccttgcagaggcctcccagacccgaggtgcccagggcattccggaggcagccgagggcagcagctcccagtttcttcttttcgagtattaaaggtggaagaaggtccatatctttttctgtgggtgcttcaagtgttgttggaagtggaggcagcagtgacaaggggaagctttccctgcaggatgtagctgagctgattcgggccagagcctgccagagggtggtggtcatggtgggggccggcatcagcacacccagtggcattccagacttcagatcgccggggagtggcctgtacagcaacctccagcagtacgatctcccgtaccccgaggccatttttgaactcccattcttctttcacaaccccaagccctttttcactttggccaaggagctgtaccctggaaactacaagcccaacgtcactcactactttctccggctgcttcatgacaaggggctgcttctgcggctctacacgcagaacatcgatgggcttgagagagtgtcgggcatccctgcctcaaagctggttgaagctcatggaacctttgcctctgccacctgcacagtctgccaaagacccttcccaggggaggacattcgggctgacgtgatggcagacagggttccccgctgcccggtctgcaccggcgttgtgaagcccgacattgtgttctttggggagccgctgccccagaggttcttgctgcatgtggttgatttccccatggcagatctgctgctcatccttgggacctccctggaggtggagccttttgccagcttgaccgaggccgtgcggagctcagttccccgactgctcatcaaccgggacttggtggggcccttggcttggcatcctcgcagcagggacgtggcccagctgggggacgtggttcacggcgtggaaagcctagtggagcttctgggctggacagaagagatgcgggaccttgtgcagcgggaaactgggaagcttgatggaccagacaaataggatgatggctgcccccacacaataaatggtaacataggagacatccacatcccaattctgacaagacctcatgcctgaagacagcttgggcaggtgaaaccagaatatgtgaactgagtggacacccgaggctgccactggaatgtcttctcaggccatgagctgcagtgactggtagggctgtgtttacagtcagggccaccccgtcacatatacaaaggagctgcctgcctgtttgctgtgttgaactcttcactctgctgaagctcctaatggaaaaagctttcttctgactgtgaccctcttgaactgaatcagaccaactggaatcccagaccgagtctgctttctgtgcctagttgaacggcaagctcggcatctgttggttacaagatccagacttgggccgagcggtccccagccctcttcatgttccgaagtgtagtcttgaggccctggtgccgcacttctagcatgttggtctcctttagtggggctatttttaatgagagaaaatctgttctttccagcatgaaatacatttagtctcctcaaagggactgcaggtgttgacatgagttggaaagggaaccctgggatacgtggcgtcccctctattggaacagtctgaggactgaaggcatttgtccctggatttattggagacggcccagctcctccctctgaaggtggtcacattctgttgactctccatactcagcctctcctccagaaacagatctgttccagaacattccagcactttctatctggcctccttgtccccacactacgcccccccaccctcgccagggcttcctctagtgacactgttagagctaatctctgagacagggaaggcattactcacttaaaacccaggctgagtcctggccacctgctggattgtgacataggaggtggaatccactgaactgctacttctgcacaggctccttctcctggggctgtacccaggcccagccctgatggctcaccctgtcaggcaccagctgctccctcctgggctctcacccacctgcacatcctccttcctagcatcacattacctgcgtgtttccccagacaaaagcacttcccattcttgaaccttgcctaccctgggctgagctgacggcaatagatttaatgacagtgactcccaggaagggggtcctgtgactttgcgccttaataagaacaaaaggtggaattggtgacctaggaaaactgttgaatt

SEQ ID NO: 181875 - DNA, 763 bp, Homo sapiens
  Payload ID: 15811
  Gene Symbol: SIRT3
  Gene Name: sirtuin 3
  ENST ID: ENST00000528469
  CDS Start-End: 484-763
ggcgtttgcagcccacttcccgcgcacttggctgtgccattgaggcgtcaaagagtgtgggcgcctgtggtcgaacccgctacggactagctttgtggtgtcagcctttgtgacccggaattgctcctgtcaaatgaggatcttcccagtagtgttttgcgaggattaggtgtaaatataatgcctgaccatagtaaaagcgctcagaaagtattaactatcaccgccatccgggttgaaaaagttcgtgtttagtaggagcacagtagctgtttggggaacgaccttaagtgaatagatgtctgaaatgctgtgtgaagtggggcgcttaataggtgtattaaaggtggaagaaggtccatatctttttctgtgggtgcttcaagtgttgttggaagtggaggcagcagtgacaaggggaagctttccctgcaggatgtagctgagctgattcgggccagagcctgccagagggtggtggtcatggtgggggccggcatcagcacacccagtggcattccagacttcagatcgccggggagtggcctgtacagcaacctccagcagtacgatctcccgtaccccgaggccatttttgaactcccattcttctttcacaaccccaagccctttttcactttggccaaggagctgtaccctggaaactacaagcccaacgtcactcactactttctccggctgcttcatgacaaggggctgcttctgcggctctacacgcagaacatcgatgggcttgagagag

SEQ ID NO: 181876 - DNA, 1395 bp, Homo sapiens
  Payload ID: 15811
  Gene Symbol: SIRT3
  Gene Name: sirtuin 3
  ENST ID: ENST00000524564
  CDS Start-End: 27-1088
ggaggactccttggactgcgcggaacatggcgttctggggttggcgcgccgcggcagccctccggctgtggggccgggtagttgaacgggtcgaggccgggggaggcgtggggccgtttcaggcctgcggctgtcggctggtgcttggcggcagggacgatgtgagtgcggggctgagaggcagccatggggcccgcggtgagcccttggacccggcgcgccccttgcagaggcctcccagacccgaggtgcccagggcattccggaggcagccgagggcagcagctcccagtttcttcttttcgagatcgccggggagtggcctgtacagcaacctccagcagtacgatctcccgtaccccgaggccatttttgaactcccattcttctttcacaaccccaagccctttttcactttggccaaggagctgtaccctggaaactacaagcccaacgtcactcactactttctccggctgcttcatgacaaggggctgcttctgcggctctacacgcagaacatcgatgggcttgagagagtgtcgggcatccctgcctcaaagctggttgaagctcatggaacctttgcctctgccacctgcacagtctgccaaagacccttcccaggggaggacattcgggctgacgtgatggcagacagggttccccgctgcccggtctgcaccggcgttgtgaagcccgacattgtgttctttggggagccgctgccccagaggttcttgctgcatgtggttgatttccccatggcagatctgctgctcatccttgggacctccctggaggtggagccttttgccagcttgaccgaggccgtgcggagctcagttccccgactgctcatcaaccgggacttggtggggcccttggcttggcatcctcgcagcagggacgtggcccagctgggggacgtggttcacggcgtggaaagcctagtggagcttctgggctggacagaagagatgcgggaccttgtgcagcgggaaactgggaaggtacagactgctgaggaggaccatccaaggggctgcccttctcactgctctaggcttgatggaccagacaaataggatgatggctgcccccacacaataaatggtaacataggagacatccacatcccaattctgacaagacctcatgcctgaagacagcttgggcaggtgaaaccagaatatgtgaactgagtggacacccgaggctgccactggaatgtcttctcaggccatgagctgcagtgactggtagggctgtgtttacagtcagggccaccccgtcacatatacaaaggagctgcctgcctgtttgctgtgttgaactcttcactctgctgaagctcctaatggaaaaagctttcttctgactgtgaccctcttg

SEQ ID NO: 181877 - DNA, 1235 bp, Homo sapiens
  Payload ID: 15811
  Gene Symbol: SIRT3
  Gene Name: sirtuin 3
  ENST ID: ENST00000532956
  CDS Start-End: 25-1062
aggactccttggactgcgcggaacatggcgttctggggttggcgcgccgcggcagccctccggctgtggggccgggtagttgaacgggtcgaggccgggggaggcgtggggccgtttcaggcctgcggctgtcggctggtgcttggcggcagggacgatgtgagtgcggggctgagaggcagccatggggcccgcggtgagcccttggacccggcgcgccccttgcagaggcctcccagacccgaggtgcccagggcattccggaggcagccgagggcagcagctcccagtttcttcttttcgagtattaaaggtggaagaaggtccatatctttttctgtgggtgcttcaagtgttgttggaagtggaggcagcagtgacaaggggaagctttccctgcaggatgtagctgagctgattcgggccagagcctgccagagggtggtggtcatggtgggggccggcatcagcacacccagtggcattccagacttcagatcgccggggagtggcctgtacagcaacctccagcagtacgatctcccgtaccccgaggccatttttgaactcccattcttctttcacaaccccaagccctttttcactttggccaaggagctgtaccctggaaactacaagcccaacgtcactcactactttctccggctgcttcatgacaaggggctgcttctgcggctctacacgcagaacatcgatgggcttgagagagtgtcgggcatccctgcctcaaagctggttgaagctcatggaacctttgcctctgccacctgcacagtctgccaaagacccttcccaggggaggacattcgggtggagccttttgccagcttgaccgaggccgtgcggagctcagttccccgactgctcatcaaccgggacttggtggggcccttggcttggcatcctcgcagcagggacgtggcccagctgggggacgtggttcacggcgtggaaagcctagtggagcttctgggctggacagaagagatgcgggaccttgtgcagcgggaaactgggaagcttgatggaccagacaaataggatgatggctgcccccacacaataaatggtaacataggagacatccacatcccaattctgacaagacctcatgcctgaagacagcttgggcaggtgaaaccagaatatgtgaactgagtggacacccgaggctgccactggaatgtcttctcaggccatgagctgcagtgact

SEQ ID NO: 181878 - DNA, 365 bp, Homo sapiens
  Payload ID: 15811
  Gene Symbol: SIRT3
  Gene Name: sirtuin 3
  ENST ID: ENST00000525776
  CDS Start-End: 295-365
agaaaggtgattattttgagaggcctggggagacacacatgctcattctcgagggtggcggtggtgcagagggcagagccatgctcgttcttgctatcctgagattggttgctatctgtttcctttgctgctgtgtttttttctgtcagtattaaaggtggaagaaggtccatatctttttctgtgggtgcttcaagtgttgttggaagtggaggcagcagtgacaaggggaagctttccctgcaggatgtagctgagctgattcgggccagagcctgccagagggtggtggtcatggtgggggccggcatcagcacacccagtggcattccagacttcagatcgccggggagtggcctgtacag

SEQ ID NO: 181879 - DNA, 1588 bp, Homo sapiens
  Payload ID: 15811
  Gene Symbol: SIRT3
  Gene Name: sirtuin 3
  ENST ID: ENST00000532837
  CDS Start-End: 16-156
tggactgcgcggaacatggcgttctggggttggcgcgccgcggcagccctccggctgtggggccgggtagttgaacgggtcgaggccgggggaggcgtggggccgtttcaggcctgcggctgtcggctggtgcttggcggcagggacgattattaaaggtggaagaaggtccatatctttttctgtgggtgcttcaagtgttgttggaagtggaggcagcagtgacaaggggaagctttccctgcaggatgtagctgagctgattcgggccagagcctgccagagggtggtggtcatggtgggggccggcatcagcacacccagtggcattccagacttcagatcgccggggagtggcctgtacagcaacctccagcagtacgatctcccgtaccccgaggccatttttgaactcccattcttctttcacaaccccaagccctttttcactttggccaaggagctgtaccctggaaactacaagcccaacgtcactcactactttctccggctgcttcatgacaaggggctgcttctgcggctctacacgcagaacatcgatgggcttgagagagtgtcgggcatccctgcctcaaagctggttgaagctcatggaacctttgcctctgccacctgcacagtctgccaaagacccttcccaggggaggacattcgggctgacgtgatggcagacagggttccccgctgcccggtctgcaccggcgttgtgaagcccgacattgtgttctttggggagccgctgccccagaggttcttgctgcatgtggttgatttccccatggcagatctgctgctcatccttgggacctccctggaggtggagccttttgccagcttgaccgaggccgtgcggagctcagttccccgactgctcatcaaccgggacttggtggggcccttggcttggcatcctcgcagcagggacgtggcccagctgggggacgtggttcacggcgtggaaagcctagtggagcttctgggctggacagaagagatgcgggaccttgtgcagcgggaaactgggaagcttgatggaccagacaaataggatgatggctgcccccacacaataaatggtaacataggagacatccacatcccaattctgacaagacctcatgcctgaagacagcttgggcaggtgaaaccagaatatgtgaactgagtggacacccgaggctgccactggaatgtcttctcaggccatgagctgcagtgactggtagggctgtgtttacagtcagggccaccccgtcacatatacaaaggagctgcctgcctgtttgctgtgttgaactcttcactctgctgaagctcctaatggaaaaagctttcttctgactgtgaccctcttgaactgaatcagaccaactggaatcccagaccgagtctgctttctgtgcctagttgaacggcaagctcggcatctgttggttacaagatccagacttgggccgagcggtccccagccctcttcatgttccgaagtgtagtcttgaggccctggtgccgcacttctagcatgttggtctcctttagtggggctatttttaatgagagaaaatct

SEQ ID NO: 181880 - DNA, 2627 bp, Homo sapiens
  Payload ID: 15811
  Gene Symbol: SIRT3
  Gene Name: sirtuin 3
  ENST ID: ENST00000529937
  CDS Start-End: 10-414
gcgcggaacatggcgttctggggttggcgcgccgcggcagccctccggctgtggggccgggtagttgaacgggtcgaggccgggggaggcgtggggccgtttcaggcctgcggctgtcggctggtgcttggcggcagggacgatgctgacgtgatggcagacagggttccccgctgcccggtctgcaccggcgttgtgaagcccgacattgtgttctttggggagccgctgccccagaggttcttgctgcatgtggttgatttccccatggcagatctgctgctcatccttgggacctccctggaggtttgtcagcaggcctgtgcagggaggaggctggagggcaggggaagggaggggtacaggagtcatctcatgggcccttccagggctggtgccactttgggaaggtgaatggattcagctggggttccaggctgagggagcagcagcctgtgcaggagacaggaaggtgggaagctgctgggctttggaggtggtataggtgtgggtggggcaccacgtgtgaggagaagggagaaggatgggggtgtgggggcgaggtggaggggcagggcctcccaggtcagatcaggaatactgatgctgcagtgggaggagtgataaatccacagggactggcccggggacgtagctgcacccttggggtcagggaggcctttggggagtggagagtggagcaagcagtgccaggaggctggtcctggagaaggtggagctgtggtcgcctgagggatggcgaggagggggactggactcgcagtctgtgatgttttggggacgtgagaaggaggcgtctggcttggtctgtaaggtcagggcacttgctggtgaggcgtgatttgggagggaggatgcccagctcggttctgtgtgtgtctgaggtgtcgggaaacatgccctggatgtgttcaagcagctgttctgcgtctgcgtctgcagctcaggaaattcctaaaagctgtgatgagagcaagaaatgagaccatgaagtcagtgtgtgcgtgactggatgtaggcaccgaggacagaagggccagaaagacctgtgctcagaggggcccagggcagccacaggggcccagagcatgtgtttgttcaggcattcattgtgtgctgggccctgctccagtgctttggacatacacggtcagatgtcagtgtaagaagttatatagtttgttaggagatgattgatgttatgagaaagataacaagtaggatagaaaggctagaagggttgggaaccagctgcagtgtcaagtcaggcaggtggagttggatctaagagtttaccgaggtgaggagggtctggcaggggacactgcacaggtgacaagcagcaaggagggtggggcgaagtcagcattgatggccacggggctggagcagagaagaaggtggggcacaagtgtcatctcatgggaggctggcgccacctcagaaggtgaatgggttcagcttgggttccaggccagagtctgaagttgagaggactccgttgggtgctgggctgtgagcccaccatgggggcaagactgggagcagcagacccagcagggcccttgtaggtaatcaccggctggcactggctgggggccaggtaaagccagcagaggctgaggggtgctggagtctgggtgtgtgtgaacgcagagtgggtacgctggcacagtgcatgggaggccgtggattcccaaggaccccagggctgtggctggagcagctggaaagacggagccgccgcttcctgagatggagaagcctggtggagccttttgccagcttgaccgaggccgtgcggagctcagttccccgactgctcatcaaccgggacttggtggggcccttggcttggcatcctcgcagcagggacgtggcccagctgggggacgtggttcacggcgtggaaagcctagtggagcttctgggctggacagaagagatgcgggaccttgtgcagcgggaaactgggaaggtacagactgctgaggaggaccatccaaggggctgcccttctcactgctctaggcttgatggaccagacaaataggatgatggctgcccccacacaataaatggtaacataggagacatccacatcccaattctgacaagacctcatgcctgaagacagcttgggcaggtgaaaccagaatatgtgaactgagtggacacccgaggctgccactggaatgtcttctcaggccatgagctgcagtgactggtagggctgtgtttacagtcagggccaccccgtcacatatacaaaggagctgcctgcctgtttgctgtgttgaactcttcactctgctgaagctcctaatggaaaaagctttcttctgactgtgaccctcttgaactgaatcagaccaactggaatcccagaccgagtctgctttctgtgcctagttgaacggcaagctcggcatctgttggttacaagatccagacttgggccgagcggtccccagccctcttcatgttccgaagtgtagtcttgaggccctggtgccgcacttctagcatgttggtctcctttagtggggctatttttaatgagagaaaatctgttctttccagcatgaaatacatttagtctcctc

SEQ ID NO: 181881 - DNA, 681 bp, Homo sapiens
  Payload ID: 15811
  Gene Symbol: SIRT3
  Gene Name: sirtuin 3
  ENST ID: ENST00000530067
  CDS Start-End: 18-158
cttggactgcgcggaacatggcgttctggggttggcgcgccgcggcagccctccggctgtggggccgggtagttgaacgggtcgaggccgggggaggcgtggggccgtttcaggcctgcggctgtcggctggtgcttggcggcagggacgattattaaaggtggaagaaggtccatatctttttctgtgggtgcttcaagtgttgttggaagtggaggcagcagtgacaaggggaagctttccctgcaggatgtagctgagctgattcgggccagagcctgccagagggtggtggtcatggtgggggccggcatcagcacacccagtggcattccagacttcagatcgccggggagtggcctgtacagcaacctccagcagtacgatctcccgtaccccgaggccatttttgaactcccattcttctttcacaaccccaagccctttttcactttggccaaggagctgtaccctggaaactacaagcccaacgtcactcactactttctccggctgcttcatgacaaggggctgcttctgcggctctacacgcagaacatcgatgggcttgagagaggtgatacgggcatgaaaaccaggcttgaggacatcacaaccccaaggggctgtgcctccttccaggagtcctgccaagcccagaagttgtgctcttggccttgc

SEQ ID NO: 181882 - DNA, 1475 bp, Homo sapiens
  Payload ID: 15811
  Gene Symbol: SIRT3
  Gene Name: sirtuin 3
  ENST ID: ENST00000525319
  CDS Start-End: 27-983
ggaggactccttggactgcgcggaacatggcgttctggggttggcgcgccgcggcagccctccggctgtggggccgggtagttgaacgggtcgaggccgggggaggcgtggggccgtttcaggcctgcggctgtcggctggtgcttggcggcagggacgatgatgtagctgagctgattcgggccagagcctgccagagggtggtggtcatggtgggggccggcatcagcacacccagtggcattccagacttcagatcgccggggagtggcctgtacagcaacctccagcagtacgatctcccgtaccccgaggccatttttgaactcccattcttctttcacaaccccaagccctttttcactttggccaaggagctgtaccctggaaactacaagcccaacgtcactcactactttctccggctgcttcatgacaaggggctgcttctgcggctctacacgcagaacatcgatgggcttgagagagtgtcgggcatccctgcctcaaagctggttgaagctcatggaacctttgcctctgccacctgcacagtctgccaaagacccttcccaggggaggacattcgggctgacgtgatggcagacagggttccccgctgcccggtctgcaccggcgttgtgaagcccgacattgtgttctttggggagccgctgccccagaggttcttgctgcatgtggttgatttccccatggcagatctgctgctcatccttgggacctccctggaggtggagccttttgccagcttgaccgaggccgtgcggagctcagttccccgactgctcatcaaccgggacttggtggggcccttggcttggcatcctcgcagcagggacgtggcccagctgggggacgtggttcacggcgtggaaagcctagtggagcttctgggctggacagaagagatgcgggaccttgtgcagcgggaaactgggaagcttgatggaccagacaaataggatgatggctgcccccacacaataaatggtaacataggagacatccacatcccaattctgacaagacctcatgcctgaagacagcttgggcaggtgaaaccagaatatgtgaactgagtggacacccgaggctgccactggaatgtcttctcaggccatgagctgcagtgactggtagggctgtgtttacagtcagggccaccccgtcacatatacaaaggagctgcctgcctgtttgctgtgttgaactcttcactctgctgaagctcctaatggaaaaagctttcttctgactgtgaccctcttgaactgaatcagaccaactggaatcccagaccgagtctgctttctgtgcctagttgaacggcaagctcggcatctgttggttacaagatccagacttgggccgagcggtccccagccctcttcatgttccgaagtgtagtcttgaggccctggtgccgcacttctagcatgttggtctcctttagt

SEQ ID NO: 181883 - DNA, 785 bp, Homo sapiens
  Payload ID: 15811
  Gene Symbol: SIRT3
  Gene Name: sirtuin 3
  ENST ID: ENST00000526854
  CDS Start-End: 3-290
acatggcgttctggggttggcgcgccgcggcagccctccggctgtggggccgggtagttgaacgggtcgaggccgggggaggcgtggggccgtttcaggcctgcggctgtcggctggtgcttggcggcagggacgatgtgagtgcggggctgagaggcagccatggggcccgcggtgagcccttggacccggcgcgccccttgcagaggcctcccagacccgaggtgcccagggcattccggaggcagccgagggcagcagctcccagtttcttcttttcgaggatgtagctgagctgattcgggccagagcctgccagagggtggtggtcatggtgggggccggcatcagcacacccagtggcattccagacttcagatcgccggggagtggcctgtacagcaacctccagcagtacgatctcccgtaccccgaggccatttttgaactcccattcttctttcacaaccccaagccctttttcactttggccaaggagctgtaccctggaaactacaagcccaacgtcactcactactttctccggctgcttcatgacaaggggctgcttctgcggctctacacgcagaacatcgatgggcttgagagagtgtcgggcatccctgcctcaaagctggttgaagctcatggaacctttgcctctgccacctgcacagtctgccaaagacccttcccaggggaggacattcgggctgacgtgatggcagacagggttccccgctgcccggtctgcaccggcgttgtgaagcccgacattgtgttct

SEQ ID NO: 181884 - DNA, 430 bp, Homo sapiens
  Payload ID: 15811
  Gene Symbol: SIRT3
  Gene Name: sirtuin 3
  ENST ID: ENST00000525237
  CDS Start-End: 377-430
ggcgttctggggttggcgcgccgcggcagccctccggctgtggggccgggtagttgaacgggtcgaggccgggggaggcgtggggccgtttcaggcctgcggctgtcggctggtgcttggcggcagggacgatgtgagtgcggggctgagaggcagccatggggcccgcggtgagcccttggacccggcgcgccccttgcagaggcctcccagacccgaggtgcccagggcattccggaggcagccgagggcagcagctcccagtttcttcttttcgagtgttgttggaagtggaggcagcagtgacaaggggaagctttccctgcaggatgtagctgagctgattcgggccagagcctgccagagggtggtggtcatggtgggggccggcatcagcacacccagtggcattccagacttcagatcgccg

SEQ ID NO: 181885 - DNA, 779 bp, Homo sapiens
  Payload ID: 15811
  Gene Symbol: SIRT3
  Gene Name: sirtuin 3
  ENST ID: ENST00000529055
  CDS Start-End: 12-152
ctgcgcggaacatggcgttctggggttggcgcgccgcggcagccctccggctgtggggccgggtagttgaacgggtcgaggccgggggaggcgtggggccgtttcaggcctgcggctgtcggctggtgcttggcggcagggacgattattaaaggtggaagaaggtccatatctttttctgtgggtgcttcaagtgttgttggaagtggaggcagcagtgacaaggggaagctttccctgcaggatgtagctgagctgattcgggccagagcctgccagagggtggtggtcatggtgggggccggcatcagcacacccagtggcattccagacttcagatcgccggggagtggcctgtacagcaacctccagcagtacgatctcccgtaccccgaggccatttttgaactcccattcttctttcacaaccccaagccctttttcactttggccaaggagctgtaccctggaaactacaagcccaacgtcactcactactttctccggctgcttcatgacaaggggctgcttctgcggctctacacgcagaacatcgatgggcttgagagaggagtcctgccaagcccagaagttgtgctcttggccttgcgtgctcatctcggaggcggcagcaacacttcgctttggcttgaatttcagtgtcgggcatccctgcctcaaagctggttgaagctcatggaacctttgcctctgccacctgcacagtctgccaaagacccttcccaggggaggacattcgggctgacgtgatggcagac

SEQ ID NO: 181886 - DNA, 1225 bp, Homo sapiens
  Payload ID: 15811
  Gene Symbol: SIRT3
  Gene Name: sirtuin 3
  Uniprot ID: Q9NTG7
  ENST ID: ENST00000529382
  CDS Start-End: 365-1138
acttggctgtgccattgaggcgtcaaagagtgtgggcgcctgtggtcgaacccgctacggactagctttgtggtgtcagcctttgtgacccggaattgctcctgtcaaatgaggatcttcccagtagtgttttgcgaggattaggtgtaaatataatgcctgaccatagtaaaagcgctcagaaagtattaactatcaccgccatccgggttgaaaaagtattaaaggtggaagaaggtccatatctttttctgtgggtgcttcaagtgttgttggaagtggaggcagcagtgacaaggggaagctttccctgcaggatgtagctgagctgattcgggccagagcctgccagagggtggtggtcatggtgggggccggcatcagcacacccagtggcattccagacttcagatcgccggggagtggcctgtacagcaacctccagcagtacgatctcccgtaccccgaggccatttttgaactcccattcttctttcacaaccccaagccctttttcactttggccaaggagctgtaccctggaaactacaagcccaacgtcactcactactttctccggctgcttcatgacaaggggctgcttctgcggctctacacgcagaacatcgatgggcttgagagagtgtcgggcatccctgcctcaaagctggttgaagctcatggaacctttgcctctgccacctgcacagtctgccaaagacccttcccaggggaggacattcgggctgacgtgatggcagacagggttccccgctgcccggtctgcaccggcgttgtgaagcccgacattgtgttctttggggagccgctgccccagaggttcttgctgcatgtggttgatttccccatggcagatctgctgctcatccttgggacctccctggaggtggagccttttgccagcttgaccgaggccgtgcggagctcagttccccgactgctcatcaaccgggacttggtggggcccttggcttggcatcctcgcagcagggacgtggcccagctgggggacgtggttcacggcgtggaaagcctagtggagcttctgggctggacagaagagatgcgggaccttgtgcagcgggaaactgggaagcttgatggaccagacaaataggatgatggctgcccccacacaataaatggtaacataggagacatccacatcccaattctgacaagacctcatgcctgaagacagctt

SEQ ID NO: 181887 - DNA, 1217 bp, Homo sapiens
  Payload ID: 15812
  Gene Symbol: SIRT4
  Gene Name: sirtuin 4
  Uniprot ID: Q9Y6E7
  ENST ID: ENST00000202967
  CDS Start-End: 60-1004
gcaaatgcaatcagacggtcccactgtggggtgtgaagtgtccgtagagctgtgagagaatgaagatgagctttgcgttgactttcaggtcagcaaaaggccgttggatcgcaaaccccagccagccgtgctcgaaagcctccattgggttatttgtgccagcaagtcctcctctggaccctgagaaggtcaaagagttacagcgcttcatcaccctttccaagagactccttgtgatgactggggcaggaatctccaccgaatcggggataccagactacaggtcagaaaaagtggggctttatgcccgcactgaccgcaggcccatccagcatggtgattttgtccggagtgccccaatccgccagcggtactgggcgagaaacttcgtaggctggcctcaattctcctcccaccagcctaaccctgcacactgggctttgagcacctgggagaaactcggaaagctgtactggttggtgacccaaaatgtggatgctttgcacaccaaggcggggagtcggcgcctgacagagctccacggatgcatggacagggtcctgtgcttggattgtggggaacagactccccggggggtgctgcaagagcgtttccaagtcctgaaccccacctggagtgctgaggcccatggcctggctcctgatggtgacgtctttctctcagaggagcaagtccggagctttcaggtcccaacctgcgttcaatgtggaggccatctgaaaccagatgtcgttttcttcggggacacagtgaaccctgacaaggttgattttgtgcacaagcgtgtaaaagaagccgactccctcttggtggtgggatcatccttgcaggtatactctggttacaggtttatcctcactgcctgggagaagaagctcccgattgcaatactgaacattgggcccacacggtcggatgacttggcgtgtctgaaactgaattctcgttgtggagagttgctgcctttgatagacccatgctgaccacagcctgatattccagaacctggaacagggactttcacttgaatcttgctgctaaatgtaaatgccttctcaaatgacagattccagttcccattcaacagagtagggtgcactgacaaagtatagaaggttctaggtatcttaatgtgtggatattcttaattaaaactcattttttttaaataaaaaattgttcagctttatatgaaa

SEQ ID NO: 181888 - DNA, 531 bp, Homo sapiens
  Payload ID: 15812
  Gene Symbol: SIRT4
  Gene Name: sirtuin 4
  ENST ID: ENST00000536460
  CDS Start-End: 212-531
aaaatgcaaatgcaatcagacggtcccactgtggggtgtgaagtgtccgtagagctgtgagaggtcagcaaaaggccgttggatcgcaaaccccagccagccgtgctcgaaagcctccattgggttatttgtgccagcaagtcctcctctggaccctgagaaggtcaaagagttacagcgcttcatcaccctttccaagagactccttgtgatgactggggcaggaatctccaccgaatcggggataccagactacaggtcagaaaaagtggggctttatgcccgcactgaccgcaggcccatccagcatggtgattttgtccggagtgccccaatccgccagcggtactgggcgagaaacttcgtaggctggcctcaattctcctcccaccagcctaaccctgcacactgggctttgagcacctgggagaaactcggaaagctgtactggttggtgacccaaaatgtggatgctttgcacaccaaggcggggagtcggcgcctgacagagctccacggatgcatggacag

SEQ ID NO: 181889 - DNA, 1528 bp, Homo sapiens
  Payload ID: 15813
  Gene Symbol: SIRT5
  Gene Name: sirtuin 5
  Uniprot ID: Q9NXA8
  ENST ID: ENST00000359782
  CDS Start-End: 226-1104
agactgtattcgggggcgcgagctgccccagtaaatggaaatgttttctaacatataaaaacctacagaagaagaaaataattttctggatcaaattagaagtctgtattatattgatgtctccagattcaaatatattagaaagcagccgtggagacaaccatcttcattttgggagaaataactaaagcccgcctcaagcattagaactacagacaaaccctgatgcgacctctccagattgtcccaagtcgattgatttcccagctatattgtggcctgaagcctccagcgtccacacgaaaccagatttgcctgaaaatggctcggccaagttcaagtatggcagattttcgaaagttttttgcaaaagcaaagcacatagtcatcatctcaggagctggtgttagtgcagaaagtggtgttccgaccttcagaggagctggaggttattggagaaaatggcaagcccaggacctggcgactcccctggcctttgcccacaacccgtcccgggtgtgggagttctaccactaccggcgggaggtcatggggagcaaggagcccaacgccgggcaccgcgccatagccgagtgtgagacccggctgggcaagcagggccggcgagtcgtggtcatcacccagaacatcgatgagctgcaccgcaaggctggcaccaagaaccttctggagatccatggtagcttatttaaaactcgatgtacctcttgtggagttgtggctgagaattacaagagtccaatttgtccagctttatcaggaaaagggtgtgaagaggcaggctgcgggggcttgctgcgacctcacgtcgtgtggtttggagaaaacctggatcctgccattctggaggaggttgacagagagctcgcccactgtgatttatgtctagtggtgggcacttcctctgtggtgtacccagcagccatgtttgccccccaggtggctgccaggggcgtgccagtggctgaatttaacacggagaccaccccagctacgaacagattcaggtttcatttccagggaccctgtggaacgactcttcctgaagcccttgcctgtcatgaaaatgaaactgtttcttaagtgtcctggggaagaaagaaattacagtatatctaagaactaggccacacgcagaggagaaatggtcttatgggtggtgagctgagtactgaacaatctaaaaatagcctctgattccctcgctggaatccaacctgttgataagtgatgggggtttagaagtagcaaagagcacccacattcaaaagtcacagaactggaaagttaattcatattatttggtttgaactgaaacgtgaggtatctttgatgtgtatggttggttattgggagggaaaaattttgtaaattagattgtctaaaaaaaatagttattctgattatatttttgttatctgggcaaagtagaagtcaaggggtaaaaaccctactattctgatttttgcacaagttttagtggaaaataaaatcacactctacagta

SEQ ID NO: 181890 - DNA, 1342 bp, Homo sapiens
  Payload ID: 15813
  Gene Symbol: SIRT5
  Gene Name: sirtuin 5
  ENST ID: ENST00000379250
  CDS Start-End: 236-475
ggggcgtgggagactgtattcgggggcgcgagctgccccagtaaatggaaatgttttctaacatataaaaacctacagaagaagaaaataattttctggatcaaattagaagtctgtattatattgatgtctccagattcaaatatattagaaagcagccgtggagacaaccatcttcattttgggagaaataactaaagcccgcctcaagcattagaactacagacaaaccctgatgcgacctctccagattgtcccaagtcgattgatttcccagctatattgtggcctgaagcctccagcgtccacacgaaaccagatttgcctgaaaatggctcggccaagttcaagacctggcgactcccctggcctttgcccacaacccgtcccgggtgtgggagttctaccactaccggcgggaggtcatggggagcaaggagcccaacgccgggcaccgcgccatagccgagtgtgagacccggctgggcaagcagggccggcgagtcgtggtcatcacccagaacatcgatgagctgcaccgcaaggctggcaccaagaaccttctggagatccatggtagcttatttaaaactcgatgtacctcttgtggagttgtggctgagaattacaagagtccaatttgtccagctttatcaggaaaaggtgctccagaacctggaactcaagatgccagcatcccagttgagaaacttccccggtgtgaagaggcaggctgcgggggcttgctgcgacctcacgtcgtgtggtttggagaaaacctggatcctgccattctggaggaggttgacagagagctcgcccactgtgatttatgtctagtggtgggcacttcctctgtggtgtacccagcagccatgtttgccccccaggtggctgccaggggcgtgccagtggctgaatttaacacggagaccaccccagctacgaacagattcaggtttcatttccagggaccctgtggaacgactcttcctgaagcccttgcctgtcatgaaaatgaaactgtttcttaagtgtcctggggaagaaagaaattacagtatatctaagaactaggccacacgcagaggagaaatggtcttatgggtggtgagctgagtactgaacaatctaaaaatagcctctgattccctcgctggaatccaacctgttgataagtgatgggggtttagaagtagcaaagagcacccacattcaaaagtcacagaactggaaagttaattcatattatttggtttgaactgaaacgtgaggtatctttgatgtgtatggttggttattgggagggaaaaattttgtaaattagattgtctaaaaaaaa

SEQ ID NO: 181891 - DNA, 2339 bp, Homo sapiens
  Payload ID: 15813
  Gene Symbol: SIRT5
  Gene Name: sirtuin 5
  Uniprot ID: Q9NXA8
  ENST ID: ENST00000379262
  CDS Start-End: 219-1118
attcgggggcgcgagctgccccagtaaatggaaatgttttctaacatataaaaacctacagaagaagaaaataattttctggatcaaattagaagtctgtattatattgatgtctccagattcaaatatattagaaagcagccgtggagacaaccatcttcattttgggagaaataactaaagcccgcctcaagcattagaactacagacaaaccctgatgcgacctctccagattgtcccaagtcgattgatttcccagctatattgtggcctgaagcctccagcgtccacacgaaaccagatttgcctgaaaatggctcggccaagttcaagtatggcagattttcgaaagttttttgcaaaagcaaagcacatagtcatcatctcaggagctggtgttagtgcagaaagtggtgttccgaccttcagaggagctggaggttattggagaaaatggcaagcccaggacctggcgactcccctggcctttgcccacaacccgtcccgggtgtgggagttctaccactaccggcgggaggtcatggggagcaaggagcccaacgccgggcaccgcgccatagccgagtgtgagacccggctgggcaagcagggccggcgagtcgtggtcatcacccagaacatcgatgagctgcaccgcaaggctggcaccaagaaccttctggagatccatggtagcttatttaaaactcgatgtacctcttgtggagttgtggctgagaattacaagagtccaatttgtccagctttatcaggaaaaggtgctccagaacctggaactcaagatgccagcatcccagttgagaaacttccccggtgtgaagaggcaggctgcgggggcttgctgcgacctcacgtcgtgtggtttggagaaaacctggatcctgccattctggaggaggttgacagagagctcgcccactgtgatttatgtctagtggtgggcacttcctctgtggtgtacccagcagccatgtttgccccccaggtggctgccaggggcgtgccagtggctgaatttaacacggagaccaccccagctacgaacagattcagtcatttgatctccatctcatctctaattattataaagaattaaaacaagtcatcattgtagaaaagcaagaaaatgcagatagagaaaaagaagaaaataaaactggagtatttccacaacccaagtttagagttggcccccacctcccatgccatggactgagcagcaggggcccagcatcccttggatatggtggctgtgtcttcatgtgaaagaaactgaacttggtggtttttcctgccagttcaggagagattcttggcatgtaatatatatcactgctcaagtcaagcctcctaaaaccacagacctgtttcagctgctacttcagccaaaattcttcagcttcatattgtcttgaaaacctatgattgtctctaacaaacaggctacttgctagttagaaattcttatcaatttggcaagctacttatcaaccagactgaccacaagaactgtcatctcatcaatgaaggagtaactgatcaatgaagccagcaatgcttttttcttggcatcatcaaagctgacatttagaagagatgctggtgatagtcatctcatcctactcaatttttcaaaggcagaaaccaaccctggagcaattgagaggactgtttaaacacagagcttaacaatggcagaattgtatatctcgtgcttaacagattttggttgaactttaccctaggtcaggggtcagcaaactactgcctgtgggccaaatttgcccaccacctgtatctgtaaataaggtttcattggaacacagctgtggccatatgtttgtatattgtgtgtggctgcttttgcattaggatgacagaggtgaatagttgcaacagagactggctggtctgcaaagcctaaaatatgtcctgtgtggccctttacagaaaaagttttctaacccctgctctaggttacggagaaaaaaaaaatggaataatgttctctgctacttttaacctgattttctttgttacctaaataggcagctagaatgctgcctatattttaataaggatttggatctcacaagacaccttaggccttacacaagttgttcagattctttgccccagttctaatctagtgacaaaggcatagaattctcctcccacaggaatgtatttctattttcaaggtgttaattagttccagttttggttttgtcgttttccccatgtccgatgcttatattggatgatttctgataaaccctgactattccaataaaccctaggcatttttgaatttaaa

SEQ ID NO: 181892 - DNA, 4382 bp, Homo sapiens
  Payload ID: 15813
  Gene Symbol: SIRT5
  Gene Name: sirtuin 5
  Uniprot ID: Q9NXA8
  ENST ID: ENST00000397350
  CDS Start-End: 481-1089
atgtgggggatggtgggtgggtacagagagctgggagggaggcaccccggggggcggggcgtgggagactgtattcgggggcgcgagctgccccagtaaatggaaatgttttctaacatataaaaacctacagaagaagaaaataattttctggatcaaattagaagtctgtattatattgatgtctccagattcaaatatattagaaagcagccgtggagacaaccatcttcattttgggagaaataactaaagcccgcctcaagcattagaactacagacaaaccctgatgcgacctctccagattgtcccaagtcgattgatttcccagctatattgtggcctgaagcctccagcgtccacacgaaaccagatttgcctgaaaatggctcggccaagttcaagacctggcgactcccctggcctttgcccacaacccgtcccgggtgtgggagttctaccactaccggcgggaggtcatggggagcaaggagcccaacgccgggcaccgcgccatagccgagtgtgagacccggctgggcaagcagggccggcgagtcgtggtcatcacccagaacatcgatgagctgcaccgcaaggctggcaccaagaaccttctggagatccatggtagcttatttaaaactcgatgtacctcttgtggagttgtggctgagaattacaagagtccaatttgtccagctttatcaggaaaaggtgctccagaacctggaactcaagatgccagcatcccagttgagaaacttccccggtgtgaagaggcaggctgcgggggcttgctgcgacctcacgtcgtgtggtttggagaaaacctggatcctgccattctggaggaggttgacagagagctcgcccactgtgatttatgtctagtggtgggcacttcctctgtggtgtacccagcagccatgtttgccccccaggtggctgccaggggcgtgccagtggctgaatttaacacggagaccaccccagctacgaacagattcaggtttcatttccagggaccctgtggaacgactcttcctgaagcccttgcctgtcatgaaaatgaaactgtttcttaagtgtcctggggaagaaagaaattacagtatatctaagaactaggccacacgcagaggagaaatggtcttatgggtggtgagctgagtactgaacaatctaaaaatagcctctgattccctcgctggaatccaacctgttgataagtgatgggggtttagaagtagcaaagagcacccacattcaaaagtcacagaactggaaagttaattcatattatttggtttgaactgaaacgtgaggtatctttgatgtgtatggttggttattgggagggaaaaattttgtaaattagattgtctaaaaaaaatagttattctgattatatttttgttatctgggcaaagtagaagtcaaggggtaaaaaccctactattctgatttttgcacaagttttagtggaaaataaaatcacactctacagtaggtaatttattgtataaagacattaccccacgatatggctttattagggactttttttttttttttttgagacagagtttcactcttgttgcccaggctggagtgcagtggtgcgatctcagctcacagcaacctccgcctcccgggttcaagagattctcctgcctcagcctcatgagtagctgggattacaggtatgtaccaccacacccagctaattttgtatttttagtagagacggggtttctccatgttggtcaggctggtcttaaactctcgacctcaggtgatctgcccgcctcggcctcccaaagtgctgagattacgggcatgagccaccgcacccggcttactgggggctttttaaccttgtttggctacattacctcagtgaacaaggggaagctcacaacaggaactcacacaaagaaggaagagaacagtaccaacaaggtagaacatcacgatgagaagaaagaatgatgcaaatatgtggacccccaggataaacacagctgcccaaaatttagctctggcccccttagatgggggaagtcaacagtgaagtgtttctcagcatcataaaggcagaagctgtggttcctgtggggcctgccaaccgttcccagatgctgaactctgctgggagttttttccatgggactttaaaaaatgatgcccttaggttgggccagacctctgttaacttcagtagggatggcaccaggttcaagaggccaaagaagagacctggagctagtgaaggaaacatagggtttatttggggaaccttacagggtggtccagtggccgcgggctggacagaactgcaaccacttataaaaagcatgcagtttacatagcactttcactcagcaccctcccctcagcagcctccacgtggcaaccctcacttcttaagttattgctgtcagatgcatctgccatacagggtcattctcaggggatgcttaagttatttctgtcaggtacatcttccatacactttactaccttggagtaaagtagtaagaatacagctttttccttaacctttaccagctaactcagtgcttaggggccttggaatgcctgctgtccagcaggtgtcacaggcctgactgggaggcatggccattatcaacagtgtatgaaggtcacatatggctccctgaagtgattacatacttggaccacatcacctcagccccttgcaaaattgcatttaatgttacacccttggcttttgtagaaacaggcaacaagacactatcatataaaactttgtactgcattgcaaggcataacctttaataaatcccagtggtcctttgtgtagggaacggggatgctcatagcctatggggcggctggagaaccagtcagggaccctgagggctcgatgtacactttacatgggtgggccaaggagtttacactgagggcactggtaatacctgtaatagtcttatagtacttataaagcagttttgcacataaaataccatcatgcacttataagtttgttcttgggctgctccaagttaactttattcattttcctagtgttagtgtctcagggagtctgattatatttttgatttgtaatttctatctgactaaggcctagagatttcaaaactgttctttgcaattcctctcatactgaacctctggttcagcagctttttttgttgttgttgttttcaagttttatcatttttgttcctatttggttttgtcgtttttaaattgagaattgcttctaaaacagaagacatgaaaagagaattaaaaatacaatatatgtgtaagatagaattattcaacttagcatttattaaacatctaccagatgatagacattagaaataaaatgactagcaagacctggcccttcccctcaggggttcacagaatggctggagcaactgtcatataagctgttatgaagtgcagaaactacacagacatttgtgcgggttcagaccagcgcaattagagatgggcagagtgggatggggtaggggtaaggtgcttgaaatttgcctgggtgggaatttttgaagtataaaaaggacttctacctggggggctgcggcagtagagggaagagcacggtcggtacaaatgcatggcaggtgtgaaacagtttgatttgttcaaagaatgatgaatcacttagtgttgtataatggatgggaggagagaaacacagcgatcacaaagggccatgtttgccaagaaataaaatatacttggaaaaaaagtacgtatgtgtatataccacaaaactcgggtgcattctctagggaccggcgaagccattctttcaggagatatgctcagcatttgccacgggccagctgctgttccaggtcgtgggttagggcccggcaccaggaagggcgcccctcccacagggccgacatcctaaccggcgtcgctgcggccgcggagctgggaaggccgagggcgccgggcacgtctgtgcagatttctttagagtccaggtctgtcgcccgcgtcttcgtcggtggcagcagggctgactggccacggcggccatctgctagagcgcatttcttcccatgaaacgccacctcctccgaagtgcggagcgaacgcagccaaatctacacaaagactgacaagctggatccactcgacggaacccagggccaaaaaacggcggcgagcagcgcctcgggcccgcgattaccggttttctgagcaccggacagcgtgagccgtgccagccctgtctcgccatcccagccgaggagggcagcgcgatggctcttccctgccttgaaatcaaccccattgccagccgctttcgccggcagagcattttccgtggggtcca

SEQ ID NO: 181893 - DNA, 571 bp, Homo sapiens
  Payload ID: 15813
  Gene Symbol: SIRT5
  Gene Name: sirtuin 5
  ENST ID: ENST00000606427
  CDS Start-End: 221-346
gtattcgggggcgcgagctgccccagtaaatggaaatgttttctaacatataaaaacctacagaagaagaaaataattttctggatcaaattagaagtctgtattatattgatgtctccagattcaaatatattagaaagcagccgtggagacaaccatcttcattttgggagaaataactaaagcccgcctcaagcattagaactacagacaaaccctgatgcgacctctccagattgtcccaagtcgattgatttcccagctatattgtggcctgaagcctccagcgtccacacgaaaccagatttgcctgaaaatggctcggccaagttcaacacaaggctgagagaaattaagacggtcacggtggaacagaacagaggcctcagaaataacactacacatctacaaccatctgatctttgacaaacctgacaaaaacaagcagcctatctctggaagggatgtgagttcaggtatggcagattttcgaaagttttttgcaaaagcaaagcacatagtcatcatctcaggagctggtgttagtgcagaaagtggtgttccgaccttc

SEQ ID NO: 181894 - DNA, 3922 bp, Homo sapiens
  Payload ID: 15813
  Gene Symbol: SIRT5
  Gene Name: sirtuin 5
  Uniprot ID: Q9NXA8
  ENST ID: ENST00000606117
  CDS Start-End: 297-1229
ccggagcgcggtcgggacacagcgcctctaggagaaagcctggaaggcgctccgggggtacccagagctcttagcgggccggcagcatgtgcggggcccaagtaaatggaaatgttttctaacatataaaaacctacagaagaagaaaataattttctggatcaaattagaagtctgtattatattgatgtctccagattcaaatatattagaaagcagccgtggagacaaccatcttcattttgggagaaataactaaagcccgcctcaagcattagaactacagacaaaccctgatgcgacctctccagattgtcccaagtcgattgatttcccagctatattgtggcctgaagcctccagcgtccacacgaaaccagatttgcctgaaaatggctcggccaagttcaagtatggcagattttcgaaagttttttgcaaaagcaaagcacatagtcatcatctcaggagctggtgttagtgcagaaagtggtgttccgaccttcagaggagctggaggttattggagaaaatggcaagcccaggacctggcgactcccctggcctttgcccacaacccgtcccgggtgtgggagttctaccactaccggcgggaggtcatggggagcaaggagcccaacgccgggcaccgcgccatagccgagtgtgagacccggctgggcaagcagggccggcgagtcgtggtcatcacccagaacatcgatgagctgcaccgcaaggctggcaccaagaaccttctggagatccatggtagcttatttaaaactcgatgtacctcttgtggagttgtggctgagaattacaagagtccaatttgtccagctttatcaggaaaaggtgctccagaacctggaactcaagatgccagcatcccagttgagaaacttccccggtgtgaagaggcaggctgcgggggcttgctgcgacctcacgtcgtgtggtttggagaaaacctggatcctgccattctggaggaggttgacagagagctcgcccactgtgatttatgtctagtggtgggcacttcctctgtggtgtacccagcagccatgtttgccccccaggtggctgccaggggcgtgccagtggctgaatttaacacggagaccaccccagctacgaacagattcaggtttcatttccagggaccctgtggaacgactcttcctgaagcccttgcctgtcatgaaaatgaaactgtttcttaagtgtcctggggaagaaagaaattacagtatatctaagaactaggccacacgcagaggagaaatggtcttatgggtggtgagctgagtactgaacaatctaaaaatagcctctgattccctcgctggaatccaacctgttgataagtgatgggggtttagaagtagcaaagagcacccacattcaaaagtcacagaactggaaagttaattcatattatttggtttgaactgaaacgtgaggtatctttgatgtgtatggttggttattgggagggaaaaattttgtaaattagattgtctaaaaaaaatagttattctgattatatttttgttatctgggcaaagtagaagtcaaggggtaaaaaccctactattctgatttttgcacaagttttagtggaaaataaaatcacactctacagtaggtaatttattgtataaagacattaccccacgatatggctttattagggactttttttttttttttttgagacagagtttcactcttgttgcccaggctggagtgcagtggtgcgatctcagctcacagcaacctccgcctcccgggttcaagagattctcctgcctcagcctcatgagtagctgggattacaggtatgtaccaccacacccagctaattttgtatttttagtagagacggggtttctccatgttggtcaggctggtcttaaactctcgacctcaggtgatctgcccgcctcggcctcccaaagtgctgagattacgggcatgagccaccgcacccggcttactgggggctttttaaccttgtttggctacattacctcagtgaacaaggggaagctcacaacaggaactcacacaaagaaggaagagaacagtaccaacaaggtagaacatcacgatgagaagaaagaatgatgcaaatatgtggacccccaggataaacacagctgcccaaaatttagctctggcccccttagatgggggaagtcaacagtgaagtgtttctcagcatcataaaggcagaagctgtggttcctgtggggcctgccaaccgttcccagatgctgaactctgctgggagttttttccatgggactttaaaaaatgatgcccttaggttgggccagacctctgttaacttcagtagggatggcaccaggttcaagaggccaaagaagagacctggagctagtgaaggaaacatagggtttatttggggaaccttacagggtggtccagtggccgcgggctggacagaactgcaaccacttataaaaagcatgcagtttacatagcactttcactcagcaccctcccctcagcagcctccacgtggcaaccctcacttcttaagttattgctgtcagatgcatctgccatacagggtcattctcaggggatgcttaagttatttctgtcaggtacatcttccatacactttactaccttggagtaaagtagtaagaatacagctttttccttaacctttaccagctaactcagtgcttaggggccttggaatgcctgctgtccagcaggtgtcacaggcctgactgggaggcatggccattatcaacagtgtatgaaggtcacatatggctccctgaagtgattacatacttggaccacatcacctcagccccttgcaaaattgcatttaatgttacacccttggcttttgtagaaacaggcaacaagacactatcatataaaactttgtactgcattgcaaggcataacctttaataaatcccagtggtcctttgtgtagggaacggggatgctcatagcctatggggcggctggagaaccagtcagggaccctgagggctcgatgtacactttacatgggtgggccaaggagtttacactgagggcactggtaatacctgtaatagtcttatagtacttataaagcagttttgcacataaaataccatcatgcacttataagtttgttcttgggctgctccaagttaactttattcattttcctagtgttagtgtctcagggagtctgattatatttttgatttgtaatttctatctgactaaggcctagagatttcaaaactgttctttgcaattcctctcatactgaacctctggttcagcagctttttttgttgttgttgttttcaagttttatcatttttgttcctatttggttttgtcgtttttaaattgagaattgcttctaaaacagaagacatgaaaagagaattaaaaatacaatatatgtgtaagatagaattattcaacttagcatttattaaacatctaccagatgatagacattagaaataaaatgactagcaagacctggcccttcccctcaggggttcacagaatggctggagcaactgtcatataagctgttatgaagtgcagaaactacacagacatttgtgcgggttcagaccagcgcaattagagatgggcagagtgggatggggtaggggtaaggtgcttgaaatttgcctgggtgggaatttttgaagtataaaaaggacttctacctggggggctgcggcagtagagggaagagcacggtcggtacaaatgcatggcaggtgtgaaacagtttgatttgttcaaagaatgatgaatcacttagtgttgtataatggatgggaggagagaaacacagcgatcacaaagggccatgtttgccaagaaataaaatatacttggaaaaaaa

SEQ ID NO: 181895 - DNA, 1506 bp, Homo sapiens
  Payload ID: 15814
  Gene Symbol: SIRT6
  Gene Name: sirtuin 6
  Uniprot ID: Q8N6T7
  ENST ID: ENST00000305232
  CDS Start-End: 12-998
ggcagtcgaggatgtcggtgaattacgcggcggggctgtcgccgtacgcggacaagggcaagtgcggcctcccggagatcttcgaccccccggaggagctggagcggaaggtgtgggaactggcgaggctggtctggcagtcttccagtgtggtgttccacacgggtgccggcatcagcactgcctctggcatccccgacttcaggggtccccacggagtctggaccatggaggagcgaggtctggcccccaagttcgacaccacctttgagagcgcgcggcccacgcagacccacatggcgctggtgcagctggagcgcgtgggcctcctccgcttcctggtcagccagaacgtggacgggctccatgtgcgctcaggcttccccagggacaaactggcagagctccacgggaacatgtttgtggaagaatgtgccaagtgtaagacgcagtacgtccgagacacagtcgtgggcaccatgggcctgaaggccacgggccggctctgcaccgtggctaaggcaagggggctgcgagcctgcaggaacgccgacctgtccatcacgctgggtacatcgctgcagatccggcccagcgggaacctgccgctggctaccaagcgccggggaggccgcctggtcatcgtcaacctgcagcccaccaagcacgaccgccatgctgacctccgcatccatggctacgttgacgaggtcatgacccggctcatgaagcacctggggctggagatccccgcctgggacggcccccgtgtgctggagagggcgctgccacccctgccccgcccgcccacccccaagctggagcccaaggaggaatctcccacccggatcaacggctctatccccgccggccccaagcaggagccctgcgcccagcacaacggctcagagcccgccagccccaaacgggagcggcccaccagccctgccccccacagaccccccaaaagggtgaaggccaaggcggtccccagctgaccagggtgcttggggagggtggggctttttgtagaaactgtggattctttttctctcgtggtctcactttgttacttgtttctgtccccgggagcctcagggctctgagagctgtgctccaggccaggggttacacctgccctccgtggtccctccctgggctccaggggcctctggtgcggttccgggaagaagccacaccccagaggtgacaggtgagcccctgccacaccccagcctctgacttgctgtgttgtccagaggtgaggctgggccctccctggtctccagcttaaacaggagtgaactccctctgtccccagggcctcccttctgggccccctacagcccaccctacccctcctccatgggccctgcaggaggggagacccaccttgaagtgggggatcagtagaggcttgcactgcctttggggctggagggagacgtgggtccaccaggcttctggaaaagtcctcaatgcaataaaaacaatttctttcttgca

SEQ ID NO: 181896 - DNA, 1641 bp, Homo sapiens
  Payload ID: 15814
  Gene Symbol: SIRT6
  Gene Name: sirtuin 6
  Uniprot ID: Q8N6T7
  ENST ID: ENST00000337491
  CDS Start-End: 66-1133
gccccgcttccggcggaagcggcctcaacaagggaaactttattgttcccgtggggcagtcgaggatgtcggtgaattacgcggcggggctgtcgccgtacgcggacaagggcaagtgcggcctcccggagatcttcgaccccccggaggagctggagcggaaggtgtgggaactggcgaggctggtctggcagtcttccagtgtggtgttccacacgggtgccggcatcagcactgcctctggcatccccgacttcaggggtccccacggagtctggaccatggaggagcgaggtctggcccccaagttcgacaccacctttgagagcgcgcggcccacgcagacccacatggcgctggtgcagctggagcgcgtgggcctcctccgcttcctggtcagccagaacgtggacgggctccatgtgcgctcaggcttccccagggacaaactggcagagctccacgggaacatgtttgtggaagaatgtgccaagtgtaagacgcagtacgtccgagacacagtcgtgggcaccatgggcctgaaggccacgggccggctctgcaccgtggctaaggcaagggggctgcgagcctgcaggggagagctgagggacaccatcctagactgggaggactccctgcccgaccgggacctggcactcgccgatgaggccagcaggaacgccgacctgtccatcacgctgggtacatcgctgcagatccggcccagcgggaacctgccgctggctaccaagcgccggggaggccgcctggtcatcgtcaacctgcagcccaccaagcacgaccgccatgctgacctccgcatccatggctacgttgacgaggtcatgacccggctcatgaagcacctggggctggagatccccgcctgggacggcccccgtgtgctggagagggcgctgccacccctgccccgcccgcccacccccaagctggagcccaaggaggaatctcccacccggatcaacggctctatccccgccggccccaagcaggagccctgcgcccagcacaacggctcagagcccgccagccccaaacgggagcggcccaccagccctgccccccacagaccccccaaaagggtgaaggccaaggcggtccccagctgaccagggtgcttggggagggtggggctttttgtagaaactgtggattctttttctctcgtggtctcactttgttacttgtttctgtccccgggagcctcagggctctgagagctgtgctccaggccaggggttacacctgccctccgtggtccctccctgggctccaggggcctctggtgcggttccgggaagaagccacaccccagaggtgacaggtgagcccctgccacaccccagcctctgacttgctgtgttgtccagaggtgaggctgggccctccctggtctccagcttaaacaggagtgaactccctctgtccccagggcctcccttctgggccccctacagcccaccctacccctcctccatgggccctgcaggaggggagacccaccttgaagtgggggatcagtagaggcttgcactgcctttggggctggagggagacgtgggtccaccaggcttctggaaaagtcctcaatgcaataaaaacaatttctttcttgca

SEQ ID NO: 181897 - DNA, 1361 bp, Homo sapiens
  Payload ID: 15814
  Gene Symbol: SIRT6
  Gene Name: sirtuin 6
  ENST ID: ENST00000601488
  CDS Start-End: 9-572
agtcgaggatgtcggtgaattacgcggcggggctgtcgccgtacgcggacaagggcaagtgcggcctcccggagatcttcgaccccccggaggagctggagcggaaggtgtgggaactggcgaggctggtctggcagtcttccagtgtggtgttccacacgggtgccggcatcagcactgcctctggcatccccgacttcagggacaaactggcagagctccacgggaacatgtttgtggaagaatgtgccaagtgtaagacgcagtacgtccgagacacagtcgtgggcaccatgggcctgaaggccacgggccggctctgcaccgtggctaaggcaagggggctgcgagcctgcaggggagagctgagggacaccatcctagactgggaggactccctgcccgaccgggacctggcactcgccgatgaggccagcagatccggcccagcgggaacctgccgctggctaccaagcgccggggaggccgcctggtcatcgtcaacctgcagcccaccaagcacgaccgccatgctgacctccgcatccatggctacgttgacgaggtcatgacccggctcatgaagcacctggggctggagatccccgcctgggacggcccccgtgtgctggagagggcgctgccacccctgccccgcccgcccacccccaagctggagcccaaggaggaatctcccacccggatcaacggctctatccccgccggccccaagcaggagccctgcgcccagcacaacggctcagagcccgccagccccaaacgggagcggcccaccagccctgccccccacagaccccccaaaagggtgaaggccaaggcggtccccagctgaccagggtgcttggggagggtggggctttttgtagaaactgtggattctttttctctcgtggtctcactttgttacttgtttctgtccccgggagcctcagggctctgagagctgtgctccaggccaggggttacacctgccctccgtggtccctccctgggctccaggggcctctggtgcggttccgggaagaagccacaccccagaggtgacaggtgagcccctgccacaccccagcctctgacttgctgtgttgtccagaggtgaggctgggccctccctggtctccagcttaaacaggagtgaactccctctgtccccagggcctcccttctgggccccctacagcccaccctacccctcctccatgggccctgcaggaggggagacccaccttgaagtgggggatcagtagaggcttgcactgcctttggggctggagggagacgtgggtccaccaggcttctggaaaagtcctcaatgcaataaaaacaatttctttcttgca

SEQ ID NO: 181898 - DNA, 827 bp, Homo sapiens
  Payload ID: 15814
  Gene Symbol: SIRT6
  Gene Name: sirtuin 6
  ENST ID: ENST00000597896
  CDS Start-End: 1-827
gacaagggcaagtgcggcctcccggagatcttcgaccccccggaggagctggagcggaaggtgtgggaactggcgaggctggtctggcagtcttccagtgtggtgttccacacgggtgccggcatcagcactgcctctggcatccccgacttcagggacaaactggcagagctccacgggaacatgtttgtggaagaatgtgccaagtgtaagacgcagtacgtccgagacacagtcgtgggcaccatgggcctgaaggccacgggccggctctgcaccgtggctaaggcaagggggctgcgagcctgcaggggagagctgagggacaccatcctagactgggaggactccctgcccgaccgggacctggcactcgccgatgaggccagcaggaacgccgacctgtccatcacgctgggtacatcgctgcagatccggcccagcgggaacctgccgctggctaccaagcgccggggaggccgcctggtcatcgtcaacctgcagcccaccaagcacgaccgccatgctgacctccgcatccatggctacgttgacgaggtcatgacccggctcatgaagcacctggggctggagatccccgcctgggacggcccccgtgtgctggagagggcgctgccacccctgccccgcccgcccacccccaagctggagcccaaggaggaatctcccacccggatcaacggctctatccccgccggccccaagcaggagccctgcgcccagcacaacggctcagagcccgccagccccaaacgggagcggcccaccagccctgccccccacagaccccccaaaagggtgaaggc

SEQ ID NO: 181899 - DNA, 1473 bp, Homo sapiens
  Payload ID: 15814
  Gene Symbol: SIRT6
  Gene Name: sirtuin 6
  ENST ID: ENST00000600938
  CDS Start-End: 27-158
ttattgttcccgtggggcagtcgaggatgtcggtgaattacgcggcggggctgtcgccgtacgcggacaagggcaagtgcggcctcccggaggggtccccacggagtctggaccatggaggagcgaggtctggcccccaagttcgacaccacctttgagagcgcgcggcccacgcagacccacatggcgctggtgcagctggagcgcgtgggcctcctccgcttcctggtcagccagaacgtggacgggctccatgtgcgctcaggcttccccagggacaaactggcagagctccacgggaacatgtttgtggaagaatgtgccaagtgtaagacgcagtacgtccgagacacagtcgtgggcaccatgggcctgaaggccacgggccggctctgcaccgtggctaaggcaagggggctgcgagcctgcaggggagagctgagggacaccatcctagactgggaggactccctgcccgaccgggacctggcactcgccgatgaggccagcaggaacgccgacctgtccatcacgctgggtacatcgctgcagatccggcccagcgggaacctgccgctggctaccaagcgccggggaggccgcctggtcatcgtcaacctgcagcccaccaagcacgaccgccatgctgacctccgcatccatggctacgttgacgaggtcatgacccggctcatgaagcacctggggctggagatccccgcctgggacggcccccgtgtgctggagagggcgctgccacccctgccccgcccgcccacccccaagctggagcccaaggaggaatctcccacccggatcaacggctctatccccgccggccccaagcaggagccctgcgcccagcacaacggctcagagcccgccagccccaaacgggagcggcccaccagccctgccccccacagaccccccaaaagggtgaaggccaaggcggtccccagctgaccagggtgcttggggagggtggggctttttgtagaaactgtggattctttttctctcgtggtctcactttgttacttgtttctgtccccgggagcctcagggctctgagagctgtgctccaggccaggggttacacctgccctccgtggtccctccctgggctccaggggcctctggtgcggttccgggaagaagccacaccccagaggtgacaggtgagcccctgccacaccccagcctctgacttgctgtgttgtccagaggtgaggctgggccctccctggtctccagcttaaacaggagtgaactccctctgtccccagggcctcccttctgggccccctacagcccaccctacccctcctccatgggccctgcaggaggggagacccaccttgaagtgggggatcagtagaggcttgcactgcctttggggctggagggagacgtgggtccaccaggcttctggaaaagtcctcaatgcaataaaaacaatttctttcttgc

SEQ ID NO: 181900 - DNA, 716 bp, Homo sapiens
  Payload ID: 15814
  Gene Symbol: SIRT6
  Gene Name: sirtuin 6
  ENST ID: ENST00000601571
  CDS Start-End: 1-561
gtgaattacgcggcggggctgtcgccgtacgcggacaagggcaagtgcggcctcccggagatcttcgaccccccggaggagctggagcggaaggtgtgggaactggcgaggctggtctggcagtcttccagtgtggtgttccacacgggtgccggcatcagcactgcctctggcatccccgacttcagggacaaactggcagagctccacgggaacatgtttgtggaagaatgtgccaagtgtaagacgcagtacgtccgagacacagtcgtgggcaccatgggcctgaaggccacgggccggctctgcaccgtggctaaggcaagggggctgcgagcctgcaggggagagctgagggacaccatcctagactgggaggactccctgcccgaccgggacctggcactcgccgatgaggccagcaggaacgccgacctgtccatcacgctgggtacatcgctgcagatccggcccagcgggaacctgccgctggctaccaagcgccggggaggccgcctggtcatcgtcaacctgcagcccaccaagcacgtaggtgtctgagcctacccctgcccagggccaccatgcaccctctgtcccccacgcctgacccgtcccgcccctcggcaggaccgccatgctgacctccgcatccatggctacgttgacgaggtcatgacccggctcatgaagcacctggggctggagatccccgc

SEQ ID NO: 181901 - DNA, 1507 bp, Homo sapiens
  Payload ID: 15814
  Gene Symbol: SIRT6
  Gene Name: sirtuin 6
  ENST ID: ENST00000594279
  CDS Start-End: 220-750
cctgtcggggctgatcggggagagaggggatgtagttccaggaagaggggacgacaggcgcaaagggagatcttcgaccccccggaggagctggagcggaaggtgtgggaactggcgaggctggtctggcagtcttccagtgtggtgttccacacgggtgccggcatcagcactgcctctggcatccccgacttcaggggtccccacggagtctggaccatggaggagcgaggtctggcccccaagttcgacaccacctttgagagcgcgcggcccacgcagacccacatggcgctggtgcagctggagcgcgtgggcctcctccgcttcctggtcagccagaacgtggacgggctccatgtgcgctcaggcttccccagggacaaactggcagagctccacgggaacatgtttgtggaagaatgtgccaagtgtaagacgcagtacgtccgagacacagtcgtgggcaccatgggcctgaaggccacgggccggctctgcaccgtggctaaggcaagggggctgcgagcctgcaggggagagctgagggacaccatcctagactgggaggactccctgcccgaccgggacctggcactcgccgatgaggccagcagatccggcccagcgggaacctgccgctggctaccaagcgccggggaggccgcctggtcatcgtcaacctgcagcccaccaagcacgaccgccatgctgacctccgcatccatggctacgttgacgaggtcatgacccggctcatgaagcacctggggctggagatccccgcctgggacggcccccgtgtgctggagagggcgctgccacccctgccccgcccgcccacccccaagctggagcccaaggaggaatctcccacccggatcaacggctctatccccgccggccccaagcaggagccctgcgcccagcacaacggctcagagcccgccagccccaaacgggagcggcccaccagccctgccccccacagaccccccaaaagggtgaaggccaaggcggtccccagctgaccagggtgcttggggagggtggggctttttgtagaaactgtggattctttttctctcgtggtctcactttgttacttgtttctgtccccgggagcctcagggctctgagagctgtgctccaggccaggggttacacctgccctccgtggtccctccctgggctccaggggcctctggtgcggttccgggaagaagccacaccccagaggtgacaggtgagcccctgccacaccccagcctctgacttgctgtgttgtccagaggtgaggctgggccctccctggtctccagcttaaacaggagtgaactccctctgtccccagggcctcccttctgggccccctacagcccaccctacccctcctccatgggccctgcaggaggggagacccaccttgaagtgggggatcagtagaggcttgcactgcctttggggctggagggagacgtgggtccaccaggcttctggaaaagtc

SEQ ID NO: 181902 - DNA, 1372 bp, Homo sapiens
  Payload ID: 15814
  Gene Symbol: SIRT6
  Gene Name: sirtuin 6
  ENST ID: ENST00000599365
  CDS Start-End: 6-137
cgaggatgtcggtgaattacgcggcggggctgtcgccgtacgcggacaagggcaagtgcggcctcccggaggggtccccacggagtctggaccatggaggagcgaggtctggcccccaagttcgacaccacctttgagagcgcgcggcccacgcagacccacatggcgctggtgcagctggagcgcgtgggcctcctccgcttcctggtcagccagaacgtggacgggctccatgtgcgctcaggcttccccagggacaaactggcagagctccacgggaacatgtttgtggaagaatgtgccaagtgtaagacgcagtacgtccgagacacagtcgtgggcaccatgggcctgaaggccacgggccggctctgcaccgtggctaaggcaagggggctgcgagcctgcaggaacgccgacctgtccatcacgctgggtacatcgctgcagatccggcccagcgggaacctgccgctggctaccaagcgccggggaggccgcctggtcatcgtcaacctgcagcccaccaagcacgaccgccatgctgacctccgcatccatggctacgttgacgaggtcatgacccggctcatgaagcacctggggctggagatccccgcctgggacggcccccgtgtgctggagagggcgctgccacccctgccccgcccgcccacccccaagctggagcccaaggaggaatctcccacccggatcaacggctctatccccgccggccccaagcaggagccctgcgcccagcacaacggctcagagcccgccagccccaaacgggagcggcccaccagccctgccccccacagaccccccaaaagggtgaaggccaaggcggtccccagctgaccagggtgcttggggagggtggggctttttgtagaaactgtggattctttttctctcgtggtctcactttgttacttgtttctgtccccgggagcctcagggctctgagagctgtgctccaggccaggggttacacctgccctccgtggtccctccctgggctccaggggcctctggtgcggttccgggaagaagccacaccccagaggtgacaggtgagcccctgccacaccccagcctctgacttgctgtgttgtccagaggtgaggctgggccctccctggtctccagcttaaacaggagtgaactccctctgtccccagggcctcccttctgggccccctacagcccaccctacccctcctccatgggccctgcaggaggggagacccaccttgaagtgggggatcagtagaggcttgcactgcctttggggctggagggagacgtgggtccaccaggcttctggaaaagtcctcaatgcaataaaaacaatttctttcttgca

SEQ ID NO: 181903 - DNA, 1743 bp, Homo sapiens
  Payload ID: 15815
  Gene Symbol: SIRT7
  Gene Name: sirtuin 7
  Uniprot ID: Q9NRC8
  ENST ID: ENST00000328666
  CDS Start-End: 64-1266
atgcgccctgagcgcggcctgccgtgtgaggcggaagcggaagagcaggtctccaggggagcgatggcagccgggggtctgagccgctccgagcgcaaagcggcggagcgggtccggaggttgcgggaggagcagcagagggagcgcctccgccaggtgtcgcgcatcctgaggaaggcggcggcggagcgcagcgccgaggagggccggctgctggccgagagcgcggacctggtaacggagctgcagggccggagccggcggcgcgagggcctgaagcggcggcaggaggaggtgtgcgacgacccggaggagctgcgggggaaggtccgggagctggccagcgccgtccggaacgccaaatacttggtcgtctacacaggcgcgggaatcagcacggcagcgtctatcccagactaccggggccctaatggagtgtggacactgcttcagaaagggagaagcgttagtgctgccgacctgagcgaggccgagccaaccctcacccacatgagcatcacccgtctgcatgagcagaagctggtgcagcatgtggtgtctcagaactgtgacgggctccacctgaggagtgggctgccgcgcacggccatctccgagctccacgggaacatgtacattgaagtctgtacctcctgcgttcccaacagggagtacgtgcgggtgttcgatgtgacggagcgcactgccctccacagacaccagacaggccggacctgccacaagtgtgggacccagctgcgggacaccattgtgcactttggggagagggggacgttggggcagcctttgaactgggaagcggcgaccgaggctgccagcagagcagacaccatcctgtgtctagggtccagcctgaaggttctaaagaagtacccacgcctctggtgcatgaccaagccccctagccggcggccgaagctttacatcgtgaacctgcagtggaccccgaaggatgactgggctgccctgaagctacatgggaagtgtgatgacgtcatgcggctcctcatggccgagctgggcttggagatccccgcctatagcaggtggcaggatcccattttctcactggcgactcccctgcgtgctggtgaagaaggcagccacagtcggaagtcgctgtgcagaagcagagaggaggccccgcctggggaccggggtgcaccgcttagctcggcccccatcctagggggctggtttggcaggggctgcacaaaacgcacaaaaaggaagaaagtgacgtaatcacgtgctcgatgaagaacagttggcactttgcagatggccagtgtcacggtgaaggctgggttgcccccacgggtctagggagaacgaactctttggggatgacattttcaccgtgacatttttagccatttgtccttgaggaagccccttgcactgctgcggttgtaccctgatacggcctggccatcgaggacacctgcccatccggcctctgtgtcaagaggtggcagccgcacctttctgtgagaacggaactcgggttatttcagccccggcctgcagagtggaagcgcccagcggcctttcctcgctcaccaggccagtctcagggcctcaccgtatttctactactacttaatgaaaaagtgtgaactttatagaatcctctctgtactggatgtgcggcagaggggtggctccgagcctcggctctatgcagacctttttatttctattaaacgtttctgcactggc

SEQ ID NO: 181904 - DNA, 754 bp, Homo sapiens
  Payload ID: 15815
  Gene Symbol: SIRT7
  Gene Name: sirtuin 7
  ENST ID: ENST00000575360
  CDS Start-End: 6-356
gagcgatggcagccgggggtctgagccgctccgagcgcaaagcggcggagcgggtccggaggttgcgggaggagcagcagagggagcgcctccgccaggtgtcgcgcatcctgaggaaggcggcggcggagcgcagcgccgaggagggccggctgctggccgagagcgcggacctggtaacggagctgcagggccggagccggcggcgcgagggcctgaagcggcggcaggaggaggtgtgcgacgacccggaggagctgcgggggaaggtccgggagctggccagcgccgtccggaacgccaaatacttggtcgtctacacaggcgcgggaatcagcacggtggagcgggaatagtcagcactgggacatgagaatggacagtcgcctggacccacctagggattcaccatttgctaaatgtgcagcgtctatcccagactaccggggccctaatggagtgtggacactgcttcagaaagggagaagcgttagtgctgccgacctgagcgaggccgagccaaccctcacccacatgagcatcacccgtctgcatgagcagaagctggtgcagcatgtggtgtctcagaactgtgacgggctccacctgaggagtgggctgccgcgcacggccatctccgagctccacgggaacatgtacattgaagtctgtacctcctgcgttcccaacagggagtacgtgcgggtgttcgatgtgacggagcgcactgccctccacagacaccagacaggcc

SEQ ID NO: 181905 - DNA, 909 bp, Homo sapiens
  Payload ID: 15815
  Gene Symbol: SIRT7
  Gene Name: sirtuin 7
  ENST ID: ENST00000572902
  CDS Start-End: 460-909
tttgcttctgctggcttgctggacctgggctggggtgccaagtggcgcctgctgcgtcagagctcaaggaatctgtgcccaccaccagctcctggtccgtaggaggtgtcgcgcatcctgaggaaggcggcggcggagcgcagcgccgaggagggccggctgctggccgagagcgcggacctggtaacggagctgcagggccggagccggcggcgcgagggcctgaagcggcggcaggaggaggtgtgcgacgacccggaggagctgcgggggaaggtccgggagctggccagcgccgtccggaacgccaaatacttggtcgtctacacaggcgcgggaatcagcacggcagcgtctatcccagactaccggggccctaatggagtgtggacactgcttcagaaagggagaagcgttagtgctgccgacctgagcgaggccgagccaaccctcacccacatgagcatcacccgtctgcatgagcagaagctggtgcagcatgtggtgtctcagaactgtgacgggctccacctgaggagtgggctgccgcgcacggccatctccgagctccacgggaacatgtacattgaagtctgtacctcctgcgttcccaacagggagtacgtgcgggtgttcgatgtgacggagcgcactgccctccacagacaccagacaggccggacctgccacaagtgtgggacccagctgcgggacaccattgtgcactttggggagagggggacgttggggcagcctttgaactgggaagcggcgaccgaggctgccagcagagcagacaccatcctgtgtctagggtccagcctgaaggttctaaagaagtacccacgcctctggtgcatgaccaagccccctagccggcggccgaagctttacatcgtgaacctgcag

SEQ ID NO: 181906 - DNA, 802 bp, Homo sapiens
  Payload ID: 15816
  Gene Symbol: SIVA1
  Gene Name: SIVA1, apoptosis-inducing factor
  Uniprot ID: O15304
  ENST ID: ENST00000329967
  CDS Start-End: 103-630
aaacccgctctcgcccgcggatgggcgcgcagctgtgacgtcacggcgtcgttggtaaggggctggcggccggggagctgcgtagctcccggccccgcggccatgcccaagcggagctgccccttcgcggacgtggccccgctacagctcaaggtccgcgtgagccagagggagttgagccgcggcgtgtgcgccgagcgctactcgcaggaggtcttcgagaagaccaagcgactcctgttcctcggggcccaggcctacctggaccacgtgtgggatgaaggctgtgccgtcgttcacctgccagagtccccaaagcctggccctacaggggccccgagggctgcacgtgggcagatgctgattggaccagacggccgcctgatcaggagccttgggcaggcctccgaagctgacccatctggggtagcgtccattgcctgttcctcatgcgtgcgagccgtggatgggaaggcggtctgcggtcagtgtgagcgagccctgtgcgggcagtgtgtgcgcacctgctggggctgcggctccgtggcctgtaccctgtgtggcctcgtggactgcagtgacatgtacgagaaagtgctgtgcaccagctgtgccatgttcgagacctgaggctggctcaagccggctgccttcaccgggagccacgccgtgcatggcagccttccctggacgagcgctcggtgttcacactgaactgtggggtcgacgggaggggtgccttttacatgttctattttgtatcctaatgacagaatgaataaacctctttatatttgcacaa

SEQ ID NO: 181907 - DNA, 550 bp, Homo sapiens
  Payload ID: 15816
  Gene Symbol: SIVA1
  Gene Name: SIVA1, apoptosis-inducing factor
  Uniprot ID: O15304
  ENST ID: ENST00000347067
  CDS Start-End: 44-376
gggctggcggccggggagctgcgtagctcccggccccgcggccatgcccaagcggagctgccccttcgcggacgtggccccgctacagctcaaggtccgcgtgagccagagggagttgagccgcggcgtgtgcgccgagcgctactcgcaggaggtcttcgacccatctggggtagcgtccattgcctgttcctcatgcgtgcgagccgtggatgggaaggcggtctgcggtcagtgtgagcgagccctgtgcgggcagtgtgtgcgcacctgctggggctgcggctccgtggcctgtaccctgtgtggcctcgtggactgcagtgacatgtacgagaaagtgctgtgcaccagctgtgccatgttcgagacctgaggctggctcaagccggctgccttcaccgggagccacgccgtgcatggcagccttccctggacgagcgctcggtgttcacactgaactgtggggtcgacgggaggggtgccttttacatgttctattttgtatcctaatgacagaatgaataaacctctttatatttgcacaaga

SEQ ID NO: 181908 - DNA, 856 bp, Homo sapiens
  Payload ID: 15816
  Gene Symbol: SIVA1
  Gene Name: SIVA1, apoptosis-inducing factor
  ENST ID: ENST00000553819
  CDS Start-End: 32-541
ggggagctgcgtagctcccggccccgcggccatgcccaagcggagctgccccttcgcggacgtggccccgctacagctcaaggtccgcgtgagccagagggagttgagccgcggcgtgtgcgccgagcgctactcgcaggaggtcttcgagaagaccaagcgactcctgttcctcggggcccaggcctacctggaccacgtgtgggatgaaggctgtgccgtcgttcacctgccagagtccccaaagcctggccctacaggggccccgagggctgcacgtgggcagatgctgattggaccagacggccgcctgatcaggagccttgggcaggcctccgaagctgacccatctggggtagcgtccattgcctgttcctcatgcgtgcgagccgtggatgggaaggcggtctgcggtcagtgtgagcgagccctgtgcgggcagtgtgtgcgcacctgctggggctgcggctccgtggcctgtaccctgtgtggcctcgtggagccggccttgtgctggaaagagcatgatgtgggcatgtgagaaacaaactcacccatccacacccgaagaatggactcagagacctcagagaccggagaacagcaaaaaactatccctaagaggccaggtgtggtggctcacaccttataatcccaacgttttgggaggacaaggcaggaggatcacttgaggcccggagttcaagaccggcctgaacaacatagcgagaccctatctctaccataaaaaagacccagaacatcctcgccagcctgtgctccctatggggcaccccctccagtggaagtgagggcagccacgcacccctgggaatgccttagagaggggccaatt

SEQ ID NO: 181909 - DNA, 550 bp, Homo sapiens
  Payload ID: 15816
  Gene Symbol: SIVA1
  Gene Name: SIVA1, apoptosis-inducing factor
  ENST ID: ENST00000553810
  CDS Start-End: 43-550
ggctggcggccggggagctgcgtagctcccggccccgcggccatgcccaagcggagctgccccttcgcggacgtggccccgctacagctcaaggtccgcgtgagccagagggagttgagccgcggcgtgtgcgccgagcgctactcgcaggaggtcttcgagaagaccaagcgactcctgttcctcggggcccaggcctacctggaccacgtgtgggatgaaggctgtgccgtcgttcacctgccagagtccccaaagcctggccctacaggggccccgagggctgcacgtgggcagatgctgattggaccagacggccgcctgatcaggagccttgggcaggcctccgaagctgacccatctggggtagcgtccattgcctgttcctcatgcgtgcgagccgtggatgggaaggcggtctgcggtcagtgtgagcgagccctgtgcgggcagtgtgtgcgcacctgctggggctgcggctccgtggcctgtaccctgtgtggcctcgtggagggctactcacctggtggatgggagtggacagtgtgga

SEQ ID NO: 181910 - DNA, 674 bp, Homo sapiens
  Payload ID: 15816
  Gene Symbol: SIVA1
  Gene Name: SIVA1, apoptosis-inducing factor
  ENST ID: ENST00000556195
  CDS Start-End: 309-581
cccctcctgtcccaagaggtattcatggagcgcgcggccctgccaggcacggcggctttctcgggagaccaaaggcaggcaagacagatgtgccccgtctcccgggagctccccagcctagttggggagaccagcaggaggagtcgccacaggtggtcggggcaggcacagagaagaccaagcgactcctgttcctcggggcccaggcctacctggaccacgtgtgggatgaaggctgtgccgtcgttcacctgccagagtccccaaagcctggccctacaggggccccgagggctgcacgtgggcagatgctgattggaccagacggccgcctgatcaggagccttgggcaggcctccgaagctgacccatctggggtagcgtccattgcctgttcctcatgcgtgcgagccgtggatgggaaggcggtctgcggtcagtgtgagcgagccctgtgcgggcagtgtgtgcgcacctgctggggctgcggctccgtggcctgtaccctgtgtggcctcgtggactgcagtgacatgtacgagaaagtgctgtgcaccagctgtgccatgttcgagacctgaggctggctcaagccggctgccttcaccgggagccacgccgtgcatggcagccttccctggacgagcgctcggtgttcacactgaactgtgggg

SEQ ID NO: 181911 - DNA, 1244 bp, Homo sapiens
  Payload ID: 15816
  Gene Symbol: SIVA1
  Gene Name: SIVA1, apoptosis-inducing factor
  ENST ID: ENST00000535554
  CDS Start-End: 56-529
gtcgttggtaaggggctggcggccggggagctgcgtagctcccggccccgcggccatgcccaagcggagctgccccttcgcggacgtggccccgctacagctcaaggtccgcgtgagccagagggagttgagccgcggcgtgtgcgccgagcgctactcgcaggaggtcttcgagaagaccaagcgactcctgttcctcggggcccaggcctacctggaccacgtgtgggatgaaggctgtgccgtcgttcacctgccagagtccccaaagcctggccctacaggggccccgagggctgcacgtgggcagatgctgattggaccagacggccgcctgatcaggagccttgggcaggcctccgaagctgacccatctggggtagcgtccattgcctgttcctcatgcgtgcgagccgtggatgggaaggcggtctgcggtcagtgtgagcgagccctgtgcgggcagtgtgtgcgcacctgctggggctgcggctccgtggcctgtaccctgtgtggcctcgtggagtaagtacttcagtccctggagctgctgagatcccatagccccagcaagccgtgatgggggacgggtgggtcacccatgtgggcccagaacacacacgtgtggcccctgatgcagtgccatctggcattgcctaacgggacatggtggcaatagatgcttggcccaactttagtggttagtaatcctctctaagggaaagctgaacctcacagatgacctgctctgtatccggctctagtccctgtcttcagccacttcctgttctgatctttgagcacccccacctcctcctcctctggtctttgagccccccctccccccgtccgaggagcccctggttggtgacacaggtgcacaccgcagcttcaccacagtcatgcgtgccgtttggttgtagaccctctcaggcaggaagtggagtgtttgtgtagtctcccatttgtgggtgggtttgctgcagctggctggatcccgtccttactcctaaggtggggaggggcgttctcaccctaggggctactcacctggtggatgggagtggacagtgtggagcctgtttgccctgccccgtgagaaagatgacttcatccagacacatgtggaactggctccatagacccaaagcaagcttagtccaaacaatgtctgaaattgtccatctaaaatagaaaccacatgttacatctcgagtcctttctctcgagcctttcttcagtcg
